United States Patent Application Publication US 2007/0054278 A1 - sequence listing, part 96

SEQ ID NO: 97300 - DNA, 137344 bp, Homo sapiens
gaatgcttgcaggaattctcaaagttgaactgtgcataaaaatcacttgaggtgtcataaaatttcacatcccttgaactcatcccaaaaaataaaggaaaggtaatgaggaattgtttctagatacctttagtggagaaaagtacatttgttgtatgcttgctgtatgtcgggcagtttgctaggcacttggtatacagcagagtggctaagatcacagactttcctgtaagaggggcctgaatttgagttactccatcatttactagctatttgatcttgggaaaattatttaacttccctgaaactgttcccatattttaaaaatataaatattatcctacctttctcactattttacttaggtataatccttacatatagtaattgcccaataataataaatgactgcataaaaacacatgcacacatatgttcattgcagcactattcacaatagcaaagacatggaatcaacctagatgcccatcagtggtagattggagaaagtaaatgaggtacatatgcaccatggaatactatgcagccacaaagaaaagaatgagattatgtcctttgcagcaatatggatgcggctggaggccatattcctaagtgaactaacacagaaacagaaaaccaaatactgcatgttcttacttataagtgagagttaaacactgagtacacatggatgcaaagaagggaacagcaggcactggggcctagttgagtgttttggatgggaggagggtgaggattgaaaaactacctctagggtactatgcttataacctgggtgatgaaataatctgtacatcaaacccacataacatgcaatttacctataaaacaaacctgctcatgtacctcctgaaactaaaataagagaaataataataataaatgattgcaaatgttctcagcagtgttattcccacgtttcaatgttcttatctcctttagcaaaattccttctattcctgctttttcctctacatattaccaaaactcctttggaaaaacttataaataatcaacattgtgtcaaattaaaaggaattattttcatttcatttggtttcctggcaggctatcctttcattttggaaaaacttgcttctagacttctatgatgccacattccactgtttttctcctacctcaatggttgctctcctactttctttgatgcattttcctccaaaaccattctaaactcagagtccttcagggtttgattttgatccttttcctcttcacatattttcttcttaaatgacctcatcaatctatgacttaacataacatgtatattttgatgactccagtttttatctaaaatctaaatagtgactctaaattcataaatctgaaggctacttgacatttctcttttatctcttataagcatcttaacactaatgtatcctaaattgaattcttgataatctcaccaaacttactcttcctctgtgctttttccctcctataatagtgcacagcacaaaatatcttcccagttattcaatctaaaacctagaattcatctttcattcaattttttactcatccacttaaatcaaatcatctacaggttgtgtcagttcaactcttaaaaggtatttcgaattcatcaacttttcttcattcctattcctactattgtagtccaagcatttcttgcctggactgctacaataagctcctaactttttctctttccttcctccaatttagtttattcatgacatcattcaagagatgtgacttctgttttggaattatgagtgttataatctagaatcaccttggattatttcagaatcctgagatcacataatgctagacgtgaagagatttatgtatcaagtaatccacatccaacattaataagaatagtttaggttatgctaagtctaggtaataaaaaaagccccaaatctcagtagactaaagcaacaaaggattctttcatgatcaaactatacaatcatcatggggtgtctgggggttttgttctgagtcatctacattccaggactcatcctgatggagcagccactgcctggaatcttgccagtaccaagaatgacagaaaaacagctatagcaaaaacacccactgtgttattaaaacattcgctaaaagtgacatccttcacattcaatcaatttctttggccaaggcaagttgcttggccaagtctaaatcaaaaaggtgtagggaagtgaaatacctccatgtgcctaaagagagaactgaaaatattcagtgaatagcactaatgatgaattctcccttatattttacaaatgaagaaattgggacctagggagactatgtgaaccgtaagatcaagaagctgatttacatcacagtcaagactaaaactgagtcttgaactcactgtccagtgcttttcctaataatgaaccgggaattgtttgttccttattcaagcaaaatacatttaaatgtcttaatatcaatattttatttatttaagtaatatcaaccttctgtattaaaacatttttatacctttgcttagaggccttgcttctccagtctcattgatgctctagaaagatgccccagtgttaaagcactcaaaatctctttgacctggctgttctcatttctagcaaaactaagtcattaagtcatgttttatgctagggattctaaacacactggcttaagaaatgtcaaggagataagcaagagaactgtgaatctgtatgtaaattaagcaccatctgttaaatccactagaactgtattcgcaacaagaactccaattaacaatagcttagggaggggagatttatttgaccctcataacaagtctaaaggtgaatgactactgatgttggttccataggtcaatggtatcagagcccatggatctcttggtcttttctcatggacacaggagggctgtgactgctccgtgcattacccctgtgatcagtctagaagaagggggaaggttgaagccagatgagactgccccttttattggagaaccaaaagctttcccaggatcaataatccaccccttattctttcagactattataaaggtcctatttgccaggaccggggttacatggccaaccctaagagaaagggagatagaaaaaaaataggaaaaaagattatcgttgattggctaagactaatgctgccttgaacaagagaagggttctgttggcaaagaatagcatgggggtaggaggcggtaaaaatgaagaccaagtaagcaaccaacagtgtctgcctgattccctgattgaatagaagattgttctgagagaatttatctatcattcttaaattttacattcaaaataatgtgaataaataaaatatgtatttaccactgaactcatagtagctatgttatgtatcttaataactggtgaaaataaaaaacatagtcaggtgctgtataatgatgtttcagtcaaagatggactacatatacaatagtggtctcataatattataataccatacttttactgtacttttctatgtttaaatacgtttagagatacaaatacttaccattgcattacaatagcctatggtactcagtacagtaacaggtttatagcccaggagcaataggcggtaccatatagcctagacatgtagtaggctataccatttaggtgtgcgtaaatacatttcatgatgttcacacaatgacaaaattgcctaataatgctttcctcagaatgtatccttgttgttaaacaatacaggatggtataatgaagctacgtttaaagaaaatatattccataatgttcacacaatgacaaaattgtctaatgatgcttttcttagaatgtatccttgttgttaaacaatacagggttgtataatgaagctattacaataagttctgctataacacttgttttgaaaatacaaatttgttccaacaagattgacatgttagggaattgtttgaacataacacaatttcgcatttgtttgtgtgtgattttgtctacttgaaacactagtcgaatgcagaaaactacccagatgacctgagccacataagaatacacaaaactcacacaggtacaatcctcaaaccttaccagtgacctcagttcactgcctgagttatgagccacacccatccacatctggtgtaataaatttcccccgatttcaaataatgcttcttctgccatttcacaacccttaagctgtgacctttctgaggcccatttccacaagcaaatgccgtgtctttttcaagataaagggttatatttgctgtagtatttatgcatttcttaagcatttatcatgtgtaaattcttgctaccatttttattaggtcttgatctgatttttatggtccattgacaaagtttctgagtgctctgtcctaaacctcatgttacccattaagtcctgtagttttaattgaactttttttttcagtgataccgtatctaaataaatccctggtggttaccaggtgaatataaataagtgtgtatatgcatacatacattcatacatatataatattcgaacacaattgaggcattttgacataaatccaaaaaattccttttatattttagaggtaaataagcctttaaaagtatttattaaatgtacttgggaggatttattcaaaaaagactatcaattatattaaataaaagccattcaatacgccaagctatatatagatgtctccatagtgggtgaagatgtgtcatttatcttttaagataattatgcaaactatattgagcccacacatcctgagctgggaaatgacttttacatctttctcctcatttataaatcttttccaacagaagttatgcaagattcagactggtcagcacagagctggattttggtggtccctttacaataggagagaatccattttcctccttagggtctttcttttctttaacgaaggcatacagagcactcagcacattcccagagcttcttagaatttttcccttgagagatctcaggaaatatgaggaaaaacaacttcaaaaaaattaatgaaaggcctatcactgtctgcctttctctcttttaatccctgccctatcctttctactttctagaagtgtagtgccccttcagtttcaaacatttttcctctccttaaattcccaaggtgggatgcccttttctggcactccgtctatgaaagggacagggaaaagatcttatagaaactgaaccctgacacggggcttattttcctaaggaccaaaacataaaaggacagggtgggaccatggaaggattaatttcaggcaagggcagcctgtggagagtgagaaatctgaaaaggctctaggcttctatgggcattcccctccacttcttctgcctgctgccagatgactctcacatgtgaatccttatttcctcaggaatgcggatcagggtttggcaagtatgttttcagtaaataattgctgaatgttcaacgcttaaaggcagaagcataactttgagtgtgcacagtaatcactgaaaatgattctgtactcaccgttttgatgcaaatgcaaattctcatagcccctgcactgactccgtgggtcacctgtgagtaactctagccaaaagccacgcacaagccctggtctgcctccaggcagcagaccacaacacagtgccctgagtgcacctgcacacacccatgggcacacattaaacccataaacggcgggttatgctaacgtgtacttccttcctcactgcctcaccttgttcattttcctttttccccacccctcaccccatacaataggatttttgtttgcttcagtagcatgtgacagcacagtccctgctttgcctagctctgtgctgcaagtctctcaggtaacaggtggcagcttcccctgttggattctaggtttaaaaaagaatgacctcatgtgggtggagctctgggacttcgtagaggtggtggcagtcacagccaggtaaccctggagtgaagcggtttagttagaagggagcagataaactcgtcactctagtagctttaaccctcaccctgaggcaccttagcaatcagccattgcctgcaagcctccaaagcttgtctttgcctaatatggagcccaaagaagccactgggaaagaaaacatggtcaccaagaaaaagaatctggccttcttgaggtctagactctatatgctggagagaaggaagactgacactgtggttgagagcagtgtttctggggaccactctggcaccttgaggagragccaatctgacaggaccgaatacaaccagaaattacaaggtaaccaaaaagaaatcaattgtcccagttactgcactcccagctccatttctgctacgtttccaattgcaaagaaaacacacaaggcagaggggaaaattgaataccacctctccttcccacaaaataagaagatgaaagtaaatgtgacctataaattatagggaaaaaaatttattacgtgattcaatgttaaagagtcaattccgaattactcttaatattgctgtgtttttcttttttttttcctggtgagggtaatcatttttcttctaacttcctcttttcttctcccttctctacccaacttaagaagtgggaaacactggaaagcaaatgagttagaaacctacaaaagattgtttatctcaatgggtagatatgtgatattacaccatgagatatatctaggtaatggtactgaactatgattgtggttatcttaaataggggcatgmaactataatcgtgtctgtgacaaagaaggaatgttatagtcagagagacggtataaaaagatttgctgaaattcacttaggtgattatttcctttgagtaaattgaataatactcaaatatggtaagaaatgtttagcatgcttattttsaatgacatttgaggaaataacttcagtttattttgtgatggtacaaagataatttggcacagttatgatagcacatcatttgtttcagggccttaatctatatcctgtcctatctatcctttctttctctcctgtttcctgaaggtcatttgttctagtaaaatttcattttgatgttgatattgggcagcattttaagtcttttcttcggtacttgttatgtggtcctccagaacttgcctctcctgmttttagcacaaggtgtgtctgaactctcatcatcccactgtgagctgtcgttttggatttaaaaactrtgatgaggtcagaaagaccgataggacatgcttatatttaacaaatctytttccacaaatatgagcttagatttagttatgcaaattaattaagttaaataagttaaattaaatgcatttaaattaaatctaaaaattattactataagttaatgtgtaaaaataaaaaaaaaattaccagtagttcagcactaaagcacagcatcaatcttatcctcaaatactttttttttaaaatgagggagagcattgtttaatctttgaaattaatttttctccaagcaatagatacattggaaagaatggatgtcttaaaatttcaacttttattttagattcagggggtatatatgtgtgtttgttacttgcgtattttgtgtgatgctgcgatttggggtacaaatgatctcatcacctgggtactgagcatagtacccagtaggtggtttttcagcccttgcctctgtccgtttctcgccactccagtagtcyccagtatctattgttgccacctttatgtccatgtatgtctaatgtttagctctcactcataagtgagaacatgcagtatttggtttkctgttccagcattaatttgcttaggwtaatggcctccggttgtatccatgttgctgtaaaggacatgattttgttctttcttctggctgtgtagtattccatgatgaatatgtaccatgagaatttaaaatcatacacatttagtttctaaacctggttcttcaacttactaccaattagaacttgagcaaattacttgaaatatctgagcctcaattttcctgtctgtgaaagtgggactaatgatacttgccacatagtgttgttgggagattgaaattagataattacaaaacatctagtatactggctgataaattttaggaataatgggtaccataatgataaaacagaacttgcccaatattaatcgaagtttgtataccttatttctctttttcaattcttttttgtcctttgataaagagaccacatctagaaattcaggaaaagcccattgctttatccctaatgacrtgttttttctgtctgagtttcactaattcagcatctatcagagtctccattagcaaaataaaaacagaaaataatttttgctattcacaaatttttgcttactaaattttcctaaaaaaataagtctatgaccacacaagagagcagacatgggttggttacyttgcagaagacctcagacttcttacgcacttcatttgatttgtggctttcctgtgctctgttggattctttgaaggtggaaggcaaaactcagcagttaatacatgcttctagtctgtgcttgagaaaaatcaccaagaagtatagaggagcacataagccataaagataggctggcctcctgagaagtaacatcttaaaaacgtaacccttaaaagaatccaagtctgattatcgaacgcctaatagagcttttagcatggttcgactagaacagggaaggcgacaagggaaggcattttctcattaatgttcaaagcaatcagttctgtgcgtttgttctctggcctgtacgatacccattattatgcagatgagtcctaaatcaccttaagaagctctttattattcaaatgccgagagattttcctctccctttcttggaactggtggtccctgggaggcactgaataaacacctggactggttagagccctcagatagatggcctaaagctcttgtgaggtcaaagagtgctttcaaatactggaatttctggcaacaccacattcctcaaattatttagctggttatttaattagttatttaattggttgtccttcaatgctatattacctgagtaaaattcactgctctaactctctggggaagcaagttctctgggttccgtaaaatgtaagatttttctttggtgctcttgagcttgtcttttaactcatgatacctagtctatctgttcaattcaatttctcacatcactttagtagcatgaaacttaagttgtaataacaattttaaaaatggtacactggctgaattaaaacgatagaacatggctctaaccaggacatcctaaaacctttgcagaagattgtgatcacatcaacatagtcattcctactaagcctggagttgtataataatagaaaggccacccttaggctcccttactccttgaacagattaattcagttgactagcatttattgaatatgttataccttgttctttgaaattaatttttctcaaggcccttgatacattggaaagaatacaaattgtaaaatcatacacatttggtaaattgacatttattgaatgttttagatgctgtgtcttgagggttacaatgaacagcaaaaacagaatatgtgccaggaattacaactacaaaatcatcaagaaaacatgtctgacctttactccaaagaggctcaaagtctggttgggaaagataagacaggtaaacaaataaatacaataaagtggcatgatagaagtggaggtaggatcagtgggtccacaaaaggaggaaacggtctattcaggactgcatgaaggaggttgtcagaaaatggtgtctctaagaaatggtaagggtagggatgagggaaggtacaggtaagagaatggcattttaacctcttcactgtatttagctctgtctgaaatggtttttgtttccttgtttatcacctgttattgactgttgttcccctcccttttctctccctccccgctcatacaccatgaaagaaaccctatctgtcttgttaactgttgcatctcagcagcccagaatacagtaaacactcagtaactgttaaatagagtgaatgacttgaatgatcaggcccaagcaggaaactggtgtgaagaaagacaccatggcctgaaataagagccattgtatttatctaaatatgtgaggacacatgtttctatcagaaagatgattcttcagttaaatgaacatcagagattaaaatgtacagaatttatataataagtaattcttagtggaagcctgtttcattcccaactcgacctttcagagcacacaacaaccatatttcaaaaattcctcttctattagtgacaagagccatcttaacttccactagctcaattcctcatttccattctactgggagccatagaaattacctaaatacaagaaatttagwggttgagttgtaaaaactcagaaagggtttcataaatacttatatacatgatctctacatttgaaatatgcctaatttaaatagttatacagaactgtgtctgtgcatatgcagatatatatgtgtatatatatgtgtgtatatatatatatctccagtatgtagatatagatatacatgtatgtacttgtatgtgttcgtgtgtgtacttgagacacttttttgcaatgattagactttttattgaaagttactataaaatttgaagaacaaaaagaacaaaagtttactaacattcaggagtcttttctgaaaaccatatatgaattatatcactgacattataggtttcctctcagtatgggtactatggactgaatgtttgtattcctctaaaattcctatgtgaaacctaatccccaatgtgacagtattaggaggtggggtctttgggaggtaattaggtattgagggtgaagctttggtgaatgggattagtgacccttaaaaaaaaaaaaaaaaggcaagagagagcttgcttctctctgctctcagccatgtcaggatacaagaaggtggccatgtgcaaaccagggagtgggctctcagcaggwataagatcttccgcattaggaataagatcaacttgattctggattttctagcctgcagaactgtgaaaaataaatttttggtaaacttaagccacctaatctctaatatatttgttatagcagcccaaaccaaccaagacgggtcgattacctttatcctctatggccacactaaacttctggttaattttctggccagtgcatatttttgtttatccaacaccaggtgaaaaggtgagaatacatgggtaaaatgctattacccattaccactgccggtaacacaaggcaaaaattacgtctccatttcttagtgtgtctgtggtaccttctatttttgcaaaggctattgtatcattctaattaagaaaggttatctttatgagacccaaagttgtcttaatatggtgcgaaagatgaaccaccctactgtatgaactttatacaaaataacagattgtgccatgtggggacaagtggctcaaataataaattagacttggtaagactatgagggcatttaatttaaaatgttttttaagaatatagacagtctgtcagggagcagaaattaacactggaagacttggtgagttttgttcaaggccaaatgaagaatggagtaaaacaaattgtccagcttcctgtgcatgtttctatcccagtgctacaaaccctttttgttcgtgtctgttctttgattagtgagtagctccttcccctttatctgccttcatacactctacagtgaaatgggaagtatttgaatcagtaatgtgacaccagtacaaacaggtgtgtgtcatagtttgaagggcaaatctttctaaaaggcaagacgctttaaaaactcagtaacttttgtcttactgcatatatagaaaccagtgtaaaacacggtattttactttcctatttttttcagtagagacatcttgcagtttttagaaggaccatttgtgtcaaataatgtgtgagtcacagaaattgagactgtttgagctattctactactaccatattgtgatgggcaaatttattcctatgtttgaccgatatgactttaggtataactttcttaaaagtagcaaacacaatttctagttgtgctttttttttttgtttataaaaattatgggtttatcaaaatgagacatcaagaggaagaaggaatgaaagaaaggaaggagagagagaaggggaggggagagacagacagaaaccaagcaagcagcaagaatgaatagaaatataccttaaaatagtaataaagttggagaaatgatgggagagagaaaagcacccaagccacattcatctttgtttctgttgacacaggaaaagaaaaaaaaaaacctctgtttacagaattactttttcttgatgccataatcatattagcatcagtacctttatgaatattgatttcctgataaaagtagaattattgcaagagttgctaaatttataagcagtatcgttcttagaaccagtcaagactcaaagttatggcttatttgggagtcctaccttcacttctagactgtttctgagactgtggaattttctgttcaacaggcctcagtactggctccaacatttgcttggaccgcttcttatcccatgctctcaagggcagactgtggttgctggtgtgcatgctcttaggcctaaggcacaattgatgatgggggtgtttctggagcttgatcatgctggagtgttcagatcatgtctaccaggttcctctgggtgggaaagctggtagagagaagagtagggattcaagcctcaagattaggtaggagtgcgtgtgtcccatggtcccctgccaaattttggcataaaactctgagggatatgagaaatctaaattagaagttggcctttcagattgttataaaatatatttatcaagacagaaggaaatatcacattttatttaatagtttgccagcttcatttataayttttaaatatgtagatctggtatgctggcctccatctgtatccttgctccaggtcccacaaaggaggcagctatgtgtggtttttgactgtaatctatttcaggatataacccttcttctatactaggttgtgaaagtaagagggaaggggagggaaggaagagattgagtattagtgttatgttatctgctaggagctatgctagccagatgctgtcacacacactgttactgaatcccaacttctcttctrttcagttctgattttatcattgagaaaaataggtggtaggccttgggtttgagatgtcacatgcttgaaatatttgcaaaatggaatgaatttaactagttgactcagtaggtattttatacatatgatttactaagaagtcaaagccatttgatggttgcagcacatgttttgtaatgtgatgacatttctctgctaccataataaagcttaacttgctgtttttcactttggaatatattttctttcttttgacttatagtggcatgtccctgccagactgtcactgtttaataaatactttttttgtttagttgtcggggaacaaaattacaaaggtaggttaagcaaaactgtcttatagtaatagcttaatgatctccatttcctgcttcattgcgtatcttgacrctgaaactcatctttctttaattttatgcctgttgtcatttatttgcatctcaataaaacttaatatatatcagaataactgagagtcctattctacagcaatgagaggagggaatacatttgcaaatgaaaagaatggaattatgtgtgggaaacaagcaactttttatctggataggtgatatttcagtagaattgtatgaagtcagcttaaattgtgagtcataacttaaatgcagcaggaacacagagtgctatgatttaagactttgtccaaggttttctgaacaatgtttttcttgattaatgaatcagagaataaatgaatagtctaagatacctgcactgaagccctcgatagaggatgcaatcttagactgacatacaattcttacttaaagaagaaaacttaaaggtcatgtcatctagctactactctaagtattgtgagtcattatagcacttcacagaaactgtttttcctgaatgcttcttaatgttaggtctccagtgtcactacaaaaagccatcacagatttctccttctgtgtttgttgtgaaatggttgatgaagacattgtttacctctctcagattttattcaatggaaagctgactctccttaagaataaaaacacatcccctcccagataaaaacaagcaatttactatatttagctgctaggaccttagggtcaaatttgtttttgttccctggcctttatattaactattttttctgtctaaaagtttctttcccatagaggcagggtgtggtggctcatgcctgtaatcccagcactttgggtggccaaggtgggtctatcgcttgagcccaggagtttgagaccagtctgtgcaacatggtgagaccctgtctctactaagaaaacaaaacaaaacaaaacaaaaaattagctggttggtggtgcatgcctgtaatcccagctacttgggaggctgaggcacaagaatcactcaaacctgggaggcagaagttacagtaagctgagatcatgccactgcactccagcctggagtctcaaaaatagagtagaatagaatagaatggaatagaatagaatagaatrgaatggaatggaatggaatggaatggaatggaatggaatggaatggaatggaatggaatggaatggaatggaatagaatagaatagaatagaatagaatagaatagaatagaatagaatagaatagaatagaatagaatagaaaagtttctttccccaratctctgcaagagcagatttttatcactgaagtctctgttcrtcttttttgggagtccctccctgaccatccgacctaaagtgatgtaggtaagggaatacctttcctctaccctcttaaattctgtgactaggacctgtgaattgtatagacaaaagacatactaacaaargaaaaagcatacacatttwacttgaggttaacatttttatgtgtcgtaggaggctttgtaggaagaaagaagtaaaaacctcaaagaagcagttagacctaggggtttacataacattttaacaaaggtcataaattgtggagatatgacaaagccaaagtaaaagagtttagggttggggaaagaaattgtggaaaagtgactaggaaatacatgggagaagctaatggaagataagggttatttttgtaagatttgtttgtgtagattcatctctgtgtcaactccctgtctctgatgatgagaatattcccttcttggtgatacagggagggcacttttctcatggtaaatttacactctgcttttaagtaaaaaaggaaaaggcagagagcccttcctgcatctgctattgagcatctccagctcaaaataatcaatatcccaaagtggcatatttagggatggtgtgttctgatccccctcagtggctttcataccatctattactctatgaaattatactacttcattctatttttggcttttgctgtcatttgaatataattctccttggggaaaaagacttagcatttaagcaatgcctggtatacagttattctgctcaatgactatttattgaatgactttaaaatatccagtgaataattacaactatattgatccttatgacatacttgcttttacaattctgtcattttcacttwcccactatgtaatggtagttaactttcagttaatttctttacattctttttctgtaaagaaagattataaataaataaatttaattaaagaagagactagaaagagtttcctggccaagaaaaataggatctctttttaaatgaatttattcaacaaatatttgctaggtattcgtatgtgccaggtatgactaggtcctaagaatgttttttaaaatatcagaagcacacccagcccactgagtgagacaggttgtgaacaaattattgcagtaatgtaacaagggcctgaagtatactgcaaattgggtttccgacttgcaaattctgaaatagagattcgggtggaggggaattattaggcaacattctgtgaccaccacctggggaagaaaagggaaggacataagcctgggcacagggagaggccgagctgtgatgtggtctcattggaagctttagccaactctgagggaagttctgaagacagatgattttttggagttgtctccagtgttgtgaaggacctgggcccttgtatcacactttacgtttggggatgtggctatcttgggaaaaggcatggcctgagaggtgctttcatctgagataattcctaaagagggcatatctgctggttgcactcccggcagctgaaataataatttatcccttcctttaaggggaacgggtgctaacatggcatccaccacatattaagtggttattattattagagacacaaataaagcaatataggagctatgataagaaagagcttaattgcacctctgaaatgccaaaagaaaatacactgaaatctgaatcttgaaatccaattaggacttttaggggcagaagccattccaggcagagggattatgctggtcctcatacatggaacaaggtaataatactaatttttgtatttggggatttctaaatggaagagcaggtacaaacaccaactgaacatctgtagtaggcacttaggtgcagtacgtcatttcatgctcttagcaactttgcaaataagttattgccatatatttatagatgataaaacagaggttaagagaggtataagcattctcccagtggtcacatagctattaatagcaactggtgaagtcagagttttcctgaggtttgcttggctccaaagtcagggctttttcaaccatcatgcagttttcctgttctaaccttagttttaatagtagtacctgttttatggtttgctcttaagaaatcaactgattttaataaacttttgaacaatactcacaagcatcaagagaactgtaagttctgccaatacattcatcggcaatcttgaagtgaacagtgaccaacaagtatttttcagtagctgtgttattttatgcctctcaacaaaatgttctatgtgcttggaaattagaaagatatgtacttgcattgaataaggtccatacttcacagaaacactagaatattctgctstaaaaatacaaaactgattatctgaattatctagtctttgaaaactccttgtcatcactaactacagagtacttacctggattagggtactcggtgaaaaactgggtcagaatgtcaaactacatggctcctttgcttaacactcctcattgcttttcatttttctatagctagcagcagtacccaaagaggggaatatataaaccccaggagattttacagacaatctattgtgcaaagaaaaaaataggtttgtttttcagtattgctctttgaaaatatttattgttgtgtatgcttcataatatgtatgatacattaatatgatacgtatattagaggtgtatacacagaacagtttaactgacacaacaaaaacatttgcagtaaaattctgacacgctactacatggatgatcatcaaagatattgtgctaactaaaataagctagtcacaaaaggacaaacgctatatgattctacttatatgagagtagtcaaattcatagggacaaaaagtagaatggtggtttccaggggctgggggaaggaggaaatggggaattattgtttaatgggtagagtttcaatttgggaagatgaaaaagttgtaatgattgcataataatgtgaatgtatttaatgatactgaactgtttacttaaaaatagttaacattgtaaattttatgtcctgaatattttaccacaataaaaaatgataaaaaagtttggtggcccttggtttacaatattaaaatggaatgtaaggcttttcccaatttgactctatctcatctctggcctggaggacagtgttacttttgtcaatgaaaagagtcaaactctgtgaaatatttgaagatatttattctgagccaaatatgagtggccaatggcctgtgacacagccctctggagatcccgagaacatctgcccaaggtggtcagccagcaacttggttttatacattttaagcttgggtcaggaaaggtgggacactcatcttctgctaaagactttaaataaaaacattttctgaagtacccatttatttaactcctcattgctctgtctgtgctatgctgatcactgtcggagcctgtaaattcaaagcaataccacttcagtatttttcaagacaggtaagctttgtttaattcctttttgaaatccactaatctactttctatgccaattagcagtcagaggaaataaatcacatgcccttccaatgaagataaaatattcccagccccagtatttgagctttcaaattcagagtctcagagggtctgttcctccacattttcacttaatacctcactggctcccctccaaaccctgtctgacatgcaattattttcaacctatttcacagaagtctgctccattcatctttctgtgggtcagatttccattgaaactgattttaaacgataaaagattttactgtgtgaaacgtatgttggtagggctcgaagcaatgctaagccaagatttttttgggtttatgggggcagatatgaaattggcagcatggagagggatgaaagaacatttataatcatatctgggggtttcgtaatgatctgtctggaataaaactgtatattgaattatgggtgggtgtttgcactatacgggtagaaagggaatcggactgatagaggcagggagggagtgttggtcagaagttctgaactcaatttctggctttgttacttaaggtagaagacttactctctctagaaattagcttcctttttttatataatgagatagagctgagcagaacttatcaccttatctcctctacctgctcttttcctgttgttccctatttctttaaatggcaccatgacccagttaacaagtcagaaatctgagagtcagctttgacttctcctttaccctctgcattgattactcaccagttcatgctaatttcacctsttgaatttcccttgatctgctctgttctttctatcttcttggcaattagactaagcttaactccctccttctttcccctagtgactggactgtccatgsgaagagccacttcactacccacaggcttcctcctcaccctcccctctcaaatctagttcagtggaggccaaagtgatcttgctaagagaatctaatcatgtccctcatttattaaaaaattcctcattgtcgagatctgtctcctgagaatttctctagacttgtccccttttcacaacctctatcacttgtacttcagctgcactaagttgttttcgcatctttttttgccaccaagcctttaaatatactatttcttttgctcatgacacttttgcatttctcttcaccttgtgctacctgtttcagatttcaactgtgtcacttctccataggactgatgtccaggctgtgctatgcttgcatgggtcacaggttatcataattmtatttatactaactacagttttaatttttttatttttaatttttgtgggtacataataggtgcatatatttatgggttacatgagatattctgatacaggcatgcaatgcatagtaattccatcaggaaaaatagagtatcaatcacctcaagcatttatcctttgtgttacaaataacccagttatactctcttagatattttgaaatgtacaattaaattatttttttattatagtcaccctattgtgttagcaaatactgggacttacttattatttctaactatgtttttgtacccgttaatcatccccctttcctccactacatcctccagactacccttcccagcctctggcagccatctttttttttttttttttaagagacggagttttgctcttgttgcccaggctggagtgcaatggcacgatcttggctcaccgcaacctccacctcccaggttcaagcgattctcctgcctcagcctcccgagtagctgggattacaggcatgcaccaccacgcccagctaattttgtatttttagtagagacaagatttctccatgttggtcaggctggtcttgaactcctgatcttaggtgatcctcctgccttggcctctgaaagtgctgagattacacacctsgcctgccatccttttactatctatcttcatgagttcagttgttttaatttttagcacccacagataagtgagaacatgcaaagtttgtctttctgtgcctgacttttttcacttaacataatggcctccagttccatccatgttgttgcaaatgatgggatattattctttttatggctgaatagtaagtactccatttacaccagtttttaaatactgaccaatattttaaaatgcaaagtgatttgtttgcagaatctttctggaataattcttaatcttttaaatttgtctcattcaactcctaatataacagcagtgctttggcaacttgactttataaaattatgtcaaaacattaaagcasttttcacagaaacatacacatggtattttaccctcatatttcattaattatgtaagtttcgttaaagtaatataattacaaagaagtacaactgacataatgargtcagctgttgaacacaattaagtcttgaaaaatatgccccttgattgttaagtggagaagtacatagacatcagtttgtgtatttwagggagataatggaaaatgttgatttatctcatgacttcaataccctgtctttacttctagattatacatatcttgatggtaagagctgttgtttattcatttaatatacacaacacaaagcacaatatcaactcaatatccaatatgtaatttaaaaaattaatattaaattagatataaggtttttttttcttttattattatactttaagttttagggtacatgtgcacattgtgcaggttagttacatacgtatacatgtgccacgctggtgcgctgcacccactaactcgtcatctagcattaggtatatttcccagtgctatccctccccccctccccccaccccacaacagtccccagagtgtgatgttccccttcctgtgtccatgtgatctcattgttcaattctcacctatgagtgagaatatgcggtgtttggttttttgttcttgygatagtttactgagaatgatgatttccaatttcatccatgtccctacaaaggacatgaactcatcattttttatggctgcatagtattccatggtgtatatgtgccacattttcttaatccagtccatcacatgaacagacacttctcaaaagaagacatttatgcagccaaaaaacatatgaaaaaatgctcatcatcactggccatcagagaaatgcaaatcaaaaccacaatgagataccatctcacaccagttagaatggcaatcattaaaaagtcaggaaacaacaggtgctggagaggatgtggagaaataggaacacttttacactgttggtgggactgtaaactagttcaaycattgtggaagtcagtgtggcgattcctcagggatctagaactagaaataccatttgacccagccatcccattactgggtatatacccaaaggtctataaatcatgctgctataaagatataaagttttttaactccaaagactatggaatttgtaaaattgttaacttaccttcaaattctaatattctttgatttgtatgtaattataaacatatttgtgttgtgatgaaattatatattagttaatggccagattcttgtgttgtattatctttgtgttctccacagtcaaatgactgtgaaagttgctcaataastaagtatcaaatggtgtatgtgtgcctgcctggttggttgttgggagtatgagaatgttccaacattcttgaagtatgtctttgttagcagcatgagaacaaacgaatacatactgcattttgtttataaaagtgcatattcctgaaaattatttttagggtgagggcaagtgctgttaagtaaggcattaaacaaaaccttaagcttggtatatgaaattattcactacaactattctttactragagatcagtaagatttcaatacaattaagaaaatctaaattcaggattatttattggtagctattgaaaaacaatatcagaggggaaccttaatctaaataaacaatgacttagaattttacaagtaataataagctgtgtactttagcaggacacagctgtttaatcatctccttgcccattaaacttgtttgagaagcacattctcagtgactgctcagaaacttatttgcattggtgatttagctttggggtaaatgattcagatttttaaaattcagatgttattatattatgctaaacaacatgccagggctatatccctagctcatttgaatttagcctgaataatagcagtgcacattaggcctggtgttgaaccgactttgtagcagtctttgctgtttttgctttttccagccaaggagggcaatttcctgatagatggtcaatctcccctcttgcccttggaacatttccaaggaaaaraaaaagagggaaagcaggtgtagccattcacaaccagatacagaataatggcaagtaaatcatggtcgtaaaaacaatgactgacattttttgagaggtttctggtatgtcagacattgaattaagcaattttcatgctttatctcaattctcacaacctcctagcagtgagcagtggttaacatgcaggttcaggagccagactggcttaggtttgaatcctggccctccactttcagtggtgtgaccttgggcaaactgcttaacctctgtgtgtgtcagcttctgcatgcgtaaaaggaagggaatatatatacatcttattgtgtttttgtgaagattgaagagaaaatgcaaaacaaactcagtatttgcactaaaaaatgttagcttttattatcatttaatattactattattctttttctctttctacagtgaatcaatttagtgaatccaaatgactttgtccaggtcacagaggaagtgggtgtcattgccagaactgaactctatgcctccctgtccagcaaaattccactacatagaacatgatgtaccatgatcacgacagttccaggcagggagtgaagggagagagcccaggcttcggagctaagcacataaagtttgaatccagctcttctgcatattctatgaatcactgaatatatttacatacattcactgtattcagtttcatctctaaaattagcataatatcccatttttagagttgtgagaaagataataaataatgcatattttaaaaactggtaaataaaaagttcttgaaagtggttgctcttattataggcttatcacaatacattataatcaaatataattgcagtaatagtgtataatgctttaatatcaaaaataatttgggggaacatacacgtttataaacaaaatgcagtatgtattagtctgttctcatgctgctgataaagacatacctgagactgggtaatttataaaggaaagagatttaattgactcagagttccacaggcctggggaggcctcaggaaactcacaatcatggcagaagaggaagcaaacacatccttctcatggcaacatgagaaggggaactatgagtgaagagtggggaaaaggcccttgtaaaactgtcaaatcttgtgagaattcactgtccaaaaacagcagcctaggggtaaccatccttgtaaccatccttatgattcaattacctcccaccaggtccctcccatgacacgtagggattatgggatctacaattcaagatgagatttgggtggggacacagccaatccatatcatggtatatatacacaatggagcatcatcagccttaaaaggaaaggaaattctgataacatgatataacatcaatgaaccttgaggaaacatgatacaacacagatgaaccttgattacattccgctaactgaaataagccagacacaaaaggacaaatactgtatgacgctacttatatgaagtacatactagtcatattcatagagacaaaaagcagaatgatggttgccaggggctggagggaggaagaaatgcataagtattgtttaataggtataaaatttgcttagaaagatgaaaacattctggagacgtttggtggtaatggttgtccaacaatgtgaatgcatttaatgccgctgaactgcacacttaaaaatagttaccattatacattttatgtcatgtatattttactacaatgaaaaagttggagaaaaaagaatatatccatctacgggaggaaaaatttgttattaaaattattgaaataagaattgcagtcctaaaattaactcatacctcatcctttttttttctttttcttttttttttttttttgagacggagtctcactctgtcacccaggctggagtgcaatggcgcaatcttggctcactgcaagctccacctcccaggttctcgccattctcctgcctcagcctccggagtagctgggattacaggcgcccaccaccatgcccagctaattttttgtatttttagtaaagacgggtttcactgtgttggccaggctggtctcaaactcctgacctcaggtgatccgcccgcctcagcctcctaaagtgctgggattacaggcgtgagccaccgcgccctgcctgctcatgcctcttcaggaagatttttgatattttgcgttgaattcctctaagaagtcatttcagtctttatatttcacagtagtgagaaggagtgcatgactgttcttacccacacatatgttccttttcgaattggcagatgagtattcatcaatgtagattctaacaatactgtcagaggagaaataatattgttgtgacaccaagagaacatttttattgtacacattaccttggaataacatttttgccaggaaatttgatgcagcatacatatggtgcctgawagaaagaagccaggcgaaagtacattagtcctgtgtgttgtacatgatatatagtcaaacagcctgtgagatagaaggatatcattaactatgaaggtcattccatcatcagtataatgtttggaacaaagatatattcagttatgctgtttactctatttatacttcaactctgcatctttataaacctacctttctatgtgatttttaaaactcacagaagacttttttttaagaagagaagatctgttttgtttaaattgccttgcactccaaattcaaataaaaactattatgaattttaaaacatgacttcttctgacattgaaacttttcttttttttccaatgactatataactgttaaaattttggaaaaatattttagtatgcccaggaagccttgctatgtctattctatttgcatttgtttcatagtctcattaggttcattttccccctaatttttcatttgtggtaaaatgcacataacaacatttaccatcttagccactttaaagtgtacagttccgtggcattaaatacattcataatgttctgtaaacatcaccaccacctccagctctcttttcatcttgtaaaaatgaaactctgtaactattaaacaataactctctcttccccccaatcctcagcccttggcaaccatctccactttccgtttctatgatttcgactattctaagtacctcatacaagtgggatcatatgtatttgccctttgtgcctggcttattttacttgccataatgtcctcaaggttcatccaggttataacatatgtcataattccctttctttttaaagcttgaataatattccattttctgaatattacacattttgttcatctatttatccattaatggatacttgggttgcttccrtgctttagctattgagaataatgcaatcctaccaacaatactcaagaattccaattccaatttctccacatccttgccaacacctctggcttatattttaaaatatattagccatccttatgggtgcaaagtggtatctcactgtagttatgatttgcttttccctcatgattagtgatgctgagcatcttttcatatgctgatgggacctttgtatattttctttggagaaaaatctattcaagtgctttgctcattttttattcaggttgtttattttgttgttgttattgttgagttttggagctctttctacattctgggtgttaatcttttatcagatatacaaatattttctcctaygctgtaaactgcttttttattttgttgatagtgtcttctgatgcacaaactttaaaattttcataagtccaacttttctgtttcttcagaaaagaagaaaaaagcctgagcctttgtcatatccaagaaattactgccaaattcaatatcatgaaatttttgccctatgttttcctttacaagttttatatttttagatttctgatccattctgagttaaattttgtatgtggtgttagataagggtctaacttcattcttttgcatgcaaatatccaattttcccggcaccatttgttgtaaagattgtcttttccccataaaatagtcttggcacccttgtaaaatatcatttgaccatatatgcaaggatttatttctggttctttattctgtttcattagtctgtatttatgccagtaccacaatatgttgatttcctgtaactttgtagtaagttttgaaatcacgaagcatgagttcctccagctttattcttctttttcaagattattttggcctattgttgtcccttgagatgccatgtaagttttaggatgggtttttttttttatttctacaaaaaaaaattggaattttgataaagattgcatagaatctgtaaatcactttgggtagtattgacggcttaacaatatcaagtctttccgtccatgaacatatcttctcatgtatttatatctttaatttctttaataatattttgtagttttcattgtacaaatctttctcctctttggttaggttaagtcataagtatttcattgtttttgatgctactgtgaatggaaacactttcttaatattttttcagattgttcattgctactgtatagaagaaatgcaactgatttttgtgtgttgactttatattctgctactttactgaatttattagttccaacagtttttggggtgaacatttagttttccacacatgagatcatataattttagaacagagagaattttacttcttttttttccactttggatgcctttatctctttttcttgcctaattgctccagctagaattttcagtactatgttgaaaagaagtggcaaagaccgggtgcggtggctcacacctgtaatcccagcactttgggaggccaaggtgggtggatcccggggtcaggagttcaagaccagcctgaccaacatagtgaaaccccatttctactaaagatacaaaaaaaaatttagccaggcatggttgtaggcacctgtaatcccagctacttggaggctgaggcaggaaaatcgcttgaccccaggtggcagaggttgtagtgagccgagatggtgccattgcactcccgcctgggtgacagggcaagactccatctcaaaaaaaaaaaaaaaaaaaagtggcaagagcaggcatccttgtcttgtttctgatcttagaagagaagccttcagtctttcaccattaagtatgatgtttgctgttaattttttatatatggcttttattatgttaaggcggtttctttctatcccttgtttgttggattaaaaaaattttttatttctatagcttttggggtacaagtcktttttggttacatagattgattatatagtagtgaattctgacattttagtgcacctatcacctgaataacgtatgttgtatccaacatgtagttttgtatcccatatagaataatggtgtccagctccatccaggttgctgcaaaagacattatttcattcttttttatggctatattccatagcacatatatatatgcacacacatatatatagcatatatatatatgtacacayayacacacacatatatacacacacacacacacacacaccatattttctgtatccactcactggtcagtgggcacttaggttggcttcatatctttgcaattgtgaattgtgctgcaataaacatacaagtacatgtgtctttttcatataatgacttctttcctttgggtagatatccattagtgggatggctggatcgaatggtagatctagttctttaaggaatctccatactatttttcatagaggttgtactcatttacattcccaccagcagagtagaagcattctcctttcattacatctacatcaacatctatcattttttgactttttgataatggccattcttactggagtaagatggtatcccattgtggctttaatttgcatttccctaacaattactgatgttgagcattttttcatgtttgtgggtcatttgtatatcttcttttgagaaacgtctatttatgtcctttgcccacttcttgatgaggttatttgttttttccttaatttgtttgagttccttgtagattctggatattagtcctttttcagagacatagtttaaaagtattttctccactcttgattgtctgtttattctgatgattatttctttggctgtgcagaagctttttagtttaatcaggtctcatttatttatttttgctttttttccatttgcttttagggttttagtcataaatactttgcctaggccaacgtccagaagagttttttcaaagttatcttctagaatttttatgctttcagccctagacttragtctttgatccatcttgagtttatttttgtataaggtgagagatagggatccagtttcattcttctacatgtggatatctagttttcccagcaccatttattaaatagagtttccttttcccaatttatgtttttgtatgctttgttgaagatcaactgtttataagcatttgactttatttctgggttctctattctgttcccttagtctatctgcctccttttgaaagtaccatgttgttttggtaactacagccttgtagtataacttaaagtccagtaatgtgatgtctccagatttgttctttttgtttaggatcgctttagttatttgggggcttttttggttccatatgaattttaggattgtttttgctaattctgtgaaaaatgattttggtattttgatgggaattgcattgaatctgtacattgctttgggcagtatgatcattttcacagtattgattattccaatccattagcatggaatgtgtttctgtttgtttgtgtcatctatgctttatttcagcagtgttttgtagttctctttgtagagaattttcacctccttggttaagtatattcttagttattcaattttcttttcttctttttttttttttttgcagccattgtaaaagggattgagttctttatttgattctcagcttgctcattgttggtatatagcaagcagcactgctgatttgtgtacattgattttgtaacctgagactttactgaatttgtttatcaaatctaagagtcttttgaaggaaaatttagggtttcctaagtatagagtcatgtcaccagtgagcagtgaagtttgactttctcttttccaaagtggatccccttattttcttctcttacctgtttgctctggctaggacttccagtactatgttgaataggaatggtaaaagtgggcatccttgtctttttccagttcacaggaggaattctttcaacttttcttcctcagtgtgatgttggggtttgttgaaggtttttatcataaagggatgctgaattttattgagtgcttttttctgcatctattgagaagatcctatgatttgtgtttttaattctgcttatgtgatgtatcgcacatattgactcgtatatgtttaaccatctcggcaacctgggtatgaaacacacttgaccatggtgtattacctttttgatttgctgttagattcagctagctagtattttattgagaattttgcatctatgttcaaaagaaatattggtttgtagctttctttttttttactttctttctttaatttttttttattattattatactttaagttttagggtacatgtgcacaatgtgcaggttagttacatatgtatacatgtgccgtgctggtgtgctgcacccattaactcatcatttagcattaggtatatctcctaatgctatccctcccccctccccccaccccacaacagtccccagagggtgatgttccccttcctgtgtccatgtgttctcattgttcaattcccacctatgagtgagaatacgcggtgtttggttttttgttcttgcgatagtctttttttattatatcctttcctgatttttgtatcagagtgatgctggcttcatagaataatttaggtaggattccctcttcctctatcttttgtaatggtttcagtaggattgatgccaatttttctttgaatgtctgatagaattcagctgtgaatccatctggtcctgggtttttgttgttrttgttgttgttgttggcaaatttctagttaacttctcccatctcgctgcttatcggtctaatcagggttcctatttcttcctgacttaatctaagagggttgtatgtttccaggaatgtatccatttcctataggttttctagtttgtgtgcctagaaatgttcacagtactctcaaatgatcattttttatttctgtggtgtcagttgtaatgtctcaagtttcatttctaattgagcatatttgaatcttctctcttttcttggttaatcttgctaatggcctatcaattttgtttatcttttcaaagaaccagctttttgtttcattgatcttttgtatttttttgttttaatttcttttggttctgctctgatctttgttattcctcttcttctgctagctttggattgagtttgttcttttttctctagttccttaaggtgtaacattagattgtcaatttgtgatcttttagactttttaatgtggtcgtttagcactataaactttccttttagtgttccttttgctgtatcccagggctttgataacttgtgtcattatgatcattaatttcaaagaatactyaaatttctatcttgatttcatcagtaacctcaaaatcattcaggagcagatcgtttaatttccatgtgtttgtatagctatgggggttccttgtggagttaatttctagttttattccactgtggtctgaaagatagttgatattattttgacttctcaaaatttattgagacttgttttgtggcctattgtatggtctgtcttggaggatgttccatgtgctgatgagaagaatgtatattctgcagttcttgagtagaatgttctataatatctgttaggtccatttgttatagaatataagttaagtctgttgtttctttgttgactttctgtcttgatgatctgtgtagtactgtcagtggagtattgaattttcccactattattgtgttgctgtcttaggtctagtagtaattgttttatgaagatgggagctcccgtgtaaggtacatatgaatttaggattatgatatcttcctgtcgaaattatccttttatcattataaaatgacctttttgtcttttactgttgttgctttaaggtctgtgtgatctaagaataaccattcctgttcgctttggtttccatttgcatagaatatctttttccacttttttaccatgaatttatatgaatctttacattttaggtaagtctctggaagacagttgatatttggtttgtgatttttttaatccattatgccaatctgtatattttaagtggagcatttagccacttacatktaacattgagatgtgaggtatagtttcatttatcatgtcattgttacctagatactttcagtttttctcattatgttactgttttataagccctgtggattttatgctgtcaagaagttctattttggtgcatatcaagcctggctgttcttggtgtataggaatgctagtggggtttttttggtatgttgattttgtatcctgaaactttgctgaatttgttcatcaactgaaggagtaccaggactatggggtttcctagatatggaattatgtcatctgcaaacaggaatactttcactatttggatcccatttatttctttctgttgcctgattgttctggccaggatttccaatactatgwtgagttagagtggtgagagcgggcattcttgtcttgtgccagtttttaaggggaatgctttcagcttttgcccatttagtatgttgttggctgtgggtttgtcatagatggctcttaytattttaagatatgttccttcaatacctagttcattgacagtttttaacatgaagggatattgaaccrtatcaaaagccttttctgcatctgttcagatgatcatgtggtttttgtctttagttctgcttatgagatgaatcacatttactgatttgcatatgttgaaccatccttgcatcccagggatgaagcctacttgattgtggtgaattagctttttgatgtgctgctggatttgatttgccagtattttgctgaggatttttgcattgatgttcaccaaggatattggcctgaagttttctttatttgttgtgtctctgccagtctttggtatcaggatgattctggcctcatagcaggagttggggaggagtkcctcctcctcaattttttggaatagcttcggtaggaataatatcagcttttattcgtacatgtgtttgaatttggctgtgaatccctctggtactgagcttcttttggttggtaggctatttactacttactcagttttggagctcattattggtctgttcagaaattgaatttcttcctggttcagttttgggagggtgtatatgtccaggaatttatccatttcatctagattttctagtttgtgyrcatwgtgtgttcagaatagtctctgatgattgtatttctgtgaggtcagtggtattacctcttttgccattgccaattgtgttcatttggatcttttctcttttcttctttattagtctagctagcagtctatcttattaattttttcaaaaaaactagatcttggattcattgatcttttgaatggttttcatgtctcgatcttctattcagctctgattttgattagtttgtgtcttctgctagcttggaggttggtttgctcttccttctttagctcttttatttgtgatgttaagttgtaaaattgagatctttctaacttttcgatgtgggcatttagtgctatatatttccctcttaacactgccttagctgtgtcccagagattctggtatgttgcgtctttgttttcataggtttcaacaaacttcttgatttctcccttaatttcattatttacccaaaagtcattcatgaacaagttgtttcatttccatgtaattgtgtggttctgggcaattttcttggtcrttaattctaattttattgtactatggtctgagagagtggttggcaaaatttcaaggatttttgtacatgtactgagcataattatatgtctgattttgtggttgatttcagagtatgtgccgtgtggcaatgagaagaatgtatattctggtttttttgtttgtgtctttgtttgtttgtttttttgagacagagtcttgctctgttgcctaggctggagtgcagtgacactatttcagttcactacaacctccaccttccyggttcaagcrattctccaccactaagcccggctagtttttgtatttttagtagaggcggggtttcaccatgttggccaggctggtctcaaactcctgacctcaaatgatccaccaacctcggcatcccaaactgctgggattacaggcatgagccaccaagccgggactattctgtttgttttttggtggagagttctgtagaggtctagagggcataatagagactgtaaggaagaagcattatttgaagtactccttgtctgtttaactcaccccacctgcaggagtagttggaggccaagaacaagtccctgtgccccgtagccccatacaggattcccagctttctctgccttgagcccagcatctgtggcttccttctgtccctctcaatgccttttctttgaagatttactaggagtgcaccagtcttcccagtgttttggtcacttggtgggagatgtttctcctgcttgcatgtagttggccatcttggaatgaactcaggaatagcatctttcaaaaattctgaaaagctcccagctttkagcacttcaaataatgttcttccttacattctctattataccctctagacctcctagtaaacattagttgaaccttcttattcaatcctcaacatctcctaacctctctcacatattttacatgtctattgcattctataaaattttcttggcttgttcattaatctctttaactttgtataatttactatttagttcattatacaactcaactatttattcaacttagccatttattgattaaacaaaataattaaattttaattattatgagcttttattttaagattctgtattatcttttaaaatccacttgatcatttttatattctcttgtttcttgcttataatttcaaaccattacttgttttttaaacctattaartaccctttttatatctctaataatttcagtaacttaagactttgtggatataattatgctatcaattttattttctgcatctgactcatggtatcgtgtttccgtgtgtgttttaggatttcttaaaatctcgtattcctatggccgggtgtggtggctcacgcttgtaaycccagcactttgggaggccgaggtgggtggatcacgaggtcaggagctcgagaccagcctggccaacccagtgaaaccccgtctctactaaaaatacaaaaaattggctgggtgtggtggcgggcgcctgtaatcccagctactcaggaggctgaggcaggagaatcacttgaaccaaggaggtggaggttacagtgagccaaratcatgccactgcactccagcctgggcgacagagctagactccgtctcaaaaaaaaaaaaaaaaaaaaatctcgtattccttgcaatgtagctgcaaggaacagttgaagcctgacttgagtttctattcaatttcattaagctttgttcttaatttcctttattctattttcttttggcttattgtatttttttttttttacttatttagttaagagtcaaatcattttcactcttgcttcttttcttgtatatgaatttaagcctataaattttctgtaagcagtgctttacctacattccacatgttttaatttgtaatatttttcttatccttataacagatatcttctattcactttagtcatttcttctgtgacccatcagttattttgtaggttttggttctctattaattccaaaacaaatgagtcctaacattttatttttgttatttatttctacattaatttcatggtagttgtggttctcaatttactaattctttgaaatgttataacttaatttataatgtatttcwtcaagtgtccttaaaaatactatgtaatctctaattattggagtaaatattttctgtcctaacagtctatcagttactgacagttatgtttaaaatatcactattaagactgatttgtcaaattctaccttcaactctttcactttttgcttcacatgttttgaaatcatgttatttagtacatacagaattagaattttcatatcttcctaatgaatgggacactttatcactatatagtgcccacttttatttttgccttaaagtctattttatctgtgtaaaatagctatatctcacccttcctttaattagtatttgctcagtatatatttttgtactttcatcttcttgtgtgcttatgttctctactataaatggcatatagttgttgttttttgaatacagtttgataatatggtcacttgagttatgattacacatagatttgaatcgactgccttatatttgtttttctctttcggttttctcctttcttcatttgaactgctttctctcctctactggttttgaaattttacatgctattttattttaatggttggccttgaaattttaacatatatccttaatttaaaaacatctaaagttcattaatgtctttagcttttctgcaatatcacaaaaatgtttaaatgtttaaaatacttagaagtctycacaatctctcccaagctgtcctgtccaccaaatctcttatcctctccccagcgtcctcctacctggccacacattgctctgcttcctgttccttaaataggccatgcacaygctcaccttaaggttttccactgaccarttcatctgctaaaaaccacctctcccagatatctgcatgactctctcacctttcaactctatttcaggcctttcctgccatcttatttaaaattgcacacgttttaagctcttcctagcagctttcatagcattatttttctctatatcacttatcaccttttagtatactaaataacttgtttaaattatttatgttcttcttccccaactagaagtwaagttccataaggaaaggaattttttttttattgctgtatccccagagcctaagatgattttgggctcatagtaagcccttactatttatttgytaagcattcaataatttcagatctcaaatccatatgagagccagttagtgtccttgaattgttaagggatgctatttttttttctattgatcaccaccaaggctgagacaaatcattttattgatgtctctttctttggagcattatttttacttagtgtgtttccttttctgatcctttatctggatatgtttcctgagtatgttcccttttcccactcttgatttaaaaattgcccaataaataaatatttttatctatttatggttcagttcatgaaaaacaaataggagaatagatactgtgcagacaacagcagtgtctgacacaattatgctgttgttacaaaaaagatccccactatatactgttatagttgcaaaagcaagttgcagaagaatatgtatatgagcttgttactgttaaaaaataaaacaaaaaactgaacttctgtaaatatgtgtatttgtatgtgcatggagatattttgagaagcctatacactacactagaatacaaccaataatacagtaaaaataatattacaattaataaatagggattgcatctaataataataaaacattttcaagatatccagtataatgccaggcactgttacaagtgttttacagacattaactaatttaatcttcgaaatcactttataaggctttactaacgttatccttaacttacagatgagaaaattgatacaggaagagctaagtaacttgtctgaggtaatagatctaataaatggtagtggtggagtttgaacccaggcagtctggctcccaaggctatgcacttaaacctctactatatctacatctctctctctatctgtatctatgtctatctatctatagctatagctatttctatgtctatctatatataacttagatagatattacaattacatattattttataatttacaaagaaagaaagaaagaaattacctctccttaaatccaccccaaaatggcagtagtagtagcaaaagcaagaagaaaggaaaaacaggataggataaattctaagcaaaacgtggctatcagtgaagattgtcttcagtcctcccccaacacccctttgcctttgggtgctgttgcacttctctaagagatcgaggttctccccacgcatatacccaagccagataaactgctcaggattctaaaccccagctttgttctgactttcctccgaaagcagcatccctattttttttcctcttcctcttccaactgaactagctgtccacccactttagagtcatgcatttttcttgacaagttggtaaccacaaaataatgggataattgtttgctctagatggtggaagagtttgagactgtagagaaagtaaccctattttcccattcccacagaaatagttaacatttgtattgttttaaagatctcaaggagcttccacatggagctgctcatttaattcagtcttcatgatcacactgtgatggttttcatgcatagtttacaggtaaggaaaccaaggctctgtgaggataactattagttattagtctactgtgttctcacagctgagtggcagagctgatctcaagtcagattatccttttcccaaactgcaacaacctctttttatataaacttccttggccaggaatctccacatatattattaatgaattttgtggctagaatagtaaaaattcacaccactggaaaaataaagcttgagtgtgaaagaaatacagagtgaagtcaattacatggtactgctttaatatacagctgcatatttctgttatagcaatctgaatatccttttaaccttagtttcactttggctttgacattgtattttattatatgcaaactattgggaaacatttattcttaaaacaatttttccttctttcctaaatagcccctccgttgctttttttttttttttttttttttttttgagatggagtctccttctgtcacccaggctgaagtgcaatggcactatctcggctcactgcaatctccgcctggtgggttcaagtgattctcctgccttagcctcccaagtagctgggattacaggcatgtgccaccacacccggctaatgttgtatttttagtagagatggcgtttctccatgttggtcaggccggtatgaaactcctaacctcaggtgatccacccaccycggcctcccaaagtgttgggattacaggcatgagccactgcgccaggccccctcggttgcttcatccagaaataaaagacgggctatagctgactgctgatttgggcgatatgtgttggcaatattgttgagttccaaatacttttatatataaaagctaagtataactaaaagataaaatgtttaaatgcagagaaagatcttacaaaaacaaaatgtgtccacaatgcattgcagagtttgttggtttaagaaatgcaaacatagaaagtgtttagaaacctgaccataaaatgatgcaagtgaagtttttgttcctacaataaacttgagtcaaaagagcaaacaaagatatctcataaggttgctcaactgtaaattctctgagagatttttacacctgagggagaagttgagtattttcactgacactttatttcacccaccttgcccccacaaatttgttctcaacaagttgttgagcagtattggaaaacctaagcattttttaattgacaaaatctgatgtagtacattttaaagtgcagcaactgaaacgtctgtgaagcaggttaagttaacattgtgattgagtcctggaatttagaactaaaaggaacccaaatgcatgttttagggatattcctttgtcgacgatcaggaaaaacttccttctccttgctaggatcccaaataattcatagattaattttataaggcatagaaggtttagaacctggaaaagcaatgtcagagcagtttttcatcagcatcatttttattttcaaggaaacattaagtgataattgggcagtgtccatactggtttgtcagctctcttacgcatgagatttcctcctgtgctctatttcacatactccaggagtaaaggacstccctcacacctctctgccctcagtctcccccacccccacccaatcatttcactatgtataatacatcaaaatattatgttgtacatcttgaatatacacatttttaaaaagaaagggccacaatgcagcctcctcactgcagctcctctcataaggtgtcctgtcttcctctttcatatccaaaataattcattgtaatgacacgtgattgtaacttgctttttcaaatctggggcactgagaggcaggctgcttctactttccaatgcaaatattacaaattaggctggtgcagtggctcacacttgtaatcccagtgcttcgggaagctcaggtgggaggattgcttgagcccaggagtttgaggctgcagtgagctgcaattgcaccactgcattccagcctggttgacaaagtgagaacctgtttctgaaaacaaaaaacaaaaaaacaaattagcaagcacccccaaattctcataatatagatcargattggagggctacaggatatctcatgcattcattctctctccttgaatagattatctgttcttatatagctcatgtggattatgatttatgattatgattattattttgagacagagtctcattctctcgcccaggctggagtgcagtggcacratctcggctcactgcaagctccacctcccgggttcatgacattctcctgcctcagccttcaaagtagctgggactacaggagtccgccaccacgcccggctcttttgttgtatttttagtagagatggggtttcaccgtgttagccaggatgatctcgatctcctgaccttgtgatctgcctgcctcggcctcccaaagtgctaggattacaggtgtgagccactgctcccggcctcatgtggattatttccttagcactaaatagcccaaatctcataaaaccatgtggttttggatgctatttgtcaaaacttcctgctttcctgatgaaggagggattggtaggcgataaatggttccaaacatactcacctgtgggtctggattgtccaaagatcaacctagtatagytyccaaactgatgctggaattactctccacagatgtttgaatattgagtctctgccttaaatgctgaagttagtggaccagagagagagctcattactttttaaagtgtctgttcacattcctggggcagtctcttgacatcacaccattaactcttctgctatattgtttctccagttgtcttagctttgttcccggagtcagccaagaaaacactgtttattttcactttcatacattgtgacctgtacatttattttttactgtacagactctttataggcccttttgtaaagtcccacattctcagggaatgtgtcaacattgaagatgtctcatataccagttactagaatcatgttaactttaaatgaaatataattacttctgcaactgcagagactaagatgaaaattaagcttcaagcttgaagcaaatccatttacacacactcttacatacacagactcacacactgccctgatgtttatcgccactttgatttcatggtctgtggtctggtttgtggcttccaaaattttacattgctctggggagctcgtccttgaagatacttagctttcttacttgaatacttcatataaacttttgctatgtgtgaggcttcccatttatctcattatctccccagtactgtgactttttaaattaaaactttctgttcgacagttcaagaattttgaaataacaagatatgcttggtataaaagatgaaccatgaaaaatttcagttgaaatttatttaatccaccacttcttcactcctcatggattctgatagtgaattgaaaagaaaaactccaatcatgcaattgttttccatttcattgagatttggatattacccactgagaatgagaggtaattgtttttaatagcagtgacaaaattcattttcatttactaattaaaggcatttcatttactaattaaaattcttcccttgatttaaaagcaaatgtgaacggaagttgtgaactgttttttttatacatttgatctccaggctgaataccggctttataggctaagctacaacaatgggatattttaaagaagccacgataattgagtatcatttaactcacttgttagaggaagttcgctcccacttttcttcttgcttatagttttgtaggggaatgtccatatatcacttcctaagaaaacatcatgaggataccttcagcctttttccttgttaacaaagtccttcgaaggcgttgtttgtaatgaaggaaaaagaaacctcagcagaatgcctcacctgtatatgttttcatttaacagaaaagatgactccacagggtgagtgttctgtagctgagaccttaaccccagaggaagagcatcatrtgaagaggatgatggcaaagcgggaaaagatcattaaggagctgatacagacagaaaaggattatctcaatgatctagagctgtgtgttagggaagtggttcagcccctgagaaataaaaaggtaaatatatatttgagatttttttttctctcccatatcataaataggatcactagcaccatgaaattgaagcactcaggtgtatcaatgggatgatgtgcctttctccccaaaacagcactgttctcagctctggggttacagtttagtacaaaacaaagtcctgcccttgtggagttcactttctagtgcagaaaaggaggagtcagacaatacacaataaataaataagcaaacaaaattaagatatgttatatggtgtgaagtatggctgaggaaactaaagcagggaaaaggaatgaaataaggggacaaggccgggtgctgtggctcatgcctgtaacccagcactttgggaggctgaggtgggaggatcacctgaggttcggatttcaagaccagcctggccaacatggtgaaacctcatctctacaaaattacaaaatacaaaaaattagctgggcatggtggcacacgcctgtaatcccagctacttgggaagctgaggcaagagaattgcttgaacccgggagacagaggttgcaatgagccaaatcgcgccattgcactgcagcctgggcaacagagtgagactctgtctcaaaaaaaaaaagagagaaagatagaaaaagaaagaaagaaggaaggaaggaaggaaggaaggaagtaaggaaggaaggaaggaaagaaagaaaaaaaagaaagaaagaaagagagagagagagagatggggacaaacgagtggtcattctatttcaaatagagtggcaaatgaagacttttccagtggaggacattgagcagagaactgaaggaggtaacagaatggtccaggcaaagtggaatacaagggcaaagactccaaggagtgataactcatcattagggttgtaaatacacaaatcaaacaatatagaaaaacagaagctagaaagtgaaaatgatcagaaattccacggtcaaagaaaattaccattaacacaatcagacatatcccctcagacatctatttgaacacttacatatacatatacaagcacatatatttttacataaatgtgatcaaaactacaaataatatcttgtaacatacttgtttcatccataaatctgttacatgtatctttttatgagtactaatatttttcaatatctgtctactattacagtggttgagatgttttggatgtttgtttccttatatccttagaataaattcctagaaattaattgttaggtcaaagggtatgcatatttaagattttgaataaaatggacaactgccaaacagaaagtcaatatgattttaatattcattcctattaataatgattcagagagcattttctctgcatcctctttaatgctgagacttgttgatttcataaatgttcttttgattccttctgataaatatcttctcatatattcattggccttttctgttattcatatccatgttttttgctgttttaaaaaatgatggtttaatatttttcttattattttataagaactttctgtgtattagagttattctttttccatcccacatgttgcaaataatttttctggtaagtcttttggtttctaaccttgtttaagatgtatgtttattttgtttttgccatgtttagtcaaatatatccaactttattgattctgagacatattttaatattacccatgattataaaagcattgctagcctgtcatgcccccaactatttacaacattcaggagcagattttatatttcttaacacagtactcttctcagatttttttgttttgttttgttttgtgacagagtctcgctctgtcacccaggctggagtgcagtggcgctgtctctgctcactgcaagctccgcctcccgggttcatgccattctcctgcctcagcctcccgagtagctgggactacaggtgactgccaccacacccggctaatttttctgtatatttagtagagacggggtttcacagtgttagccagggtggtctccatctcctgaccttgtgatccacccgacttggcctcccaaagtgctgggattacaggcgtgagccaccatgcccggcctcagaaatattttttaaaaaaccatctggcctacatattagggaaaaccagtataggtcaaggcacttctgacacaaaaattgttttttggtctaagacaatgtataaagaggagtagcaaagaaggcatggaagccttttcttacacaggaagtcatcttcagtttgcctcatgacttttatttaatgcttactatatgtcagatcttgctccaggcacttcattagcattctcatttaatcccccacagttcccacgccagaattaccagacactttctgaaaacctggaaatttcttattcatgatgtaagagtagaagtaatattgatggtcgtgataaaaatttgctctttagtgtcattgctacgtatataaatgttttctgctgtgttttctttattttattaacatataaaccagatgtatttgatataactgctattctggcagatatcaatggttactaacatgttcatttacayacttattcaaatgttgattttaaatgcacatagcatcagactctgtcactacctttccttatggtacagtcctccctgtcaactcttattctttgaaaaatttggaacctagcccactgtgtctatgtattctcactctctcgctctcctccttaattctgacatcttttttaggtaatttcaatattcatgcaaataacccatgcaacattcgggcctctcagttctttcactttttcatatccaacaatctttcctcaatcccattcagccactcacgccagggtcataacctagaacttgccattaccaacaacttcatcccctcaaaatcagaatttcaagcttactattctctgatgcccaagcctactcccactggtacgatttctgacaaccttctgatggcaccgagacctccaaactatggacattactaccatttcwctcttcatcgggcccaaagatgctttaatttctatgggtccttcattataatcgctccttgcacacgacctcaattcctttttctctctttctttccatttacttccctgcaacaacttactcgagtgaagttcaatttttcgtctacttcacacctttacctgtgcagcagaattaatctcttataaaattcatgaccactttctactggggcccccagtaatgtttctgaggagattctctcacattcttttcctcacatgtcaaacacccctttttcttctctcagcttatgcccttttccatcatttcataaagaaactagaaacaataagatgtgcacactcccaacaccaaatctaccaacttactgcatctctacctatataagttggcttcctcctattaccggaagcaatggttcccgcttctaatgaaggatgacctctctctgctagtgcagtggattctatcccctcagactgaaaggttttactccagtctgtgtcctttctctctcctgaataattagtttaccctccttatggaatcattcatagcactattatctactatcttaaaaaccaaaatcaaacacaaacaaaccaaaaaaattgttttcctcgatcctaaaggaatcatctatattcattgtctattttaaaattaaatataaaatatttactaggtataagaacatttgtgactaaaacatgtttcaaaataagcacaatttatcaaaaatctgtccctgcgattggctaatgatcaatataaaaaacagtaaaaaacacgcccagttgcagtggctcacacctgtaatcccagcactttggaaagatcagcacaaccaggaggattgcttgaggccaggagttcgagaccagcctgggcagcatagggagacctcatccctatttaaaaaaaaacagccaagtgtagtggcttgcttctgtagtccaggctactcaggaggctgaggtgggaggatcacttgagcccaggaggttgaggctgcagtgagccatgatcacgccactgtactgcagcctgagagacagagcaagaccctgtctccagaagaaacaaataaacagacagacaaaaacatcaaatatacaagaaaagtctttctttgaattcttagtccacatttgtatcaaatggactaagtttaccttatatgaaaatgttgccaatttaaataatctgctacattggtgagtcaaactagccccgctaaaatgaatgtcattgatagctgtattcttatatattttctccaattcttttttgtgcttttactttttgttatttttctttacttgtttttggcttcctatgaaactcttataagcagttctcagaattggtgtcttagaccatgccaggtaaaacttttccattatggtaacatttatggtcgtttatttggcacatttggcttttgctctcaatactgtgaattacaattctcaaaattctaactcacattttctaggttgttttatttgaattgtttataggttgttgatttttcacactttgaccttgttatttagctatctttcaatgctgtctgctctctgccttcctcattgtggactttaatttcattctattagttctctccactaaggtaatagcaattctcttaaggttctcagaattctcatgtcagatctgcctttttcccacttctcaaaacttttaacctttgattaagtaaataaatgttcgggtactcatatgactcttatcagcgtttatatgagtgctgaggtagttagttgacaccaccagttcattcagttcactaccttttcaatgttcgttagttctttcctgttctcacttcccttctggacatttaactaccagtgtctttgagcacaaaccacctgtcatcactgtcaaaatgtgtagattaacacatacagttttcagataactatagcaataatctgtaaaccaagcttagctaaacctggggcaacataaatattttacaactacaggttaagctaggagagaatttgggtatcatcggattcatcatcttttctctatacaaaatcaaactcagaccactcccagtaaaaacaaaacaaaacaagtcattttatttaagtgaaaattggatgaaggaagttgaaaactgaggaaagtaccagaagttcctggcttaactgagtsaccttgtatgagtgaatcagtgtacaaatgagtgattagatctagcccttgactgacaactgttctgtgacaatcgtgctgtaaactttaatcttaacttcaaggcttttctatgtcagacctttaccgaactgataatacatcaaactcagcagttacacatcttctttaatagcagcactgtgagaggttttgcaaagaaggcaaacgttatycacatcagttagtgttgaaacatttagtgggaaaacaggttctagttatttattatccaaacagggcagtgagagatactctatgtttttggctataagtcaaagtaaatcaaactagagtagactaatctaacaatggaaagggcaaaaagtgattgaaaggaatagctggaggaatttgagtactgtacttatttttatttttctttgttttttaattattttcagttgctaaaattcacatagtgcaaatctaccaaagatctcaagggggctatagaattcctcagctactcggtttcctcccctagaggcaaactccattaccagcatctttttacccatccaatgatatttcaagtgtatgtgtttgaatgcacacttggtagattttatttctataacaagaaagttatgtgtatttattttgaatttactcatatttggtttaatcatgtgccttatgctcaaaaatttgtgttttctaaaaaatggtttaaaatatatataattttgtattgacaggaattcagttggaattttctgttaaaattttgatatactatatggcaacattatataaataattttcactagaaaaaatatatagaggaaaataatcacctgtagtcttgccacttagaaataagcacaataattattttggcttattgtttatacaaacatactgaaatattttctggaataggaattataccatacacagttgtccctcagtatctacggggcactggctccaggatccaccaagaataccaaaatacatggaagcttaagtgtctgacgtaaaatgcaatggttacatttacacataacctacacacatcctactgtatactttaaatcatctctagattatttatggtacctaatacaatgtaaatgccatctaaattgttgttatactatattgtttagggaataatgataagaaagagagtctgttcaatacagatgcattttaaaaaatattcttgatccacagaggactgattccatagacatggaactcaaggattcagagggttgactgtatgccattatggaatattttcccctgatgacaactatatatttacacattttattttcagccacaaataacaaatatgaaattgaaaatttaaaaaaacttattaaaataagggaccataaatttgatgttcatgctctctctcaattcagagtccttgaatgtaaaatggtgcctattaccagtgttatcagtcatacctaggttagcagtgggctgtttcaatgtcaggatggtggggagtatattgagcaatggttctgtgtgacatcctacaaaatctctccctcagggtccaaagtgggtgaggaaagccctgggatagggaaacacaaaagagagggagttagggagggaaaattcttagctggccgctttttcaaaggagcaagggagggaaggcactccagggctcaggcattcagcttcctgcttgtgccccccaccccaaaccaagttgctgtagcgtcagccatcataccaaccctgtcagagaaggctgcgtgtgaggagggctcaccaactccctgagaacacagtatagatccaagtatccctgaaaggagacagggaggaggggaatatagatgtactataataataaaaatactgttcaaagaccataatacaatgaaaatttatatataataaagagatagccaaagtcccattgacttcctatgcattttaagctatatttactgctaaagtattcagtgaaacttgtatatccctttgctgtgtttttcatggctcttccttcaccagagtgagcccattgccrtcctatacaacaggaactgcagcttcagcacgtcatgggaatcttcctgagttccatatcctgccctctcttccgatgtttttagctggttgggcatccctggtgaccgtcatgacacctcaaagctaggttstacctctatatccagcccctggctgccttgctgtggaacagcactcccagaaattatacagtgcatagcggctctgcagcagccctgatgcactgcttactcggctctaaattttagtgtcactgcctagatgcactctctgagatgaccctcagttctatctgaatactctcaccacccttctctcccagcccagctcctcagacccccaacttgtccataacaggaattcagacaatgaaatgtaatgaaattttgctactttcattgagcagaggacagaattactgttacagtagctcactgaaatacaagataaaaggaccaaggcaaaaatattttatctagtaattatcaaaatatagccagttttcctagatagataggtggatagatagataaatgaagcttctcaaagttatttgctaaaattttgcccacataacaaatagaagaaaccagatgtaagcaaatatctttgggaatgaattttcgatggtcacagaggactcttgtcaaaattgttttctccagctgtcaccttcactaaaagacatttactgtttccaggaagaatggtctttcatttttgcttaataggcaaccatggaattctctctctctttctttttaaatcacccagctacccttcccatctctgttcacttccagaattttctgattgtagtctgggcctgaaaacacatttcatcttggctcactgaccacaactttcttaaagttggctactctctaaaactctgtctcttccatgaaattgccctgaactcagtggagttaaggtattgatttctcacagacatgtcttatttatgcaaacaattgccttatgccatttataatatgttctaccccacaacatcaaaatccaatgcacacattctattgttttgcaggatgttagccttgggggaaacttggtaaagggtacatggatctctctgtttcaattttttttacaactgcatgtgaatctacagttaattcaaaataagaactttaattaaaaacataatgcccttattttctctatcttcctccctttctctctttaaattatccttttaaatacacatgtaaaattttacatgtaaggataaaatttttcctctgatcctttaccttgtttactctcccaaactttccaattttttttttaatatattgtgttttcagaggggtagagactacgtttaagaataagggtacacattcggttgtttggaagaaattttatgatgtataaaacaacctcctatgtatcttggctgtttctcacgctatgcttgaaacaccagaaatccatgtaaactgtaaaacaaactgatgaaaaagccaagtccctttctccacttccatctcctattcgatccagccccacccactgtagagtaaggcagttcctgaggtcaaactcctcagtcacaagacctcacagactttagtgagtacagatatccaaaccaggctgataattccaaagtaaaagatgccctaaaagccagagaaaaacagggattttgttcactacattaaataaaaatctgagaaaaccagagcaattcctgccaagtataattaagatgctgggagaaatgactcaaaagaaatatacctgcctttctcattctactttgtattggcctttctgaactaaggtgctgacttgaaaatgttatactcttgctggaagtctgctttaactatcaatacaaatattcttcaatcctttacaaatacygattttcatgaagaataagatacattacaacaaaaaatcctgtaatctgtatgaccaggttagaactccattttttttttaatcaaagacttgattttcacactttctgtggaatcctagcatttattatatagtctgggccattgtttctccataataaggccagatacctgaggtctcatwaagtcagaaaaaaaaaactcaataaaatttttcttgattttatgtaagtgtgttaataagggcagttcctatgtgttggaggttaaaaatgtgaaatgttaaatttaaaaataaaagtcacagtgttgccagccacaatgtgactgtgttaatacataatatctaactggcctctttctcaagtactgacactgagtcatcacacttcacttactttcccattttcccctggagggacgtttctgttttgtcaacctggaaaacacatagtttgctgtcatattggattcagatttagttgggtatgaaagtgatacatcaatattctagtatgtgaattttctttttatgggaaggaaatctcttatctttgcttgttcagaaagtctcaactcaaaaaaatgaggcattcatttttatccttgtactgtagttttatgatagaaactgtcctccttgttgttacatttataagcacctcctaagctcctttttaggacagcttcagtgctctctaatttttataatctatagtccagatcgatcagaatctgctggaccaagtgaggataaaaatgaatgcatttcccaattcagtgcaggatttgggatgcccagaattgaaaaacatagatgtgttaagcggatctgttttaatatccagaaaagtcatccctcagcctgggcaagatgatcttgtgctcattactttacttcccagaatggagatgatgcataaaccacaattttaatttgcttttttttgtgcatgtgtagaataagcgacaaaatttcagcggctgtgattattataatattgccataaacctctctaatgaaatgccagcaatgttgagacagctttattcaggcataggtcaaaatagccatgcatatcagtacagggcgataaatcctggactccaaacaataacactgggccagaaaggaagcagatattaaggaaacaattattttattaatatgcacttatgtaaggcactttagacacaggcaaggtagatgattacatgagttaattaactaattaattttaggtcatttagagtatgtaaggacatatgaaacacatttttgtgtcatcaaaaaactaagaatcccttgtgagaggcctcttatagctatgagaagataacttgtaatgcaaagtgataattgataagtgtagacaataagtgcaattggagttcagagaagggacagatcacttccagacagattaactgagctatatttcatgaagaatgtgatattttagttgaatatgcaaattaaaagattaaatgtttgtcaagtgcctattgcatgcagtgcctgctcctgagctctgcgtgggtatcaagaaaatttatgtcacagtcttgccctagtaaagtctataatgtggccaagaaaatgactcataaacatataaaacacaaataacaatcaaagatctatttcaaggcaacgctagaagtgatcatgacagaaggcagtcatgattagttgtgctcattagttatgcaaacaattaattgctttagacattagcaaaaggaggcactcrcttccctgacctgttggcagcatttgacaaaaacagtgccttctgtcttccaggactctacacactctttgttctccccctaccactctggctgctgcttttcagtctcctatgctggttaatcctcatctataaacactaaagtaattgagggctccgcctgtggtcctcttctctcttttgtccacattagctctgttgcaaatctgatgtagttcatggctttaaatcccatctacatgctggtgattggcaaatttttatctccagcctagacattttccctgaagtcctcctttgtttctccaattccccactcaaatctctacttrattgtctacaagscatctcyaatwtaacatgttcaaaactgagttcctaatttcctctttaaaactttctcccttgtattctatctcatctcagaaaatggcagctctaccttccagttgctcaggcaaaaatccctggagtcatccttaactttttctttctcttaattcccatatcagatcgatcagcaaattctttagttctgccttcaaaatttatccagaattagaccatgtctcatctcctttcttacttccactctggttcaagaacctatcaataacctcctggatttttacaactgtcttgtgacccatctttcttcctctaccctgtttcaaccaagcagccagagtgatccttttaaaatatcagtcaaattatgtcactcttctactcaaaaccctccaatgacttcccctctcactctgattaaaacctaatatactcatgatgacctacaaggtcctacaggggctggccctcattctcactgatgtcatctatttttaccttctgacctcttcactctttcttgaacaaaccaggagcactgctgtttcaagctctttgttcttgctgttttctttgccttgaatgctcttccccaaaataacttcatagcttgctacttcatgtccgtcaagactttactcagtaaatccttccttcaccacctcaatctatcttakactggattcctcagaagcagagcctgataaaaggattttagatggtattgatttgggagatgataccctgaaatagcagtaagggaacagggaaatgagacagagaaagaagacaatatagggtacattaatgagtgggttaactctgtggccaaatagggctcatttcccactgggagcttggggaggctgtacagaacacattgtcctatgggaggagtatttaccctcctcaattcctgttagacattggctaagggatgctcctgggggtgttaattcctggcacttctaaccttgcctgtgtgtaggcagagcaggcatcagcggtcagagaaagcctttaggtagaaaatcagagatgcttacaccagaaggcccttcacatgtccaagaatattcagaatcaaggagatataagtaaggcattgccagtgctgcagcctccccaaaattccgtatcttccttttgctgtttttgttttatccctataacatttaaccctatatttaatacaatatattttccttacttatcttgtttacttttttcctttatgaatcatgaattttgtctcatttgttcactgctatatccccagcacctaatacagtgctttatacatgagcagcaataaatacttatggattgaaaaagaaatgagtggatgaacaacttcaggatgggtaagtgatccaggaagtcttagagaagggatgggatttgcactgagtaaacattggttaggtggaggcagggtcaggagagcagcccagcagtggagaaccacaggagcaagagtaggtgagctaacatagggtaagtttaaaaatgagttaattccttttgatagtagcagatggtccttataaaaataaaaataactggagtaagacgagataggtcttgtccaggcaaactgtcagactgaggaatttgagatcttttctgtaggcaactgggaagaaacaaatgttttaaaacagaggaatttaaactgtgttttaaacccaattaaacacgttttaggaagactaatctgaagttattagtaagctgatttggggaaataggaaataaaaatgagtgtagaagctttttcagaggcagaaactggggcctgatagagttttacaaagtgactaagaaaaggctaattgaatgttggagatagtgtggttaagctatcaagatcagggttagggatgacagaggggagagcctgcattgaccctaaggtctagagtctggaatttagtggtacagctaatagatgatgcacccaaagaccagtccccactccagggctcacgcttgtttccatcatcctgggcatacccagcaaaatccaaactcggctgagttttgagaatcttctggaactcaggtgamctaacattgatttgggcaccttggatttttgacaaaggtagttgytcaaaaaaaagagacaagtgagaaatttttagcaatttaaaaatgttcccagaactggctctgcttcctaaaatcagcactcactcctgctcccttccttatccttattgtctgtggttcttgggattcatactgcagcttaatgctgtggggagcatcagtctacctagtagtgcaaagatcccgccctgtctccagataaggactctggcagtcccatcattttacagatcaatgaacatctgaagcacttgtctagtttgggaactgcctttagcagctagcagtttggtcaaaattcattccacagttttcctaaaaacaacaataatagctacaatatattgagtacttattaggagccaagcattattctaaacaacttgtttatattagttaatataatcctcccagcaacttatgaagcaggtttaagtgttcctagttgactaatgaggaaaccaaggaacaaagaggttaagtaacttatccaaagtcacacagctggaatgtggctcctccttgacacctgctcaccagccagctcctgaccctcgggaggatgggtgaggagaggtaagggagggggaaggtgtacttgaactggtaccatcatagactagctttacattctttggattttctagatataataatgtggcactcttacaggtactttcctggcctttttcaggctattcccatgatggtggtgttggggagattctctcttgaaagccactagatccaattgcatctgtcccagttggtgatttgcaactctttcctgagccccgaggcatccagagtgtaccttcatattctgccattcagccttgcaggcagagtcatagatatgtttatactagcttccacacctcacagtgtctgcagctggtccataggaagcattcaagcatccctgacccccaagaactgtgggagtacagattcatcccaacatagccatcactttcctactgccacagctcctttaggtttctcaggtatgagctcaacagaggtgactttgaaacagttcactgaactttcctttgcaagttctgcatatggcaaaccatctcccgctcactttggtatctgatagctaagaaattgatgcctcaactgaaattcaggcaggaggtgtttgttttttaacctttttggtatgtttactatcttcatgggattccatggagacatcctggggaagaaaacatgatatggactagcatagtatgggccatgaaatcaaacagctcctggagtgccatgcggcaggaggcaaagcagaaaagaggtgcaaaggcaaggccacgaagagccccatgccagaagaactgacttcatgtgtgtggggaagggaaaccattggaaatttaaacagtaatgcttaacttagatgtcatgatcaagtgacattccccaagggaaaaaatgtgggaattacagtggtcaagtgattaaatcctggaaacaccagaatttacaacacagatggacttcatggatatttgttctatgttgtaccagtttcgtccgtaattcctgtgttactactcaagtctactgtcacacatctgcccaccacatctttttgagccttctgtttcagccttcttttttcctttcatttatcatctctaggaaatttttcttttcctttcttttgcaaaagcatttcctcatttttcaaattattttcagtgagttctagtttttattgtattattgaagattagaactttgtaattgtgtcattaagtctggaaaaaaatgggtgttaatgctaagtcatccctgatatcagtaatttctttcagatattgggcctaaaggatatggatgcttgttgaaaaagttatgagtattgctataagctctcagtttgagtatgtacaggaagaagaaataaacacacatgtacacacattcacacacaccctcacacagtgagtactcaagtgatcaaagcaaaaaatgtttaccccattcatcatgcccagccacaagcctttaaatataattttttggctgacatggatacattaaaaaattataaatttttcctataatctcactgattgttccaaaaagtttccaaattactttctctatatttcaacaatataaatcatagtgtttagtctatgctttctaaacaatttctgaaaagattacaaaatatactagccctccagctcaaaagacctattttttagcaggactgtttgtctttggaacatttcatataaaattcaaagtaggaaaaggaaggcaagaccaccccaaacctctgctgagtaacttcttttctgcctgtccctgtgtcaaggcagagaagagaaacaaaggcagagacctttagtcaactatttaccttttactcaaggataccaatataataactttgcttttctattactagtcaaaacaaattttctgttggacttttttttaattttaattttgattttaagttccagggctgttggacttcttaactcagggacttctcgagtttgaacccagcctctttctctggctttgactgttgcctctgtccttcctcacacacatgctgagatttctgttccagaactcccactcccctttctgcaaagggactaacatctctgtggctaatgtaggtctgtccacattagtatcttctggcctggaatgttttctggcagttatcaggtaacttaagcatttatctgcaagattagttaaaagacttgctgtatagctgtgatattgattcaactcatagtttgactcaattagccagtttcaaatccagtttcacagcaggaaatttcacacatacaaatcagcacttttgagaagcctgatgaaataatggctagtttaccctgaaacgctttgtaatctagaagccaactgtctcagtaaatgccatagtaatgagttaattatcctagcccagtggttgctggggctttctgccaacatcctttttttccacttgctgcaatttctrtctcacaagcagtcctcttctcaacttcctyactaaaaaataaaacaaaacctactttatcctctcagaatgtccccastgagtctccacttctcaaatgtttggtaacccatggcagctttcttccacttccaccttactgcagtctcaatatcattgggttttgatggcttcagcrttaataatggatcaatctaatttagaggatgcatccaggcctcaccaaaatgttgtgtgtggaactgtcctacagaaggagtagagggcaccaaggttctattagaccaaatcagatgatggccaaggagaatttgccctatattaattctaatgtaattactacataagttcagagcccagaattggggccctatttgaacctggatttactgcraaactacaccaaatccaaacactgaagacttttctagaaacaatttccagaggatgatttggttggtggcaatcaccgtgacccttgaaagcagtgctgtttattttctcccttcttctacaattgktgtattaaatatatatgtcatgcacatatatatggaatttttaagttgtgtgattttgaycatcaaattaagagcccaaaaatatagttccaaattgaggtcagaacagcaatatccaattgacaattttaaatccattggttgtcagaagaaaaaagcaatgtttatttgttaatactttttaaaatcctttaaaaaattaataactttagctcagtgataatcatgagtgtgaataagactttagctaagagctgattataataatgaaaagcgtgatctatctagatttcaaaaatttatgaatggttaagtacattacagtatttccacaaaatgttaaaaatggtgcaattgaggaaaattactgacatgaacagatgttcatgttatgttgttaaggcaaaaaaaatttaaactatttgaagtatataattttttgtatggatgtacacacagacacacagagaaaaataatctagaaaaacatatctgaaaacattattagtggctatttctgtgtggtagaattacaggtgactgtattttctttcttttactttcttttgtctactcatccttaattttctacagtgacatgaactacttttataataatagcctaatttattttttcaaacaatgtttgttcctagacttctttacagtgttacttttagagatgttagtggttgggggtctgcaggacacctaagaaagtttggtttttcctccctgtgatggggttcaggccgattcatccagtgctcattaaacagaagcctataaacaggcatgtcgcaggtgtaaactagaggaagattggcttctgtcagcaaattagccagttataccaatggccaaactaagcaccccagtgtgcctttgcagataaaattaaggataaaattataaaatatccatgtaattgttttgaacaactagattggtaattttttccctttaaaccacttttgatctttgcatgcttattattcagagcctagtgaattgattacaaagaatattcatttttgactcctacaagagtaaatagatcatgtgcattgtacagattcaattcagttcaaatttttaaacttttactgagtaactctgcacatmcccagaaccgtgttagacacagtagagtactcataaaggcaattcttagaggaattcacagttttgtcatagagacagataaattagtaaatatttctgataaatagaatagaatgggcttccatataagcagggagtaatacaaagcaagagtcatggaagtgagggagaaagagaggttaattctaactaaggaacaggaaatgtttcctagagaaagtaacattttggctacaattaaaagtgtattaatcttctttgggtcatagataacagaaatcaagttcaaactagcttaaataaaaaagacagtttgtcggcttatggaataaggatttcttgtttaggcaaggctggatccaagagttaacaagactttgccaccaggcttagctttcctctttgtgactttttcacagacaagttctccacaaagatgactgccaaagatagaaacttacatactatttttgtccagttaggcttctatttaaaaaaaaatgccataaactgggtaacgtaggcaacagaaacttatttctcacagttctggaagctgggaagtcccagatcaagatgccagcagattcagtgtctgatgagggcccgctttctagacagccatcttttagctgtaacctttttaatttgttgagtaacctccatactattttccataatggctgtactaatttacattcctaccaacagtgtgcaagagttcactattctccacatcctcaccaatacttgttttccttcatctttttaacagtagtcattctaacaagtatgtggtcatatctcatttgattttaatttgcatttgtctgatgatagtgatattgagcattaaatacctattgaccacttttatgtcttcttttgagaaatgtctatttagatcctttgcccatttttgtaatttaatttatttttatttacttatttttaatttttataaatatataaaacttgtacatatatgcagggtacatgtaatattttgatacaaatatacaatgtgcaatgatcaaatcttagtaattgggatattcatcccctcaaacatttatcatttctttttaaaatttattttcaaggatggtttcagaacatttataattttgtttgtgttgggacattccaaatcttttcttctagctattttgaaacataacaataaattattgttaactatagtcaccctgtatcttctttctttttttttaacttttattttaagttcatgggtacatgtgcaggatgtgcaggtttgttatgtaggtaaacgtgtgtcatgggggtttgttgtacacattatttcatctctcaggtattaagcctagtatccattagttttgcccatgttttaatgggattatttgttttcttactgagtagagctccttatatattttgcatattaacaccccttatcagatgtgtggtttgcaaatgtattctcttgtttcacaagttgtctctcaactctgattattgttttctttgctgtgcagaagcttttaagtttgatggaataccatttgtctatttttggttttgtttcctgtgatttggggtcatatccaaaacataattgcacagaccaatgtcatggagcttttcgcctgtgttttcttctggtaactttacaatttcaggtcttacgtttaagtcttcattttgagttgatttagtgtgaggtaagggtctagtttcatttttctgcatgtggatagccagtttttctagaaccatgcattgaaaagactgtcctttcccattgtgtgttcttgacatctttgctgaaaatcaatcaactgtaaaagtgtggatttatttctgggctctctattctgttgcattggtgtatgtatctgttattatgctggtaccatgctgttttgattgctatagctttgtagtagattttgaagtcactgaaaactacttaacattgataaaagaatttgaagaagacatggataaatggaaagatatctggtgttaatggattggaagaattaatactgttaaaatatccattctacctaaagcaatctatagactaaatgcaattcctattaaaatttcaatgacgtgtttcatagaaatagaaagacaaccttaaaatttatatgcaaccacacaagaccctgaagcgccaaagcaaccttgagcaaaatgaacaacgctggaggcatcacattacctgattttaaaacytagtaattatttaaatgtaatgggaactggctatttgaagtatatcttgcgataagtacttttgtaaagcaataaattaaattgccarttgaaacactggcctttaatctagaaccagaaataccatttgacccagcaatccaattactgggtgtatacccaaaggaatattaatcattctactataaagacacatgcacacgtatgtttactgcagcactgtttacaatagcaaagacatagaatcaacccaaatgcccatccatgatagaccggataaagaaaatgtggtacatatacaccacggaatactatgcagccataaaaaggaattggatcatgtcctttgcagagacatagataaagctggaagctatcatcctctgcaaactaacaaagaaacagaaaaccaaatacggcatgttctcactcgtaagtgggagctgaacaatgagaactcatggacacagagaggggaacaacacacactagggctgattagggggtgggttgggagaggagggaacttagaggatgggttaataggtgcagcaaaccaccatggcacatgtatacctatgtgacaaacctgcatgttatgcacatgtatcccatttttttcagaagaaaattttaaaaaagaaacattagcctttaatttttatgttttgtaagtctgaattattatatattgacttgacttagaatagtgtgtactcagactgtctttttttaaaaaaatgaattttaatccatttaaaatgtaattcaacttaagcttttagaacattacctgtttccagtgaatgattaataaatataaatacatgcttccttgaatttatatcagtaatcataaaatcatctatcagttttaaaagtctacgtgtaccagacatttgtttgttccttggcatagcaatgattggatatgaattcattttatgattcacagaatccccatgggctcatagtgatatgggcgtttgaaatcaggccaattgatgttttaatcctttctgtccttcaggaagaagtggaattaaaatctatgtttttgttatttagtatttgtggcactaagctaagattacagataaaatgtagaattagatccttgccaaatggattcataatctaaattaaacagatatacaggaaactgacctcgggaaataaattgtaggagtgacaaattggtgaaaaactcaggaacaaaccaaaaaatctaaacagagatagtaaagtactctattattaatatttcctggtaaagaacgaaggcatagaacaaaaaggccaatttctgaatccagttctcccctgaacttcttgcataagtttgagcatggctcctttcttcaccctgcattattttctgtatcttcaagatggttcatcctttacaaagaagttggagtcatgtatgaaataataaacatgaaacacttcaagtttctcagaataaagtttccagagcaaaatgaaataataacagggatacactgtatgatttactgctgatagtttatcttataaagcaagtaaattaggggctgaaattttatatattagaaggatttatttcaaaaatgattttaagaaatatacaatcagtaaatttgaactaaaccaatttataaaactttgattcatacacaacttttggaaaacatcttgcattattcagagttattatacctttgtggatttaattaatacccaacacataaggcaattctttaggataagtaatgtgctaaatcagtggtactcagagatatattacatttgagccattgataataatgaagtattattaaatgacaacttcatgttaactacttaataataaattattaaataataacaaaaatccatgtaactgttatatgccttttaaatattttctgtgatattaaatatactttctaatatagaaattgaaaatcttgaacctctctagattacaagcaaaaaaccacatgtgccatctcctattaaagtgaatgatcagttaaggaatattttgtgacactggattaaagaccttaagaactaatagtggttacaatgtaataattagtatggaattatagacaatttcagaatacataaaactagttttttaaaagttgtctaatcctatattgaaataaaccactgcatataatcatatgaatttgattacaaatgaggctgtgggttatcttgaggacaggatgaatgatgggaaagtgaaaaatttcccaagatggttgaaagacttgtatacagcaagaccatattgcataaaaaataactgacatagtcaccacattttgaaaaggtgccatgtgaagtcatgcttccacattcaatgacagaatatccttaccaaaataatattggtatccaatatggagaacagtggatgggacaatgtcaaaaaggaatgggatcaaaagatgagcaggttgctttcttccttaccccttgaatagaccccacacacacctgaagaaactgagtctgaaataatggaaaaaagctgtagttgttggcctttgtctgcagaattcctccatgtctcccttttatatcccttgttcccaattcccctaatttctcggcacattttctttaattggattctctgtctctttcatttccctaactttgctgagctggttttaagccagcaactctgattttcacttgtgctactcctccatgaattgattattgatgaattaattatccacctatgacctcattcacagtaagtcatgagtaaaaggcacctactcctgttccctgatgtagcccagtagagcctgcaccaatacggctgtggcctgaccagtcactatatgattatgaaaggagatccaacttaaactaaagggaattattttgaacaagattcatcaaaatcagagcacatatctcaccatattcagacagctgaggatagttgtccatccctctactaaccaatcactacctataacacagtctggattctttcgtaattcttggtacatagaagcttctcagaaattatttgatgaaaggatggataaatgaataaataaattattataaacacttgctataagatctaagaataattacactggttgttaagggtgtgyatgaaataacaaaatataatgaatccttaattagtagaatatatttaatgatttccatttacatttatatcaagaaaaaaaaaggaaaaagcaacccagcacatctacttatcatcacttttcaaacatctgtggtttaaaaaacagctttgaaaatmgttacttgcctcgggtaaggtctgacttctgctgtataagcagtaaactattctaaatccttacacactagtacatatcctcatagagggcagttaataccaattaggcccaaatcttcccattctggttcttataggaatatatagatgtatgtttgatacaaaacatattcaaaatttttttaaaaagacagaagtaacagatgcatcatcccaatttcttggaaaaaaaaactgcactctagaattcctaaataagaatgttaacagaaatggttaatggagacagcatgcgctggcatttaaaatgcttactgtttaggaggagaaaacatcctaaatacagtgcttctccatcagctcaatgttttttstttcttcagactgataggctggatgtggatagcttgtttagcaacattgagtccgtgcatcagatatyrgccaagctgctgtcattgttggaagaggccacaacagacgtggaaccggccatgcaagtaattggtatgtttattctcttctcgagttctrcaatacaacaggaaataattttttaataacctccctttgctttggttttttgttcctgactcaccatgcttcccaggagatatataaatgctaaacccatctttgggctcattgtgattatgcagactctgtgtttattttcaaatgggtttatatccatttgctgaagtccctcagtagcacaaaacataccatttgctttttaatttccaatctttcaatctctttgctttccagatgttctgtaattttttttaatggctaacacttacttgatccttaaagaattaattatttaaatattctaatagctttactgatttctcattacaatgttttttagatcttatgcccatcaatcaatttttttrgattataaacttcttacctgaggaatgtaaaactattaaaggaatgtaagttattaaaaatttacacaagttctactttttttcatgctctctttttttctgtattatttaccttccaaatatgtttttactgtcaatcagatatatttattttcttactatggtaggattctcaaaaataacaacagaaaatataatttgaaaagtattgagccaaatttttatgctctccatttcttgggaatttccaagggaatatgtgctatgaattccttaaaggcagtttgcacttcgagacatcatacagtgtcatgtaggctaagagttttttaaaattatsgtttctctatttcacacttaatatacaataactcctcattacaaaagtactaaaacaattcaggagcacgtagagtaacggtaaaatttcctttcatatatccctccaatgccactgccttccccacaagtaaccgcttgtttgatgtagatctttactttgagatacacacacaaagactacacacaaacactttatgtctttactgattatgtctttgttaccttttatttgttagagttataaaaatgtcatggaactggtcttgtttaatatttatagagaaccaaagtttaatgaggaaagctgatcaaagacatgaaatatagtgaaagaaatgactgggtaataaggccagcccactcagaaagatttcttccacagataggtttaaattcaattgttctttgtgatgaaatgtccccaacaaattgtaaaaatatttcctaaaagaagaactctactcattaccacactaactcattagtgtgaattcattggctattcatttattaattcaatcaatgaatagttatgaagtagcagcatattcacaagatttggtactgtaccacattgcttggtatcaaaaggtgaaagggctcatttctctctttcaaaaacattcaatcaaacagcttcttgaattgaaggtgtgggtataatacaccatcaaagcagtttctacactactgcaaaccttggaggataaagaaaacatttctagatggaaactccaaggattcttgaagatgttatttgggcttaaagtatagattctatttcaacaatagggtccatgttgaggagaagattccaaatggaaatgacagcatgaaaaacaagtgtgaaacaaatgccaaatgccaagtgtgtttaggaaatgaagagtgatcaagctggagtgaaggacagatgtaagcaagaaatgagaaatgaacctgaaagtgcagagtagggactggcagcatttggaaatgaagtttggaatttactgtacaagtaataaagagccattaaaagatttctggcaagggtgtgatgagacacaaaagtttctggagagagaaagatatggtaggtctgaacagcatgcagaggaggaactgagtcctagactagtaaataggttgttataagtaatataggcatgtggtaataagcattgagactaagggagatacagtgaaaatttttaaaaatggggtcatttcaagagaaatgtagaagaaagcataaacaagttgttgattcatgtgctgaagtcaaaaacaattccagatttaaggtgaccatgtattgtggtttgtctagagcatactgattttagtgtattacgtaagcattcagtccactttagcatttgtcatggacttttcctttttaaaaattattattattattagttgcatcagaagaggttttataagacctttacatcatacttcaacttctgacacaatctcttttagtagagtgtaatgtgcagttaacggttctcactgtaacacatggtaaactctgaaacatagtccatctctcgtatgccaaccttttctagtctcaaggaaagttctatctttctttgaattgccacatgcagggaagtggctgattaaatgatgctgtttggatatgaacagctagaaactgctaactcctttctgtcctggtggttgtggatgtgttggatgctgcagaccccgccatctactgggtgtagcagctagttgtgtcatgacccatgctgggtggcccatgtcatgacctatgagaggcatgaagccatcgggatgccagtcagtggggttaatgggacacgtttttacagaatagatgtaaataaaatatgtatggaaaatagggcctgagaaatcatgctacagagtgtctagaggctcttgctatggtaatttggttacctattgcatgttatagattgacaactcttttacaaattttttggttatgtttcattctgaaataaaccttttcagaagcaagaatttaatatattcatgtttgtattagtcagttttcacactgctataaagaactacctgagactgggtaatttatgaagaaaagaggtttaattgactcacagttcttcaggcttaacaggaagcaagcctgggaggcctcaggaaacttacaatcatggcagaagacaaaggggaagcaaagaccttctccacactgtggcaggagagagagagcacgccaagggggaagtgcgatgcactttcaaacaaccagatctcatgagaactcactcactatcacaagaacagcaaggggaaagtccacccccatgattcaatcacctcccaccaggcccctcccccatcacctggggattacaattcaagatgagacttggcaggggggacacagagccaaaccatatcaatgttttagaaaaattttgattttctttatctcaagaaagttgctgagcctataacacacaaaataccatccatcaaagggtcctcaatgctatcattgaccatagacaatcagaagatggaaatatgctgaagcagcggcaacatctatgtcaaagtttagtcattatttttaaaagactgtgctctaagcaagtgattaaatgcatgcagctgcttaaggtgtgtttacatttcactgcatgcagcatggcttctcatttaggtcagacaacagttttcctagattaattacattcattttttaattctgagtttccttaggcctatgagaaatataaaacaatggttactaatgagttgacaccgttagcaaaagagtactgcaaacagttaaatgatgacagttttatatcaatgtgagcagatgaatcgaataatagtttcaatagcagttaaaattttaaaaattcaattcacagaaccaaagaaaagcttttagaagtttatcatgtcaatggtgaattgtctgaccttattataaatgctgtcactttaacttaaaaattaaacattgtgactgcaaatgataacataaatacaaatattagtggagcacagcatcatagtaaaacaatgattttattaaaataaaaatctatagagcagacgtgtagttgaaaatgattggtgtatatatgatgaagttgtggaatttattaaytgaagtaaaaactgtagtgaaaatttgcatttatttttatatacacaaaattagagtgaataacactacctgaagaataaatttgatattgaattaaaaataatcttatgtatgaaactatacactctctttcctgctggtcattaatcagtctttggaaatgtttgattctttgaagcaccactttacaaatcaaccagagtgtcctaacatggcattggactatttttgtaaacaaggcctctgaaattgaattgcattttgttaaaaatcagttggaagtctttagttaaggtattcatcaaatggagaaaataacttcaatttttaatctttacaaataacaattattaaaaacaaaattgcaaataggaagacattgaaatgtatccctatgaaaacaaggagtaagtttaaaaaaaataagcaatgagagctcatgtataaaatatttaattttgaaagtccataatcatgctttggaaaatctgacttatgaagagaagcctttgatggagctcctctttagtaggataaagtaatattctgtaccagatttcacaatctacatttgggaaaatattccaaaattacaaatagaaacaacttacttggtgagttttattttgaaaaaaagagagagagaatgaaagaaaacaattcaaatggaagcaaaaagataatgcctataaaaatatttcagctcaaatatttacttgttttaatatgtatagtaatgagagtaaagcttctatttaccataatttcctctgagctcaatagatatttccttgcttataaagtattttctcagttttaaatattatggtttacaaatttcagtagtaaaataaatatgctgatattgaattataacccacagaaatatcaatgagttcttgctgatataaataaatgtggagaaaggacagctgtccattacagattttaattaataaatagagaaagaagaacggctgggcatggtggctcacacctgtaatcccagcactttgggaggctgatgtgggcggatcacgagaccagcctgaccaacatggtgaaaccctactctactaaaaatgcaaaaattagccgggcgtggtggcacgcacctgtagtcccagctactcaggaggctgaggcaggagaatcgcttgaacccaggaggtagaagttccagtgagctgagatcgtgccactgcactccagcctgggtgacagagcgagactccatctcaaaaaaaagaaaaaagaagaaaatagaaaatcaaattcacattacataaacaccacagtcaactattgcagacaaaatctactggttgatgctatgtttagtgggtgaaagttagaggagaaatatacttttcatagtctcaaaactttctccccaagtaattattaacctcaaagggaaaggtggtaactttacattgagaaacctagcagaggccagccacctttatctagagatctagagttaattttccttctctgacaatcgtattttgatatgtaagatgttaatattggtgaagctgggtaaagagtatttgaaaactatttgcactattttttcaacttttctgtaaatcaaaaattagttcaaaatgaaaaattgaaaactatgatttacagagaaaactcaattgaagatgttcatactttcagattcactaatcatagaattccaactttgaggaaaattacagaaaattttatttaaaaaattaagacaatggggccatatttgaaaaagaatcagttggagtctcattttaatatccttatcctttgtatctgggctggccttgcgacttgctttgatcaatgaaatgaggcaaaatgatgttctacaacagcattatcacttctgccttctgcttgtgaggggagaggcccaaactgcccagccattcaaagcaacacagccaaggcctcaggcttgagagtaaggtccttgtcagctggccagctggcccccagccagtccaccaactgacgggaaacatagaagtaaaccccatcaatgccagttaaatgctgcccaattgttgacccatacaattgtgagcaaacgaacagttattgtcttaagcttttaagttttggagtgattcttttttttcctgtggtaattgctaactaatacagattaacaggtgagagactaacttatttcaactcaaatggtgagggaaaacttgatttggaagtggtttttgagcttgcacttgaaagatttagaaaagtggagattgggtgcaaaaggctttctaaatgagaaatagggtaaaggcctcaaagcaagagtacaggaaattctgaaaaaggatagcagcagccctatgtgactggagcatagtgccgagaaggcctctctgagccaaacgttgtagacagaccaaaatgagttcactggcaatttccattactaaaccttttaccaaagcactttcattccataagataaactgattgttggtgagatgtttccaaaattatgttatcacaaatgaaaagcacaggtgtcccatttctttgtccttagatggcacaaataagagtttgtgattcacagctgtagtgccaaagggagaattttcctgatacctagataaactatgaagaaaattttactcaataataacactggagtttggataaggtttaagtttaaacacaggggcatatgcttgcagatctgagagctctgaggaagttgtctgtactgtcatgccaagatacaaagtggattttaaaatcttgacttaagcacagtgtctagataggaaatgggttttcaatctttatagatgggagtatgaaatgtggctcttgtttccacttagatggcagtgtagagtttaagaacacatgggttttaatatcaggttgacttgggttacatctcgttttgtcctgttgctagatgtgcgatcttaggcaagttacaaaacctaattgaacttcagtttcttatctggaaactggaggcaatagtacctatcccatatggtttttatgaagatttgacaaaattatgtgtacagaatgatagcccagtgcctatccctaattaatatccartagatgatgttataaattattatcccaagaatattagatttactcatctatttaaaatgcctgattttttctgtatgtaacaagtgaataaaatgtgactttttcttagaggtcctgatcatgtttttcaaacaagtcagatttgctggatgtgtgtgatttctagatgcttccaatatctatgcatcttaatgattcatggatctaatatggtgacatatttttttctgtgaagggagatttaacatatcaagtgtcattttcacatttggtagagtgaacagcaatggcagtaattagtctccaaagatggccctcaatggaccatgcctcctagttcacattgttatatgagtctagtgtcatattgactctggactggccctctgattcactattacaatgtggtgaaaatgacactgtatcagtaattgggcccaagccttagaaaagcctgacaatttctactttcataattttggaagcctgccatttaaaaagttgagataccttactggaagtatcatggagagagacagcagatgagactatgtagagtgagaaagtggcacagctatcccagaatcccagcagaggccagcctcccagctgttcctgccaaggcactagatttgtgaaattagtcatctcggacattaaaacccagataagtccttggatgactcagcctgagtggatgtcaagtgtagcaaaagaaccacagagttgagcccagtcaatctacaaaattgtgacagaaaataaaaatggctgttgtttcaagatactaagctttgggatggtttgttacatagcaataaataacccaatagcaatagtcctcttatatgtgtttgcatattataatgtttcaaagtattaaaacaagactgtcatgaacatgcttgagtctactttactggcttacctcatgcatagtgcgctgagaatcagactgaaagaagcttttgataaaggaattgtaatttcttgtatgcattttcctgagggtgactctctccttggagagaaataatttagagctttctgttctttgaaggtgtagtaggtgatgcactgttgttctatagcagtgctttgttttcctaaagcaatgtttcttgtaggtccctgaagtagaaatctgtgcctttagcagtgagtttgtgagaagagtactagttgctgacaattcatatcataatgctgtgtgggagatactacattggagctcacttaaatgaatttttcaggattattattgtgtgtaagtgtgtgcatgttttactcaggacacaaataggcttgacctggttaattttggccaactgggactggttgggagggtcctagacctgcatacttgaatgtatgaggtcagtgcggaggtttgggggacacccagatgcaacagttggaagatcagaatgcaaatgttagaagtaataggaaagctgtccgctttggagaaaatgacaatggggaaatggtattttcaggatcaaggatacaccaatcctcacaagaaagaaaaaatcagcaggaagcaggtaccaggctgtaacatgggggttggacttccagtctcctgagcggggtgaatatgggtcccagtgctgctaggacttatttcttacaataaaaataaaataaaggtggcttagtaaaaagtcttacagttctgatttctgaggaggatggtaagttctaggatgctatgctgatggagcctgccagtggaagtcagtggcttagctgtgccaggaggagtattggagagttgaggtcagatttgaatggacctgcgaaaagtcacatattgcgcaggatacacatagaaatacatttctaaatcccaggaaggaatgtaagagtctgtgagttcctgaacactttcccagcctccaggaagctaaaatgagaagtacatagaaagagtaacaaaccttgaagttgcccaatagcctggaaagagcatggcctttgaagtgaaacagatccaagtcttaatcctggctgtcatcactagtttgatggctgtgagcaagtcacttgagccagtgaggattcagtttgccttcctgtaataaaaagctggccaacagggtttgaccaaaaaggggtttatttttctcacgtcacaagaaatccgtaactcacaagtccaggactagtgcaactgcttgctgctccttcaacctcttcccttcacaatgctcagcatgtggcttttgatatcatcccttagatggctactccatttccaggcatcacttcctaaagacaatgaagcaaaatcacctcttcagaaggcttttgtcattttgggggaatataaccattttcccagtgacttctacatatatctcattctattttgcacacatgttatttcatttcacatacatacacacacaaacacacctttgcacacacacttggccatctaaataccagagatttggggaaaggtcaatatttttaactgggtgtgttaccagtccaaattctatgcctttggaagaaggaagaacagataagtaaatagcaatggattccacatgcatttgttcatcttttcaatggggacaacaagactcccatggcaggaaaatatcaaacactgggcataacccctccagaatgtacgctccatgagggaaggaattcttgtctgttttatgactgttgtgtcaccagcacccagaacagtgtctttaataactatttgctgaatggatgaaattagagataatagtaagcgtgcagtgcattggctggcacacagagggtccaggaggtgattgttgttactgtcrtcactgagtctgtctgtggtcagtgtcattgtcaaatgtcactttcaaaagtcaatgtcattgccagagattgctargtaatatagagcaactagctacagcagaggcaagctttctcaagagaggtatttactaacgtgagttaaatggaaaatcatggattggtctaagacagggttttcctcagtgttgtcaaccttacattaaaaaaaagttatgtaccttttcctgatccagccagcaaaactttcactttctcagagaaccaatgttgccttaagatgtcagttgttaaagaatcctgacctggagttaaagtatctagaagtcaacaaggttcaggaagacatcgtgagctatcatcaaaatatgcagctgtatttttaaatgttagaactggactaatatttcaagagcatctattccattactgagacaaaaacagtaagagctgatttgcccaatttatattagtaactctggacactctcagaagggactctagctcttccaaatataggccagagctttttcctctccaaacattgaccctctccacagcccactagcaccccccagtttgtcctgctcagctgctagccacctcccatggccagatgtrctgagtggatgccaccttagcttcagaacagccccttctttgagagccccaccacaattatgacattgtcttccctggcactggacacagagatgatcacgacaggttcccatcctccactctgctcttttcctttctctgtttctctctttagggtccagctcccttcattggtccctcttcttcatctctcattccctcctaaacccaaccctctaaaaatgctattacygcatcaccagggacctcagaattgtcaaatccaatggacacatattttttctgaacttatcttacgctagtgcttctgaaaaaaaatttttaccagaatattcccaatatcaagagagaaatatcataagcctcaggaagtgtggagttatgatctgaagctagagccacaggcgtgaaataatttggaagtcttattttgtcgtaagaattcatgtcagttttccagtctactcttctaggaaaccagagtttttttcttcaaatttcttaataaaatggatactcaagggatacacttgttttaatcccatggctgcrtgtccyacctgctgcctgtatttggtttgaatattataaccctagccagggtctcttgggtatccacagcagcagttttatcccctaggctaggtggaagctaaatgagactgaaggcaagggagtgtggcttctttaagcagcatatactctttcagtttctttcttctcacttcctctccttgttttatgctcccttggagaacagaatgaggctaggaaagaaagggagaaagtattcagatgatctggcatttgggctggcgaatctactgccttgtttagtcatggcagctgggctcccatccaaggaggataagaagaccgcggggagcaacccttgaacttggggtgaaagctgccaggaaagctctttcactggagatggcataccatggagctttcgctcagctgtgtgtgtcactcagggaaatgacagtcagaggcctgtattgttgcacccagatctcagaccttctttccagagagtgggccatctctaccctctgttcatcacacccccttctctgtattctaaatactctgccttgaccacaagttttatttagaaccacagataacttccttttgggatatatctcaggccataatttatacatgagattttaactaaaattatttttgtaaacattatcttagttggtttttagaattgaacttactgcatagtttttcttgttaatacaagcaacatccaactttatatcctccataactaacagttcatgtcatattttcatataatttttaaatgaaatgtaaaaatgggtagtatagagggggccttaactcatcaggatttctcccaaaatattttcctgtcaaagagaaaacaraacaaaacacagtgagtagattagaattaagttcagctgggagaaacagaaacaaaaacaaaacattactagcataataagacagatgttgatttctctatgtgtaaaagtctgaaggggatgtgttctagagctgtacggcagctctgctccacaaggtgctctgggatgcaacctccttccagctcacagctccactcaccaagaggtggctgttatcttcatggacaaggtaaaggtattaatagtatccaaatcctaggtagcagatggagacaaggatgaagacagtgtaaaggctgagccagctgcctcttcaggaaaattcctggacattgtcatgggacactttcatttatatcccactgtgggctttaattacatggccataccaattggatgggagggtgggaaatgtcattttgatttggggcagccaaaacttccatttctttagaagcagattatgaccatggggagacagctagcaagctctgtcacccaccccaccaacttagtcaatcttggcagtatttctcattattttgttcttgtccttcctcatgctgatccttctttgtggctatgccttctcaggcttctctgcagtctctttttcttctataccatcctcaatgttagtgtttgccaccatctggtcctcaggcactcttttcttctcactctgtgaacactctcgcatggccacataaattcatgtcttatactacccaatttttacaaacctacatctttgtccaagatattattttcttaaatcctagattaatatatccaatttcctaaagggcttcactgcttgaatatacaataagcaactcaaactcaatacatctgaaattaaactcgtcatctttctcattaaactctgttatgccatcagtgtctacacccacatggtcacttaaaccacaattctgggatatgcctggaatcatctctcacacatgttcaatgtccatttttttcctttcctctgcatcctccttgcttttgctttgctttagttatagctaacatctattgagcatttgcatgtgccagcccctgatgcaaatatattacatattttaactcatttaatctgcaaacaaccctactattattatctgcattttacagatgaggaaattaaggaacagataagtaactttcccaactgtcacacatcgagtaaatggtaaaaccagaatttgaacccaggaagtcgactccagtgcactctctcttaactgcaataactttctgttttagcccctcattgtttatttaccttattattatagaagactttcagtttgtttatcttcttcaatctcaccaactcctccccgaaattccatctttcatacgaataactaccagaatagcttttctaaaacacaatctggtcagttacctaaaaatccatcggtgcttcaccatcactttcaggtgaaagtttcacctccttaatgttgcacaaggcccttcatgatctggccccagcacacctctacagtcccttctggaacttcctcacagacatggtcccatccagccacactagatcattccaagtttctgaacagatcttactctccacacctatctccttgctttttgcactcactcagaggtcctatgtcaaaagtacactgttatgagtgttgctcaaagctccccaagggctgaataggtaaccctctgtactttatttacttttcacatagtatggtaaacggaagttcagtcttctctctctcccttggtgtcctgtataatttccttgaaggaagagttggttctttgtatctacagtacctaccaaagtgtttggtgcatgatgatcatcgagtaattttcaaaaagggatgaactaaggaacacaactgcttcttcccttttatggcattttcctaaacaaaacccgggacaaggagatcccttgaaaatcactgactttacccttgtttacttacctgcaggagaaattcatcttggagcaggatcacaatactataaaggccacctggtttggtgtggcacatgttggggctgcacgtgagagtatggaaatagaaagagtagcatatgtttattcacatcagtaaagggaacaaattgaaacataggagtcatggtatccagacataatatcaatattttgggaagttatttttaatgaagataactaaggggacttaaaagggtgcattttttttctcctttgcatggcgattgctttttggggatgccaatgcagaaattcttgggttgtagaatttttaaaaagaagagcacactagttttatttattttacaggattctggtgcctttgtgacaggcaaccacaagtgaaattaccttcaatggtcttggcttagtccctcctctgctcctaatcatcccctcaaacccacatacattagacagagcggttgtccttcaccactaaagaaatgcagccgagagttatgttaccgtggaaacagaatcactttttgctgcaagacacactgcttcatctgcactattatgaagcagaatacattggtagggctgggaggggaataaaatattctgcctgccagtgttgtacttggcctttgggggaataaatgactttcaattagagtacttaaatatcttttaactttaataattattattagagcctcaacagaattttacttggaaaagagtaaaaaaaaaaaagattcttctgttaaagtaagagctataaattctttcaaactacaccactcctgttaaagaaaatgcaagagaatttacaattaatgggttcattgtgtataaagataagtgttttagctcttctttgttttttgactttctaatttgatcaccttgtggatttgtgagattgtccttacctctttccttttttggtctctgcttttagcttctttgtagtaagcacacttatttacagcttcatcttgtgttgggctgtgtgtatgcaggtccactgttgttgacttgctgctgagcgtccagctaagtctgtgatctaagcctgtcaccagtcccacttctgggccctcccagccaaagccactagttcccatttgctacctggttctgctactgggaggctcccttccctaaattcagtcacggttctattttgttttctttcctctacttgatagctcttactgtttgtgttgttatcagtgttgaagaacaaatccatatgacctacactagttgaaggatgaactctataggatatcagaaamaaaacaagaatcctgtgtccttcagctccaaagatgctcacagttattgagttttcttataggcccccagaaagcactactaaaacaaacaaacaaaaatcttaaaacacacacacacatgcacacaaacacacacacactcacatgtgtgcacattatctcacattacctcagagtctaactataagcatataatcacaggaaaatcccacatcatgaaaaggaaaaatattttattggctgtaaataaattagaaaagaatgtgatactttaaaagtgttagtgttttaattctagaggtagcaaagcaaccttaagagacaaatgacaattcttgagcaactagtcagtggcgggcactttttatatctatcaccccatttcattctcaaatgaatctcaatggctactattatttttattttgcaaataaaatgaaggcactaagactcaaataatttattttaaaaaaaatcattctccgattgtataattcatccatgtaaccaaaaacgactagtaccctaaaagctactaaaattttaaaaagtcattctcaaattccccacacaaaccctaaattgtttctgatttcaagtttagtgttctttccaagtgcatcacctcatacagtgctcagcaaagctctgaattgggtggctggggaggggtatgtgctaaaatccagggaaaaaataagaatacagcctctaattctgcctttccacctctagacaggacttcgggaaaatcatttatttgtttcaaattcagatttattcatcctgaattaatatggataaataaccttttatctcttcaygcaagtaggaagttaatgtgtgaaaaacatgttgaaaatactaagggcacttttatttctgtggaaagaatgacttactcctgttaactataataggtccagattaataggtccagatcactgtcaatctattcagccatcccaattaattcagccaccaaatcattattagtctcaaatctgcaatgttttgagagctgaccctgtcacatattgcttggatatctgccaaataatttctatagtgttgggttgagtagtggatgcmtaatacttatctttaagtaatgaagtgtggatcaaatcaaactatcgtccaatatctaatttagtcaccagttatagaccctatttcatcataataycaaaaaggattcattaaatgcctggatacaattagtctaagttgctttacgaagatacagtcataacctttgttcatggtattaaactgatttttaaaataatgatctattttattatcacatagaaggaaatattttatttctctaaactccattgcttgcctttcagagagcctcaggaaatattagtggagtaaatattgaaaaatacttacccagcacttgaaatttcaccttctgtgtctcttataaattaacaaaaaattgcttcattttgagtatttcatatgtatttactatactatgaactttacaaataccacctcttttactttttacaatgactctctaaaattgaatctattggtgtcatcaggtttaaagagtaaaaataacttgctcaagtcaaagtgccagtctgtagcacagcctgactcaaatccgtgcacaccaactctaaactgcaactcttttttttttttttttgagatagagtcttgctctgtcacccaggctggagtgcagtggtgcaatctcagctcgctgcaacctctgcctcccgggttcaagcgattctcctgcctcagcctcccgagtagctggggctacaggkcgcctgacaccaagctgatttttgtatttttagtagagacggggtttcaccatattggccaggctggtctcaaactcctgacctcgtgatccacccacctcagcctcccaaagtgctgggattataggcgtgagccactgcacctggccacactgcaactcttaaccgcaattctgcacatcaaccttgtgtgtaaagttgcctttgagaaaaccagctttcttttgctgcccatctctgataacttgttcatcctttgttttataaaagaaaaaaaagaaaagacagaaaaagagaaggagcaaagaaggaaagcagggagagaaggaaaaaggaaagaaaaggaaaaaaaaatcactcaatgttttccaccctccctgaataacctggggataaagtagatcccatccaagtttttgacacgagtcgacattgttgaaaataatcatgtgaagtgccagctttgtctgatkatgtcattttgcctttgttttgcatttatcaggagaagtattcttgcagattaaagggccactggaagatatttataaaatctactgctatcaccrtgatgaagcacatagtatactggagtcctatgaaaaggaagaagagctgaaggaacatttgagccactgtatccagtccttaaagtaaggccttttcaaatgatgattcccatctcctctcagttgcctagcagggaacattttaaatggatgtagatgaaaggtctcacataaatcctatgttttatgagacttgctgggagctctgctttgcattccctttataaaaagctgacatgccagaagccctgattgactttttttccccctgcgagaatgactaaaaataacatggragaagatttagagctctgcagcgattgaaaaatgcaatatcaaaatataaaatgtggaagaaaagcctcttcttaaagctattgtaacttgcctggccccacgtagttcaaggattatgtgagataacacgtggccccatgaccactggagcacatgggttaatggagttaggggaatggcctacaactctgcatggccgtcttctttccccaaactcactgtggggagatgggtgaagacaagtcaggccttgttaaagttagtttcagaacaattactcatgccttcctttctcatccctaaaacattggtgggggwgctacacaatgtactttttcttttctagaggaagtatctattcactgtgaaaatctgaaaaatataacaaagtatgtgtaagataaaaaccccttgctatttcactattagcccctttcttcttaataatcattttcttctgatattatttatatgtataaatgtgggtatgtgtttggattgattcttttaaatggaattggtatctttctgaatatgcagtttcctatcacatgaagcttaaagccaaaatcactaccatactccacatcttacccagtggctctcttacagactctcacttgtaagtagtatccactgtcaaataattttgattagaccaggaattaaacaaccacagagagctgtggtgtataagtcaatgtacacccgtctgatcctgtagcacacctcccccgtttactctgtgtgataggggaaagagggatccccaacggggatggggatggggatcctaacgtggtacaagaggtttttagctgcactaaattgaaatcatgatactactctggaggaggcgtttcccggctagaattgggtctgaaagtgagtttaaaatgagcccagtgaattttttttttaaataaataaaatttcaactttattgccstctactggtcattaaattactgcagttttaaaccattcttcatgctatggaaaagaattcaagtcaccaaatcttaagcatttatttagtgtttgtgctgtgtcaagcgtagttctgggggctaagtatacaaaagtaaataagacttagattctgccctaaggaactcaatatgatcagttaagtcttaaatataagatgtaatgagcaagtagctctagttaattatttctattttcagtttaggttcagtgttagtatatcaattcagagaaacattcaaatttgaagttgtgttcattttaataaattcatatattagaagcacagtcctctaaatgttcagctgttttattctttgggaaaaaaaaggaaatggtgttatcctgggtttgaatgaacacctttcctaccttaaacaagtggcaagatctgatccaataaaagctggagccattttccttcttcgggttctagaactaagcgtgagaaatgtcacagaaagtgaacatttagcacctttgatcaaaccccacccaatgccagccctggggatggaggtccttgcctgaaaagaatgtggtgcctctactttaggcatgcgcttctaactgttcaccagaagtggagcagtctgttcagagaggaaagaacatcagtttactattcattaaacttttaacttttaagagaaagaaacagaccctgccagaagattccactaggcagtatagcccagtatcatatccccacaaagcagctaaaggcagaggtgattttagaacctcatgaagtctcagttactgaaaattattttcagacccaatggcttatttggtctttttctgcaagtttcaggtaattcccctggccatgccccaaattttgagtttagagctattctgattttaggtaacagttgcaggcactggaaggtgttaaggtttagaaagcaaaaaagccaaaagaagcagtattggcacaactatttcttaagggaaagaaaatcaaataaaatagctgaagttagagctattttcccaaaagttgcctttccatgaaaataaagttaatgatggattgtactggtctgcctgaaggctgagggcagtagaattattgacattactataatactgacctcaatcgagctaacctttaaattctgagaaacaggttttcaaacaggtttataggccaaagagagtctggaacaccctaagggcttggttttcctggccaagtaatcagtcaaagctattactgtcactctgccttttccttgtggctagataacacagcccaagtgcagttgccaatttctaatgaatactaggtgtggcctccattttatcctgtgcaaggggatattggaaatctttgttcgaagcaatatccacgagagaggtggcttcatgcctcagaagttaaggtggattttaaagcaatttaggctgctttttaaccaaaattacagtatgtttattgagggcctaataaatatttaataagagtgctaaataatgttgaaaatattttttaaaaatatataagcatagttcttgcctctcaggaacacaaaccctagttgaggagataaacaaaaccatgtggaaagtttaataacaatacaagaattaatttaaataacaccagaagctttcacagtggctgcagttcaagactaattcccaaaagagtagtagagatattacctggttctgtaaaagacccaagtttctaactttcaattattctttgaagccaattatctttcaaaagagagaataatgttgaatcctttcataacgtgagggcagtgtttttctgtgtggagttcccttgcgccagatccaccaggatggtgtattaaaagtacagattcctatgctctgcctcagaccaaaaaaaaatactatttctggtggtccagttcagggtctgctcttttaacaagccacctcaggtgattttccatacacactcaagttaagaactaaattagtgggagaaatcatacttgctgctttccctgaagcaggtgggttttttcatcaatatagatacaatctaagcagtaactacagagtttggagaccttcaaaaagaaaagattctaaggctctccaaaagcaaatacacatctgcatctatagcctacaaattggaaattagcaagtttttatttattcaacaaaaagttttgacagtcaaattagtgacccctaagattgtgtgaaatactgtattaaaatagtctccaaagttatggaagttatttgctaaagatcttattacttagccttcttggggttatttaaggtttctgatctgtatgaggaatgtgaaagatagcgtggctataaatgcaaatgtagctataattagaatagcctgtctgttgcctcctttttctgcttttccatttataaataccactaaagtccctgctgcatttcagaggccccagagatctgtttattttgtaatagaaagagaatgaaggggattttctaagtttttgatggatggaagacacatttctagcttcatgtctagttgttataaatgtatctgtatttttcttcttgctaatcaaggccatcatccccaggaggaaaacttctaacttctagtcatctgggcactttggctgctcacattactcctggagcttctccattcagggaggaagctaaaagctcatgcaatgcaaaatccaaaggaatacatttcaatttgttcaccacattttatactcattattctaatggagtgttccaagtaaaaattaaaatcacttttggaaagcccttcagttccttgttatatggcatcatgtttgaacaaagactataatccttaaggaatagtcacataaaaacttgttaattgtgagtcaaagtataatgtgttcatgagggtaggaggtatagtgataaatatattaaattactttatcccataaaagggtaaatggacacattttaaattcttccttcctgaattgcccttggttgggattagcttctgcaaagtttcagcctaaaagagatttttttaaaaatgatgaacaaataaaaagatgttataatatagtgccactactccacagattgttgttttatcctactggaaaatctctcagattccctttcataaagcgttatactacataaacacaatgtttaatttatgttatgatatttaggttttacttggctaaaataaatgaaatagaaaaaaaaaccccatgttttctgtaggagttaaaagaataaccttctctttcaacttcaatgtatgtgttttgattcctaaatgatcacattattcacttattggtttgcatgaaaaattgcatttttatttttattcattttcttccccagattttctgacctatgacgcacaaagcatatctggcaaataaaatttccctttagaagaggaaagaaggaagcatgtgagcttaaaggaaatgattggaaggaaatattgggcaggaggtggtggtggtatttctttcattgcaataggagagttctttaaacagtcgtgaataattgcctaaaattatagcagctgctgattttaaaaaaattataattctgtgcttgattcccatctaataggtcttagactaagcaaaacctagttatgttaggatgtctagcaattcactcatatagcatgtctggagattgaggaaacaattgcttcacacatgtcccccaccattttccacatatacaaagtactgagattaatggaaaaaaacttattaaatccattaaattttacaaaatgcagcttaggcacttattaaatttttcctcaatcactgaatgtaaaaagaccatctattattatggaatggatcttaaaatttttttatattgaaaacatttattgtactccaaatggttggaaaccaaagcccacagtgatcagataataaacacaggatattattttatttatccatagccacttgaggcttttagataaaaactttcatcttctttatttgttagggacatgattataaaataatgagactacttctataaggcattcatgaaaattacttattttattttacataagaaaatttaaaaggatttataatgtttgtatattaccttaaatatacagatttacatgaatttactttctttttcttctcttacaggaaaatatacatgcaagagtaagtactttttaaaataatataaatcaaatataaaaatcacgagaaaatgcagctgactgttcctgtccaaatcagaaattctgatttttctaatcatgagtattgcttttaataatccaggattgcaaaggcatttaccccattactggtgcatattttacttattaaattattatcacatatactttaccaaaccttttagaagaatcccaacatataatttactaagtttgctgatgccagaaagtctttgggaactgctcatcatacatatgtttgggaatcttaatgtgtccaaaaacacttctttctatgaaacatattagtctttaaaaaatctcagattaatatcataatgcatttgaagtttctatagattaatgcataagaaaagattattttatgaaaatattagatttcttctaatttcaagtcttgtatgatttatggagaaaaaaatcatacacattatagcatgaaaatgaaatattaaggtgaaatagttggttactaggacaatatagwaattattttagaaaaacagcgtatacaaacactctgaaagaggtccattattctagaagaaaatgtatccaggctgattaatgctgaaaggatgaaattgacttcaatacaaactccaatttatttaccaggcacatgtttggcttatgatgagcaactctttaaggtcccaagcttctagtgtgtgtttgcttgtgtgtgtgtatgtactttaaattcctaagagtttatatgaagaaataaagagcttacaaaatataaattatattaatgtaagcagcaaatatctgtcattcatattttggtgcagagcaacagtgagaacggaattctggaactgaagtgaaggagtcaggcatcatacagatctgtagaccagggctgtatatctcagtcaagttgagaagctgatttttgagacaccagacaggcaaccagttctctcactttatcagtcttttcttttcttttcctttcttttttcaaaaggaaaaactatccgacagtataaacagatatgagtagatttgtcttatgagtttccaattctaggctcatttgaattcaaagaggtgcatcggcctcctggcttctcttcaaagatagttgatgggggctgggaaatggctctgcctcattatacagcctgtgtccctggcattgtgccaaggactggagctttgcataactgagtggttagagaggaacttcatgtgctacaaattctgcttaggtttccttttctaaagcttgcattaggtctttggaaccaagaaacaagaagagargagagagagattcagaggagaaaaagggagatattcttcttagtacaatttgcatgcacggacttctacatacagaatacttaaacagttcattgtattgaaacacgcttaaaaatggccctagcacttgctgcaatcctgctgtgtaggagttagccaggttgtgtctgctccctctagactattctatacatcaagaactaaaaaagaagagcaatcccagcatgtggctggatgcacatcaaagccaagtctgccatgaattattttccttcctgttcctttcattcaggtcatgaagcacacatactgctacaggaaagggcaaaaggcaatgtcaagtgctgtgtaattgttgggttctttagtggcaaaggccagcaatgttgcagccaaaagggcatttaagagtacaagatgtgggtttttacatggcattcaataatccctcacttatggcaatcaaaaattatccgttttttagkttttttttacaacctaccttcttaaaaatacaaagtgaaagatatttgtaatttctaaaatgtttactttgaattataacctcacgcaaacatcagacagtattaaagtgacagcaatcatagaacttcccactaaaagcaagaaaaaaatgcctattctaaacacagctatcttcagaaatgcagtgttttgttatctttatgctttcactcttttttttatgtgttccctgtcagattagctattctcaccttggatttcaaggttcctattaatcacaaaatattataaattattttctcttttctttgtattttaaaaattattgaagaaacattgcaaaaaaaggaaaataaaaatgaggacagtaaagacaatcagcagtcacattccaaagctaactattgtagcattgcagtgagtccctcacttcaccatacttttttcttcacacacatacattgactaaaataggaacactatacgtttcttgtatgtcgacttgctacctcattcatcatcaatatgttgtgaatatctttccatgtcagtaaatataaatccacattgttttatacttgcataatattctgtctgatatatatgccataatttagtttgccaaacccttactgacagttgaattttgtctgtcttattgatgtcataagtttatttttatatatgatcttggtacaataatttgattttttggatcaatttctgaaagtgaaattgctagatcaaagggcttttgatacttattgtcagaacatttcaaaaaaagctgagctaatttatattctcactactcttatgtcaattgttcatttatccactacttgccaacactagatacaaataatattgatatctttataacttgtaatgtataggcccaaatagtatcctgttattttaatttgcatttttcctatgtatttaactatttgtatttcatttctaacgaatgatgtttttaaatgattattcacttttactgagatgttcattttttctaatacgtttgtaatgtctctttaattagtgcatattaacctttgtcttatgtattatatataatttttccagtttatcatctgacttttaacacagtttatggctgtttcaggctgtttttaatctataaaattttacggagctaaatttttaaatagacatcatttttttctactgtgcctttcagattttgtgtctgccttagaaattccaacattagtttataaaggatgatcctatgatttcttcaaattcttatatggtttaatttttagatttaatatttgacctatctcgaaattattttagtgtaaagaatgaggccaaaatccatttttattgttttatttatggctagttaattctcataacatctgatattgaataattcactttttcccactgaataggattgtcaaatttaccatgtactctatttctatacatatttgtatctatttcttgattttctattttgtgctactcatttgtccataaatgtatcaataccaaactgcttttatttttgtagctttataatatattttaatattgagtatcattagtctcagctcagtacttttcttttacaattttttgagtattcttgcatattccctttttataaagaactttttattaaaaatgatatatagccytgtttcaatagccaaatcgttctgcaagatttgtcaagaaaaatagtaatcccctcttctcctgccagcccctaaattctcattagaatacattactttcacatctttagctgtctattttggtatttatctttattactctaaaaacatgcttggttgtttcctttttagatactatctttaactttctcctgtagaagacaagaatttatttctctttcctatccctatctcctctacacacaacaaacacacacacaaacgccttttccatttctccattccccctaagttgttacgctgtaattttgttagagcaataatcaatgtctgattattatatctaagtaaacttcttttcagagctaaaccttaaagtgattacttatttttctatgaattaacaattgttgattatcgttttcattgtgccctcctcctccacttcatctactttctctgctgcttcttgttcttcatttacttagttttctttgtattaacaattaatgccaaactcacagccagttaactaagtcatctttcaagacaaccagatgcattatgtatgctatcaatttcatctccccaaaagagccccttccagagtctccagtccagttggactggtgacaccaggtgcagccatcttgtaggaattcccctcccatcatcctggagattctctttgcttctttcctgtgttggttctaactcattttggtggagtacatccttcagtagtttcttctattcctcacagaatgcatgggaagtaaaatgttaagaactttgtatctgaaatacttttcttttactctcacgcttggtttatagtttgatttgctatcgaattctaaattggaaaccattcaccttcagaatttagaggtaattctttatcattttctagctttcagagttgctattagaaatctgaaacattctgattcctaattatgcatttatacctatgtgcttatttctttttctgaaggattatagagtcttctttttgtccttagcactctgaagttcatgaattccaaggtgtgactccatttcttccattgtgctggacacttagtgagttcttttaamctgcaaattcctgtctttttcttgaattatttcgctcactatttactcctcatatttgctttgttttacctttctgtgattcttattagtagatgatgaagttcctagaccagtcatctaattttctcatttttttttctattttctattcttttgtgtgtttgttcttctctttggaaagtttcaagacattatctccaacacttgtaagaattagacactttcttaaacagattttcaatggaccctccttattttggtatccagcccctcattccctatttccatgggtaaccagtgactgtaattgattaacatttgcaaaatgattaaacattgcctcaccatttcactggttctatctggtctgttacatcrgttactattcatttatctcccttatgtattctaatttaataattattatgatgtatttattttcactatyatcttttatttatgacaaatgctgtttatttgtgtaacaatatacagtttcctttaaaattgacttaggtrttttaaaaggagagtaaattgaaaaaagtaacagcataaatgcttgtggctactgtaaaataaatattaaatttaggatgcttgtgatcatgaaataaaggaaattcaaagtaatatagttaatagttacataattattcttttttttatgtattttttccttcccattaagaaatatagatgcgctgcatgttgaatatctaatttttttttgttttccagcataatgtttatattatttaaaaatcattttaattttcattgtacttttttcttgtatttgatatgaaactctgcagcaaaactggatgctgctaaaacaaagccagctgtgtttacttgactttgtaaagacccaaaaataatttgtaatgagattagtgtagctacttttggcactaaatacttgccaaagtatttatgataagacagaggaagatgaaatagaattacaaattaataagtagtttagtttttggcccaatatrtatgagcaattgttacacgtttgtttacttactgtggggagtcatgggataattgacttcctggctgagatgggttatatcacacataggactcatctgcctcgcatggttaccagaactgaatcttactgtgggagattagatggggtgaattttgtggcactgaaagcatggaktattattatmttataacactccctctatcttttctacgatattgcttgtctgtgcgatgcagttwtctgaatatcattgctcatcacttgggcaactctctcaagtatatctccagacacaaaagtgtctgggagatttctcatttttgagaacgccttttttaggatttgtatttatgacttttttaggagaaacaacaatcatgtataaatactattatwgtcatttgaaatataaaagggagagatagaactttratcccaaagagtgatgaataaaaagtaatgatacaatctagacacaacagagcctaagttggttttttgatagatctggataagaaagaaatgagagcagttcttaacatttaaagttaaagttcttaacattttacttcccattcattctgtgaggaatagaagaaactactgaaggatgtactctatcaaaatgaggaagaaccaacacaggaaagaggcaaagagaatctccaggatgatgggaggggaattcctacaagacggctgcacatctgggtttttgttttttataattaaaaataagagcatatatataacaaaagaccacactaataaactattttattaaagttgaatttatattgatttaaatgtttgattatattttgatagtcttttagtgattttcaaagattaaataagttagcatttgataataaaaattcaaaagaaattctgattatattcatgtagataatatgatttcctctaatcaagttaatacctttcatatccttgacttgtttcttatttaagggaattatttctactttctacttaagtgactaaactgttgtattattgaagaayctctgcttacaatatataagaaaatgtccttcatatttaaaggttttgctactgayacaccatcagttagaaaatatcttttgggttttttgttagtttttttttttcagtataaatactgaaaacagttttcagtatttataatagatttatttttaaaatctacttcactcagtcgtcttggaaaccaataatccatctctccttccctccctctttccgagtctctctttttccctctttctgcctccttccccctctgtcactttctctccttaccttcctctttttcttccttaatagatttggtgcaaataggtatgaagtagaagatacagcctattaaagcaactctttactcccttgcagacctttaatacttattctggttttctttttaaaaaaatgttgcctttgggtttgctttagtctttgtctctcttatgctatcatcattttctctgcatgtgaacaaaattcctcagccatttattcacgtttttggaaaaaacgttcggtataagataaaagtacattacagaaaatctgagaactctatcatttctcagtccacaaatatgcattgagagaatactgtatgccatgcaggaggtagagtggagacagggaaactgatcataaactggcaaatagggaaacaagatgattccagatagtgataagtggagagatgtgatagtgactagtgtatgtttgtgaatgtatgtgcatgtgtatttctccacattgtgtgcatgtacatgtgataatacattcttttgtttctcatttatcaaatgaattgaattagatggtctctaagatgccttcctacttttttttttttttttttttttgcgacaggctctcactctgttgcccaggctggagtgcagcggctcactgcagcctcgacctccccagcttaagcaatctgcccacctcagcctcccaagtatctgagactacaggtgcctgccaccatgcctggctaacttttgtatttttttctagagacggggttttgctatgttgcccaggctggtcttgaactcctgggctcaagtaatctgcctgccttggcctcccaaagtgctgggattacaggcccaaaccactgtgcctggcccccgaccctttctaatgatgcaacttttctaattttgttcaacatttttatagctgttttactattctaataatatggtcagtcatttatccatagcawtactttaaaaaattattgaagtataaaacatccacctattgggatttgaaaacagtgtctgtatttcctatctacagtgtatctttattggtctctgcataaagaggcttttagaaatcactgccttctgtctgaatgatcaatgagagtgggctagacaatggcatgaccaagcttgtagcttcttcccctcctgtgaactgcctaaccagttggaacggctccaacttcgtctcagaagctgctaaaggaaaagtcaggcatgagtctcacttttgtgtagtcatttgaagatttgttgactaagaattccacatggaatgtcactgtgtgatagcaatgattagtgatagggatagtaataataataactaaagaattatcacatttatcagaagtcccttttggggactgtggtagaacctacaaaacattgtaaatgcaacttctcaatttggtggaagagagaggccaagacttccttttaactatacctttgcaagcctcygttaagatttttaaatggttattctcctcaataataatcaccaaaatgccatcaggaaaatgcatttttctttgttgtcatggtaaaatacgttctgaaattgtttcccattatattataaagccaattataaaaaaccttgtaaactgtacatggcatatggatgaaaatcatgctttgagacaatttgatggaaagttatacttgtttcttttaggtttttgtttcatagtagggtctttcagatttgcttctttctgtcgtcttttgctcttgcttttatttagaaattttagatatacaaatgaaaaaaagagaaaatgttttagaagtaatcataaaaacacacaaaaatgaaaatgtgttaataaaacatrtgtttgtgaaactgatattatttatctgtattgtagaggcaaaccaaacttattggacatggkctctttgatgatcaaaccaattcaacgtgtgatgaaataccccctattactgtgcgaacttcggaattccacccctccctctcacccagattacagagcactggacsatgcctttgctgctgtgaaggacattaatgttaacatcaatgaacttaaaagaaggaaagatttaggtaggaagagacatgatgaattggttgttttccattattggagtgtttgctttatgtttctgagaatcagaatgtttaagtagttatagcagctgcagtgaactgatcatttgaaatctacaattagaagctggagagaagagtgtggttttgccttgtcagctgggttaaggagaagattaagaggcacaagaaatgaaattaaaaaataaatcaagcagccatatgctcaacttcattggaccactgcaatcctggtgacatattgtgggctgaagaaacccattgcatatagtcctcctgtcactggagatatgtgtggtaagaaagagaaatggccacgttgcaatagcagtgggaagcaaatgcagaaagcacccaggaaaggggaagatctaggtgacagaggccatctagtcttttggattcatctggttctggcacacagagaatggagcttttgtggcaataatttctctactgatgtgagcaagtatacttctttctagaattagcaaattattgttaactatttgtaagctaaaatataaaattagtgtttaatgtaaaatttcaaaacagaagggataattacatggttcctatacatcccagaggtagtaatgcattgagctaggctgtgggtcctccctcagtgtgatttgtgttcacataagttcttagttggtgttgtactgctattattaaatctcagtttgacattaaagccacagcaggactttagagctaaatggtctaatcactttatttatttttgttttattttctgatgtttatttcaaaagtcatatatttgtattagtaaattaaaaagaaaggtgtagaataaaaagtaaatgttatggagtaagaaaactccgtgaacaaaatgaagagatagtatacaaaggatcactgtccagactatataatcactgacattaaatcaataaaaaaacattgtaatacaaaaaggttaaaaataaaaagaagcaattcacagttttaaaattctaatcttcatttatactcagggaaatgtaatcattgaaatcacactaacataccatttccagtccaagagactggagggaaaaagtaatgaatacgctaaatgttgaatctcaatctacaggtgagaatgtacttggaatcactagtttagagaacaacttgacaatacctagcaaagttgaagatgcacagaccggagactcagaaaatgaatttctaagtatttgcccaagagagactcttgcccatgtgctcaaagagaggtgtactggtaactagcattgttcataaatgcaaataaaaaagacacattaatccagatagtggataaactgcatattatacactacaataccacaagaagataaaaattaactaaataaaaaagtaggtgtatcaatgggttaatctcaaaaacacaatccagagggttttttttttaaagtaaatttgcaagtggtagaagaatatgtgcaatatgatactattttataaagttttaaaacattcaaaatgtattttataattccaaacatccacagtaaaagcataaaaatagatacagatattataagccccaatatttaggataacagttccctttagggatcatacatggagatcagggtgcctcaactgttaggtgagttgttttaaaaataagaagactggaaacaaagcaaaatgttaagactggacaaggttttagataatggctgttacattattctttatatttttctgtttgcttaaactatttcaragttttgaagagtaaaattcttcccttcccaccatgattccagtttgcatagctaacattttattgttttcttcagacgtactctgtcttcttttctcttttcttctgtctttctctctctcttcctctccctctctcccttttccttctttccatacttcttgcaacatatatggtactatagtttgtttttttaaaaacttaatcgtatatcatgaacattctttcaattaatattgccttctttttaatgtttccatagcattttatttatgagtatatcattatttattaaactatttctctaaggataaatatatagatgttcctaataccttgctgttagaaaaaaaatactctaacaaataaaactttgtatacttgattatggaaagcagattctctgcatgaacttcctggtaatagactatgaatattttcctttttgttagtttctgccaaattgttttctacaaaaatgtgttggtttaattctcatcagcagtctgtaagattgtccatctccctacacttttaccaacactgaatgttagagacatttaatgttttcaacattatgaaaggtgaaaatgattgcaaagataaataagtgaagctcagagaggttattcagcttgccccaaatctctcagccagtgaagaggtgctctaggatctgaggtctccttacattgggcacagttgtcttgtcttttcttttctatttttttttttttttttttgagacagagtcttgctctgtcatccatgctggaatgcagtggcatgatctcggctcactgcaacctctgcctcctgggttcaagagattgtcctgcctcagcctcccaagtacctgggactacaggcacgcaccaccatgccaggctaatttttgtatttttagtagagacgaggtttcaccatgttggccaggctgatctcaaactcgtgacctcatgatccgcccacctcggcctccgaaagtgctgggattacaggtgtgagccaccgtgcccggctgagttgtcttttcattagttagatcttgattccccattccagaggcctcagataataaatgtattatctgagacgagagggagaacttttttctagtatcagggatttctttaatattgtagataaatcaaacttaatccttgaggggcttttgtccttgtttctggaggtcagtggggtgggtgcctgactgggacatgggtggacagtggggctggagcatatggcctctgcagcagaggctcaaaaatcatatacatatttatcttgaatataaatactcrtcttgaaaactttgggtgaagtgcacactttctatgctgcatgtgttcagctacgtyattacattcttccttttcagttctaaaatacaagaagaatgacgaggaygaatcacttaaagacaaattgtctaaactaaatattcattcaattagcaagaaatcaaaaagagtgacaaatcatctgaagattctgaccagaggagaatcacaggtaatttttcttcttggaccacccaccttttcccagggaacatgaatgcagatatttttgtgaggttttgttttgtgaggactatttctagaatactgagaatcaaggtaattgccctatgctgttctcttgtctcyctctctctctctctctctctctctctctttctctctctctctctctctctctggaaaacaggggtgggagtgggaataggattgacactgtcttagctgtggtgcttctactcaagaaacagacaaaagagagacacggacatgggacataaggttgccccaggagtcctgatgctcatcatcaactagcacatattctccctcaaggcaatgcccttcttccatcctgttttacttctgctcttaaaagttgtacttttctttagggttcccttgatattcattttctctttatttcatctttataaacaaagtgtttagaggcataacttagtgcaattattttttctactccttatccccttcctcttccctcactccccagatgcacattatattagtgagtaacagtcctgtgtcagctgtttagcctagcttgagccactgtcatcccaatccctaataaataatagatggattagcaaagactcttaaactttaatgtgcattaagaattacctaaaaagcttgctgaaagacagattctagggttccacttgcctcaagggtacaatctagaagtctgtatttttgcaaacactctaggtattttgaagccaatgattttaaagtaagttatcaacagaacacacttgcaattctttgagaatcacaagatagaaagttcatggtcctgasatggtaatatagtgggcttctaaccaaaattagggaagatagttcttagtatactatctagtccttattttttccttctcatttgcctgtttttatcactcatgtattaatatctctaagatttttagtttgaacaagaggcagctgtatggtggttcatgttggtttcagatggctttggcagctgctgtggtcttttctccttccgttaagtctttgcagctttccaaccacttaggtaaaagcagccccttcttcctctggaaagggttaatatattgactctatatttcaatcttgacactattcatatttgcaggagtcagcacagggaagaaattaagaacaacatctttgaagttatccaaacctgggtttgaaccctacctctgccacttagtaaatgtttgtttgggggcacataacaaattcaatgtaatcatctgtaaattcggattctcctagtacttaacaaatgggatggttgtgaggattaaatgagatgatgcatacatcaagaaaacacctaacatagtgtgtaagcactcaatatactttagctgtcattattatcataaatttaatcattattattttatatcatcaccttgtatggttatttacctttgaatgtgcagacttttcttcctatgtgatgttaagtccttcatacatggtgtattaatcgtattttttactttctgtattttgtaatgttttgacattttaaaatacctttctggctgagcagactgcccttctagggctagccaattcttagggatagcaaatggctggaacacaactttcatatgcaaaccaatcaatcttgagtatatagctctaaccacatccttatctaattcttacacaccaagccaatatctcccctgccctaaatcatttcagggcccagtaccagcaactagagattacccctatatcccaaagcccattggagttatttaaaatagccagtcctaaactctttactctgcccctgcctcaccttttgcaaggaaatcccaacagaggttctggtctagactttctctttactcctatcttctgccactgcaccaaaacctggtgctttgcctctagccctgtgtggcatgtggtgactcctctctctgggacctgtgagtataataaacttcttccttccaagtcatgttcttgtttcttcttgtgactgtaccaaatttaccaacatgtacattcttagaacacaaggcttgaattatttttgtatttactccttaatatccttctaggggctaactgggtccattgcatgtaagaggttcctcttctcaacgtggaactataatgtaagaagttggggacatttatgggatatactcacatatctgagaaaggacaatgaagacatttcaactaaagacaaccatattaaaatcaaattggaaatttatttaagaagagattgtagccataatagagataggcatgtgtaaatgtagggcaaacaattccccccccaagtctttgggattttgcttctgactcaagacaattctattgaggaatagtaggcagcctctaattctgggctggcttttgaataagctgttatattctttaagacatttatcatcaacttcttatatttctcaattgtgaactaaaagtgaattgtagttaaagtagcctgaagggatattaattagatttttccccttaatcttttgagaggatgtcctgtcagcaatgaagcattttactgttaatcagaaaatcagctgcataggctggaygggaaaagagataaatctcaaatcaatcaattttgcacttgtcagcagctcaggtgaaatattggtagagttagggtataaagctattaccgaagaggaagattctattcaattcatcatacatatattgaactctcttgtacccagcaccatgttagagattgggactacaaagatgaacaggtataggttctgaattcagactgcttggggttgaatcctgatcctactataccgtgggtaagtttctttaactccccatattaactagggtaaagacaacatatctgtcacaaagagattccaaaggcatagtaggctaagtcaggtagttgtttatttctctctctctttttttaaattttttagagacagagtcttgctgtgttgcccaagctgggctagagtgtagtgccattatcatagctcgctgcagcctcaaactcctgggctctagcaatcctttcacctcagcctctcaagtagcgcagactacaagcgtgtgccactgctcctggccgctctctctgttttaagagtcctgagatgtgaatccagatgagctctgcttcataagatccttcaggaacccagttcccttagtgatttttctaaacatattgttttcatttgcctggttgaagctgtattcctgccatgtcttctttcaagtcccaaagaaatgttataaggccaagactcagacatgaaaacaaggcttcatccacatcctatttgcacaaacctggttaccagggcagagccagctgcaagggagtttgggaaatgtagtctctagcagggcagccaagtgtccaacttgaaatagaggtgtggattctatcaataaagggacagtaggaggaatgttaacaatctctgccatacctcctgaagcttctgtttctttatctctaaaatgggagtaatcataattccattatatatgtgtaaggattacaatgagaaaatggaagaaaggttttggcagtgtctggaacacagtcagtgtttaacaaatgttcgctattattttcattaaaacaacaatagttaatctgaaacaaccgaaatccatcagtggagagaatcacttaaatcattaaccagggttatgagagcacataggagagagcaattaattttctacagtgggaagaataggagaaaagggaggatttatagaatgggtgacatttgaactagtccttaaaaataaacaggattttgcaaggcaggaaacgaacagcagtatattccagcaaaagaaaacagcatggaaaagtcttgcttataggaaagtagaattgggcaatatttctcacagtgtgattcttgaaccttctactttggaatcatctgggtcctagccagatgatatacaaaataaaatatctggtgacgcctccttggaaactgcatttaaaaaaaaatctgccccagcatattgttatacacrctagactgagttggagcatagcaaccctaaggcacagaatgttggattttgtggggattccaaagaactctgctgcctatttaatcaaaagctttgtagataaacaatattaagaagtttaaaaataaaataaaatgtcaccatttttgatacattgagttctaatatcaaccctcttaaatttaaaaacagatgaaccaagcactgctatggttatcacccagtgccaagcttaataatacataccctattccatgaagcatttgcacgttcacacagattttgccaggatgaggctggttccgatcttgttttgtagccattttgatagccaagaaatactgcttgctattaatagcagcaataaatgtgtgctcctagaaattgtcacagcataaaaagcatatctttctgaattctaatggatgtacatgtaagatgacaaaaaaaactgaatacatgtgacactatcttaagtctgctgagttatcttaacagaaggactatttttgctaagattatatattatccttcaagtttgagttgataaagaattttcacatttcttttttttttttttttgagacagagtctcgctctgttgcccaggttgtagtgcaatggcatgatcttggctcactgcaccctccgtcttccgggttcaagcgactctcctgcctcagcctcctgagtatctgggactacaggtgcacaccaccaggcctggctactttatgtatgtttagtagatacggggtttcaccatattggccaggctggactcgaactcctgacctcgtgatccgcccgccttggcctcccaaagtgctgggattacaggccacatttatttaaccatgaatctaagaatattttctaaataagcactgttaaataaattggaatgaatcatacgaacaaaacaagaagttctagtcaatagatcaaatgtggctattttataaacccaaaaatgtaatatggtttgcgtacatacataatatatgccattaaaaactacagagaaagttttacaataccacatctactgtgacatgggtgaagttatgtggaaattaacaacagcaatttgagttataggacttggctttactacactaactgagcatcagttgtgttatgtaccaacagagaaagtatgtgttaagacagacagcatgtcatcaaatgttttcatatcatcaaagaattttcttttgtaatgtgctggaccaatatggtctgtgctattttaaaaaatatctgtttcatttgagttatgaaaataatttcatatatattttaggttaaagacaatacctttaacagagaagaaaagctgtttagagctttrgaaaagactgtgaggctttgtgtgaagaacatttcactctgtcttcaacacatacaggtaggtgagacacaactgttttcagtgttctacaggaacatctgatacaaaccattgatttccatggttgttttgaagagtaaatgtgactgttccttcctttatgttatgacaccggatcaaaattggaaggctgcaaactgctggtaaaggaagccaatatatagaggtgttttgctgtttgacctcttacctgctccactctctccccagtccaaatagtcatattgtgggacttttttgctcagatgattgcttcatggactatcagcatgctttctttgcaacagagatgagttcattaacacaaaattgcaagagacagaaaatttgtttgtttgtactaacacatctctttctagtacctaaaataagtataaaaatcaatataaaggaaaataaattgaactacaaaatcctattaactacaatatggaaatgctcccatgagattatgttagaaaacagaaatactcccagaaatttccaatcccataagaagttgtcctgaccctttgagaatcactgatttcaaccaactaattggagtacagtatgattatgctcggtagaaaaaccagtcagaggttttttctaatcgatctcataaagaggaaacagtgtccttcatgccaccttgacaatggctatgaccatgacacatagaaagttagtagtgttacatgtaaatcagttactaaattgtccccttctatattccagaagtttttctcctggatatcttagatatccgtttctggaagcagatgtttgcactcttagataaaatatcagaatgatttggagacaagtttccatgtacatgtaccattctgttcttatttattatctgatacaaagcctactttacaatccggtttgctattttcttcctaaaatgctgccttctgtgaaaagaaaaccaaaaacagttataacagccagagagtagtgggaaccccatcctttatgtatctttcaaggagtaaatgtctcttgggaacatctacaggaaagtcttctatttccactaatagattcaacaaaaaatgtaagcattttctcttaaagagagcattaaattttctaaggaaaactgatgaatttaaatcaaagaggagtgatttttaaaataagaaatttgtaagaattgcaagctaaagaatagctaatgagggaatttaagatggactgtttaatcaaagagggtcgtatacagagtactatgagaaagagacataaggaaaatgtaaggaaatatattcttacaagcaacctgattgtacagagcatttataaaatgtttgttgttcctttttaaataacctctcagtgataattaagggttatgctgatgaagtccacatttgggatatgttaattatactgacctcaaaacttgccttttttgtaactttgttcttgggtttcaggatgccatgcccctggctctgcagagtgtgatggaccttcaggagatttcatacaacaaagacgatgagatggactattctgagaccctaagtaatgccttaaattcgtgtcatgactttgtaagttatttatattcacagataaatgcaaattaaatagtgaggttgaaaggaaagctgctttttgtttgtttttctggagtcagaaataaaacatgcactaaagcaaatattaatgtcaaaattagtagatttaaatgggatttttttaaatcatttaatatttttaaagtggattagtgaggattttactatgatggaaatttaagaggaccacagattgtgtttctaggggtagccagtgtcagtgcagcttttaaaattaatatttagtttaagtctgcatgtgaaatattaagaaattattaagttagaaagctttgcttttctttttcttttttcttttttctgggacaggatctggctctgttgcccaggctggagtgcagtggaacaatctcagctcactgaaacctctgcctcttgggcttaagcaatcctcgctcctcagcctctcgagtagctggaactaaaggggcacaccaccacacctagaagattttttgcattttttgtagaggcggggtttcaccatgttgcccaggctggtctcaaactcctggggtcaagtgagctatgcttttcttaaacaagtctctggaaatgccttgagtccttacagaaagagcaaaggtactcactgaggatatgacacttattaacatgctatatactggaaggcaaagacttcctattgagaaagacttttatttaagagtcatatgttatttattttgttccacggtaaaacatttattttgtaagagttctataaaatatatcttgggaatcataaaaacatgcttgagccaataacacattttagtagtaagttactctgggtaatattaattttaatttagtgccttgtgtttctataggtattattatttcatagtagtatttcaagaattatagagaagatagactgatcatcttgaaagtggcattttcgtgttggcattataggcattttgggtaagacaaatcttcatggagtggccttttggtggaggatgttcagcatttttggcccaccaggctcaaaatctcagtaacatcccctcacatcaagacgttgtgacaaccagtgaagagcctcacataattccaaaccctaggaagtcatacagcccccgatctagtagaaaaaccaggcaggagcattttgcttttctggcactggggaatggaaagtcaggcttacatctgagctaatatgatagagaaacaggtcaacgacagatgaatggatggatggataggtacagrcagatagatgatggtgatgatgagatagatagatgatagatagatagatagatagatgatagatagatagatagatagatagtttttacagtatatgtttaatggaaaaggtgtggctagttctttatgtattttctgcatttaattatagagagcacacattctagaagtctttaaaggtttgctctttagcttagttccaatacattaagttaatatatatttattgagtaccacctgaaagtgtgatatgtagcttctccctcagcaagcatgctccagactttgatggaaagaagccagaagtgtcctgcataccttgcataaaaccacaagatgattaattaggctaagttaaaaaaattgtgagaaggctcaatataaaagtaacttttatggataacatatatagaactctttttaaaaatcaaatattaagaactcaaaatctgtctaaaggcagagcagttattcttatctaaccatgagtaatacatatctacacttttttaggacaaaataataaagtctaattcttatttgttctaacaacaattcctaagtaaaggtgaatcattttgtgtctgtgagtcactggatatrtatatatatataatactgtaattagattacctgtagaatccagtcaagtcacaaacatagtaatttatcccagatacagtaaatagattctttgtttatcaagggactcattaaacagtctctaggtgtatattgactatctcataagctagacatcaaatttaatttgtgttggctattgctggtgccaataagagattggtttccctctcccctagatttcccatgagttcagaccaacttaccaggggccatttaagttaattaatacaagctgctgctcagatactgattccctaggatagctttcgggttacaaaagagaaacctacttccaaattatcataaaatatcatataagcatatatgataaagggtaaagtagggcagtcagcaaatgtaaaacagaagagaaatagaagaaattaaatctaggatgatcaggttatgtcatgaagttgggcagttctatgaagttcattttcaatgactcaggccaaaaagtgtaaacaatttaagacacagaaacagcatcagcttaatcctttaatgtatttaaaacagaatgtgtaggccaaggtgagaggattgcttgagcctaagtgctcaagaccatcttgggcaatagagtgagaccgtatctctaccaaaaattttaaaaattagccaagcgtggtgatacattcctgtagtcctagctattcgggaggctgaggtgggaggatggcttgagcagaggctgcagtgagctgagaaagtgccactgcactccagcctgggcgacagagtgagaccctgtctcaaaattaattaattaattaaaaataaaacaagttacaactctgtggtcatttctgtttcaagattaaaatacctttattaaggggttactatctgtataggggatataattccactatcaaacataagcctccagggtagccagggatttggggctgatatgggaagaatagggtacagtctcctatgggatgaactatattccttttgctgccagcagaaggtgggagcgatatggtgaatcttttacacagtcttggtagtcaaaggctagagattcccccctaccctcaagtgctggctctgggatgagaaaggaggggaatgagaaagtgttgaaggagatgacaatgacaaaaccaaagactgtagagaaaaaagtggagttatattttgggtgagcaggctttaacttttgtattcctcttcctgctcactttttaggttcaatgttacaacctagagctcctgttttaagtctttgaataggtttagccagacacaaaatgatcagatcctcttttaatctgggtaggtgctttcctgttttcttttgtgcttctcgtgggggaaaaggtaaacctatggatagcagaactggacaaggtatgggctgatcctctctctgaaatgggctcattttttmttttggcaggcatctcacttacagagactcatcctgacccccttgtcagccctgctgtccttattcccagggcctcacaagctcatccagaaacgctatgacaaactgctggattgcaacagctacctgcagcgatcarcgggagaggagtcagacttggccaaaaaggagtatgaggccctcaacgcccagcttgtggaggagctccaggcattcaaccaggctgctcggaagattctgttgaactgtctatgcagcttcattaccctccttagggacctgatgctcgtggcacagcaggcttactccacacttgtgccggtaagcacagcaccaacacctagctagctaccttggcctactggatctgctagaaaccacacccatacgaaagccctgttcagagtgtgcacatgtatgccgtgtggtgtgtgtgtatttattttaactaaatccagtcagatagtctcctgttccttatctgtcttatccatgggaaactcaaagagggtttcctagttcaggtttactgtgacttacacatttgtaattcttttttggagatgccttttcaaataccaaacacctttcagccttgctccacctgcctgatgcaacattgaagcttatcaacaatttatattttgtatttttttctgatcaatagttcttagatgttaactgtgactatttaagatgtggctctaaaaagaaggccatctcagcataatgaaagatgcaggataacattcaaaccatgctttgttttgatttcatttttccccaagaaagagaagcctggttttgtgtktgtgtgtgtgtgtgtgtgtgtgtgtgtgtgtstagcttcgcctcccattaggatataattttataattattttcctgatgaggaagaaagatatttacaacttatatcaacttttgaaaaattagcttggtttcttggccctacgtttcaactacactagttctcatctgaatgagatggacagctattcaatgggtaacacctggagcagaaataattgtccctactttattttctattgtgcattaattaacttttaacttatactttgaattaaattaaattgaataaacgagggctatgtttacagggttcaaaagccaaaactgtgtaaatgtataatcagtctcacactcatacctgttcctctagcatcccattcgccactctcatccccatttttgttagtttatttttatgcatttagtgctttctcatgccagtaacaataaatgcaagtatatatttttatttcttaaaagtaaaaaacagcatattatatataccattctgcacttgctctttaacaatatattctgagaatgcatctataatagtacataaagagcttcctcattcttttttttttttttggkggggggggatggagtttcacttttgttgcccaggttggagtgcaaaggcccaatctcggctcactgcaacctccaccttccgggttcaagcgattttcctgcctcagcctcctaagtagctgggattacaggcatgtgccatcaagcccagctaatttttgtgtttttagtagagacggggtttctccattttggtcaggctggtctcgaacttctgacctcaggtgatccactcgcctcggccttccaaagtgctgggattataggcatgagccactgcgcccagcctgagcttcctaattctttttacagctttatagtaacttactgcatggctgtataataatgtataaccattccctttttttaaaataactttattgtgatataatttgtataccatacattccacctatttaaagtatacaatttgattatttttagtatattcacaagagttgtgcagccattgccacaaccaattttagaacattgtcgtggccccctaaaggaaccctgtacccatccacattttttcctaacctccccagctctaggcaactatcaatttactttctgcctgtacagattttcctattctgggcattttgtataaatgaaatcatacagtacatggttatttgtgactggcttcttctatttagcataacrtttcagggtttcttcatgcctagcatgtttcattatttcattcattttatcgccaaataacattccattgtatgaatataccacactttacttattcattcgtcagttgacgggcatttgggttatttccattttttggctgttattagtaatgcttctgtaaacattcaagtttttagtggatatatgttctcatttctgttgattatatacctaggagtggaatttctggatcatatgttaactctatgtttaaccttttgaaaaacaaccagactgttttccaaagtggctgcactattttatcttctcagcagtatcgactgagagtttcaatttctccacacctctttattattattattattattattattattattattattattattgttatagctatcctaatgggtgtgcagtggtatctcattgtggtttttatttgtatttccctgatcagcactgttttaaaactcattaaattgaagtaataacttctatacattaaactgcaccagtctgaactgcacatctcaatcaatatttgcatatacacatctgtgtaactaccacccagatcaagatataatccctttccagttccccataaagatcactcatgaccattcccaggcacctaaaggtaaccatttttctaacctgtattaccatacattgtttgacctgttttgtacttcatataaatggaatcatacaatatgtattcttttgtgtattaacctgtccctattgatgagtatttgatctatttccaacgtttttttattacaaataatgccggggtcatgatacgtggacagatgtatctgtaggacagatttatagaaatgatagaagtgggatctctgtgtcaaagggtaaagacgtatgtaattttgctggatattgccagattccctgcttaactatgtaccattttggattcccacttgtaacatgtaagaaagctggtttctctggatttttgccaatctaataggtttcaagtgtaattttaatttgcatttctttaagtattagtgagattgagagtcttcacatatgagggctatttatcttcctgtgagttagttgttcatgtgttttactcctttttctttgggttcttggtatttttctccttaatttctagcagcaatgtatatgctagggagatgagccttttgttgagataaaaattgagactactttttccaagttaacctttgtctttgacttcacttgtgattttttttcatgctaatgtttgtgtttttaaaaaatgcagtcagatttattaatttcattttatgacttctagattttgaatcttataaaggacttccatattttaaggctccaaataaattcagcagtgtttcttctagtatatttagggtttcatatttttttatttaaataatcaatccatgtagattttatcctggttcatgttgtaaaatatggatttaattttatctttttccaaatgactttccagttgctccaacactatttatttaaaaataatctcttgttactrctttctcaatgaaacacatttaatttgcaaattatttcgataatttcattctgaggtcatggtagaaggtgggttcataagttcagaacaaagttgagctttggcaggaatttactagtcagaaaagacatgttattttaggtatctttgatccccactttgaatcatgtgatttttaaaggcattttcagtttctattttaaattatctgagtatctttcacattgcagtccatagccaaacaagagcatagagatgctttgtttttgagaaatttctagtgtcttaaagtaaaaggcattttggagaagttatcctcattaaaatgattttattctttattttatatgtwctgtatatttaaactttttattttgtgatacttagagattcatatgcagtggtaagaagtattacggagatcctgtacaaccctcacacagcttacccaatggtaacacatcttgcataactacatgtatttctgaaaggcagaattgaatagtgattagagaacactagagtaccttgttttaatacctgctcactgctatactacattgtgtaaattaatgtatccttctgtttaaattttctcatatgaattaaaatgagaataataatgtaaataatttttaaatttttaattgtataaaaaaccacaatttaccattataagaatttttaagtgtacatttcagtagtgttaagtatacttatattgttgtgtaatagctctccaaaacattttcatcttgcaaaactgaaactatactcattaaacaagtccccatactcccctcccccaagtccctgcaaccatcattctattttctgtttctacaaatttgactactttaaatacctcatgtaaatggaatcatacagtgtttgtctctgtgactgccttattttgcttaatataatgtcctcaagattcattcrtgttgtagcatgtgataggatttctttcatttttaactgtgaatatttcattatatataaaaaacacattttgggctggatgtggtggctcacgcctgtaatcccagcactttgggaggctgaggcaggcggatcacttgaggccgagagttcaagaccagcctagccaacatggcgaaaccttgtctctactaaaaatacaaaaacttgccaggtgtggtggcacatgcctgtaatcccagctactcgggaggctgaggctggaggatcacctgaatctgggaggcggaggttgcagtgagctgagattgcactattgcactccagcctgggtaacaagagtgaaactccgtctcaaaaaaaaaaaaaacaaacaaaacaaaacaaaaaaaaaccctaaagcacattttgtttatttactcatatgtcaatgatcatttgggttgtgtctatctcttggctattgtgaataatgctgcaatgaccataggtgtgcaaatatctcttcaagatcctgctctcaattattttggatatatacccacaagtgggattgctgaatcatatggtaactctatctttttgaagaattcaaagctctatttttaattttcatttttattagagttatacatacacataaagattcaagtagttattcaggtttgatgacgaaaaacatttgtccttcgctccctttattccatttctcccgcctcagtggtaactactttccaactcttttagatgattctcttggtatttaccttcatatttaaaaataagactcttgtgttgtcatttcattattaatacactttaggtataatacattccactacgaaaaatgaggatttagctctctcttctctctatacccctacatttgctatagtcagacacactctttctatacccccttcaatacagttatagcatagatttggttgagttcacattaagcgtgtaaagtatgtgatttgtgtattagtcatgattccagtaggaaaaacataatgcattcaagttaggcatttggagaaaactttaataactatttacaaaaatgtgagtatggcacaggaaaacctttagaaatagtgccttgccctgggcaggcataggggtttggggtacaacaacatctaggttcaaagaaatatggggagggagcagtcatagcaatgtgtagagagagaggtgtgtggagagggtgacttgataggagctgtgtatttctgtcaawactactgaaagcaaaattaggaaataaatatccttatctcattttcttcccccattctaatttcctacaggtgctccttaatgatggattgattgaatccatttggaagccagagagcaagaaagctgttttgttgttgctgttgttgttgttgagacaggatctcactctgtcacccaggctggagtgtcatggtgtgatcacagagctcactgcagcctcaacttcccaggtccaagcagtcctcctgcctcagcctccagagtagctgggattacaggcacacaccacctcactgggctaattttatttattaattattattattattattttgtaatttttagtagcaggccaggtgcggtcacttatgcctgtgatcccagcactttgggaggccgaggcgggcggatcatgagatcaggagatggacaccatcctggccaacatggtgaaaccccgtctctactaaaaatacaaaaaataattagctgggcgtggtgatgcgtggctataatcccagctactcgggaggctgaggcaggagaatcacttgaaccagggagtcggaggttgcagtgagccaaaatcgtgcctctgcactccagcctgaaaaaaaaaattttttttttagtagtgactagttgcccaggctggtcttgaactccagggctcgagtgatcttctggcctcagcttcctgattagctgaactacaggcatgtactaccatgcctggctaagatttaaaaatttttaagagacaaggtcttgctacattgcccaggctggtctcaaattcttgggcacaagcagtcttcttacctcagcctccctattggctgtgattacaggcatgagccactatgccagacttacccagtttttgaggggtagggatgtaaactccatttctttgtaggaagcaatgttgaagaatttgtttgaaaaccagcacaggctcttaatcagtgctccttcttttagctgctttcccttgccaccatcctaccccaccacaagggaggtacctactgccatgagctcctgagctttttttccaagacttcattgctattttttctcttctgttctttcatttggcttgaaacttaaaaaaaaattcctatcatgtttgtggggtttctagagacaataaattagaccatatttatctagaagttctaaagttgccctaacttttcacaatggagctaccatatacctcctcaactgttcatcacaactcaatacatttaacacctgatatgattatctaggtgtctggaaacaatgccayattatttctacctatagatgccactgttggtttcaagcatttctgagattcagaatcaagtactagaagagatccaaaatttgaattgtgtgaaagaaaacagtgccacctttattgagaggaaactcagttttgaaaagaagaaacctgtgcagattctggtgagtttggcagcattcatgacaatgataactttcacctctttgccttatccaagttgtagtatcatatyattttccagatcacttatctcattctaatatcctataatttacatatgtgtagaatttcttgtacatttctatcctatataccataagctccataagatcatggattttttttctactttgtacatggcgtatccccaaagtgcctaaaatgactaaaatggtgcttgtcacaaggtaggaggcactcaataaatatttgttgaataagattttataaagataaatcatatagtccagacatttccttttctacataaggcataccaggccccagagataagtgggtttctcaaagtctcttagggcccgagctgagggggggagtataagcgtcttgattcttgtctaatttgctgatgatatttcccagataaagacatgtacatgtacaatttacttagctgaatacttaatatgcaacgggttgtctgcagaatggcaaagagtttaaaatggttgtgcaacatccaagagggattagaacctctgccttcttattcttgttttttcttctctacaacactgccctcctgtgcttactagaaacatttttccctgaataactcagctgggtactttacgataatagcctgctctatgcctgcaccttgaaataatcctctaaaaatatatgactcctacgttttaaaaatctccagggaaaaaatatttaccaactccatgaggattttattatgtatctgtctaaaccaaaacttctccttatttctcccagccagaaatgccacatcaaactgacattcatcgctccaaacttctatccacatatagtgcagaggaactctatcaagctaagcgcaagtgcaatgctacacaagaatatgacatcaatcttctggaaggagacttggtggctgtgatagwacagaaagatccactggggagtacaagcaggtggcttgtggacacaggaagtaagtttttccccagaactaccaytcttctttaaactgagatttttctgagggcacatgtttgggaagagtatacccatgaacttggttcttctttctttttatttcctatccagatgtgaaaggatatgtttattcctccttcctaaaaccctacaatccagcaaaaatgcagaaagtggatgctgagaacaggttctgtgacgatgattttgagaacatcagcctcttcgtgtcttcacggccagctagtgacagtgtcacaggcacctcagaaagcagcattggtgatagcagctcatctcttagtggcacatgtggaaagtttgaaacaaatggtactgatgttgacagttttcaagaagtagacgaacaggtaaaaatttgatgtaaaaatatgtggttgttcaaatcatgaaagagtatctctctactgtactctataatactgtaacacttggtggaaaagtgccagctttgacatcaaggagacctggctctattagcacagtggatctttttgtaaggagtttaattccctgagcctgtttccttaaatgaagcaaagaattagagataaagtgtgtatgtaaagtagccagcacaaagtagacacacaataaatgggagctattactattactaccctgctgttacatacttacagcaaagtatctttttataccccctccatcaaagaaaagtagttcaatactgaacagattgctgccatcaatagcacatgggaaattgcccatgattcctctaagagcataatcttcattgagctatctagtaattggccagttttaatctcatgtataataccacacactatatatggaaactttttctttttttcttttttttttgagatggagtctcactctgtcgcccaggctggagtgcagtggcgcaatctcggctcactgcaacctccgcctcccaggttcaagcaattctcctgtctcagcctcccaagtagctgggactacaggtacacgtcaccacgcctggctaatttttgtatttttagtagagtttagtagggtttcaccatattggtcagactggtctatactgaaacttgtaagagctatatttccctcactgcactaatgcaaaagctactggtacaatctttttgcaaaatggtaagttaattatagtgcaggacttgtttttgctatatcagaaaggttcagtatacttaatggttcattccccagtggtgaccatctaattcctttatttatttaccttgctttttctttagtgttctattaataatttatttaaatttatttttatagaggttatgtatatgtatatgtgtagatagatagatagatagatagatagatagatagatagatgatagatagatagatagagaagttaaaatagtagaaaagcatacgtaacttaaaagtaagctgggcttggtggctcatgcctgtaatcccagcattttgtgaggctgaggtgggaggattgcttgggctgagtttgaggacagcctgggtaacatagcaagacctcatctctactaaaaatcaaaaaaattagccaagagtggttgcccacatctgtagtcccagctactggagaggctggggtgggagaattgcacaagccrgggcggttgaggctgcagtgagccgtgatcatgccactgcactccagcctgggcaacagagggagatcctgtctttagaaataataataataataataaaagtaatggtttttagtcccttctccccttgtcctgtgcttcagagacaatgcttgggtatatcctttgtatattctgtgcatatacaaacacatttataccagtgggaaacatagcatgtatggtatatagggtttttttccatgtaacaatatatcttagacacaattaaacctaaatagctatcttattccttaaaaagctctacacagtatttaattttatgtatataatttatgtaactatcagcctaataatagatacatagaacgttttgggcttttaaaaaatttcaaacaatatttcaaggaaggggcttgtccatctatttttgtgcatttgtatgagtatataagtgtaaaacaaattcctaaaatattagagggccaaaggtatgtacatttaacgtctttatagacattgccatactgaccttcaaaagtatggttctattcagtttctttcattaacagttattgattgctgtccaattcatgacttcttttttttttggtttggtgttttttttcaaaagcagcttatcaatatcttatattcatgtcatataattaatccatttttaagtgtacaatcatgacttttmgtatatattacaaagttgtacaagtttagtatatttacaaagttgtgcaaccatcactttaatccaattttaaaacatttctttcactccaaaaaaccctttgcacccatttgtagtccctcctctttcccacccctaaccccagggaaccactaacctactttctgtctccatacatttgccttttctgtatcttttgtataaacaaaattgtacaatatgtggtgttttacagctgctttttttcacttagcaaaatttattgagagtctttcatgttgtagtatgtatatgtactttgttgctttttatcgcctactaatattccattctgtgggtatattttgttaatccactcaccagttgatggtcatttgggtaacttctagtttggggctattgtgaattatgctgctatgaatattcgtgtgcaagtctttgttgtggattttatttctcttgagtagatacccagaagtgtaatttcttattggttttataagtgtatgtttaaatttttaagaaactgccaaactgtaatccaaagtgggcgcaccattttagattcctaccagcaaagtgtgaggtttatgggttgcagtttcttcacatccttgtcaacactagttattatttgtctttttaattatagccatcttgtgggtatgaggtggtatctctctggggttttaatttgcatttccctaatgattaatgctattgaacattttttcatgggctcatttgccattcttttatttcctttggtgaatgtctattcaaatatttgcctatttaaaaaaaactgggtcattttccttcttattttcccattgtaagagttctttataaacctgagtgcaagtttttttttaatcagatatataatttgcaaatattttcccctggttataactgactcttaacttgtctggacattactatttgttcttattacccttctgtcttgatgtttcaaaacactatttctctattacttgttcactctgttgtttattcagtttctaaaaaacatattataatgctaactaatgaatttttatcagtgaaatctatgtacctgattaaatgtcctgtcagactttgccttgtcccaataacctagatggacagaaatctgagggccaaatttatcagcacactctaaagctggcttgatgttgagttcttgttcttacttggctctacagggactttggactgagcacctcacacagactttctgcctggtgtttgtagtatgagactgcatttagttcctactagctggtacttcaaagcaattttctccaagcaatcctatcaatatatataatgtgaattacatccattagagatttccattaccaagagaggaaaaaaatgagatagtatttcaaaacaaaaaatatattaatggcatatcttcataaattgttatttgctttctttttcctctgcatttggcaccaattcaaagtaggcatagcatcaggaatataaatataagcacatataagcattattactaataaaactggattgaagatgcatcttggatcggtagcacatgggatccctgatactttccctcagagtagaaatcatctaactcaaactgaaggtgaaccctgtgcagggaaaaagtctgtcccaataaacttactgcaagatgaggaagaggatgcacctgttggaaacttcactacaagggagaagagaaggccgcatggaaatatctcccttaatgtcttaactctagccaatagatgcacatgggccagtgstttccagactccccctgtaatgcataatgcataatattgaaaacagagagaaaggagtatattatgtgcctaatccttgccccagggccgatgtttctattctgttggctttgagaaattgtggggagaagaaagtgattaacctctgtatttgtgatgtgatagtataagtcaatacattatagaggtccctgtaatgtgatcaaaagtggaagaaaattatatcttctttaccaacagtgagaatacagtacatattgtaatatttcacatttgcggtatcctacaaagcaattttctgtgtggctatttagactttcgttcttgattttattttattatcaggaacatcagctgaaacttgtactggcttaattggatgccactttttgttatcatttatttccctctcccttcctactgtggtagcactttttttatttcttccagaattgctatagcatgtttccaaggggtgttgtaggatgtagtctggatttattgatgggtctagtgggccctgacaaaaaggacaggtggcctctacctcatactcagggggtatctttgggtctctaaagatcattcacatataggcaatttcaaacttagattctagtggctctgtgatttttatactagagctgaatttttaacctggacgcgaagacctgaagtggtctatgaatgagttttgggaggatttaatgagtctcctcaaatacattggaaatattgtgcttatttgcatatgtacacatctatggtaaaagaagtctacctttttaaacagacttttaaaagaaaattttatctaaaatgttagaaatcactgctgtagagatttaacttgcttatccattctctacctcaagtaagaagagagactgctacaaaaaagttcccccaaattatattctggagcctttgttgaataatggggatgagctagtggatattcacaacctggcagtactgatttataccaaggtccttaatttttaagttcttcattttgttttttgctatatcgaagaatataacaaaagcattcacgtaaatatgccttcccattctaatgtattctctccttttgtccatcaaatagtaatggcatgctctgcattagtgttccatgctgcataacaaattaccacaaatttggtggcttaaaacaatacaaacatatttctcaggggctgttgtcaggagtccaagcacggtttagctggrtgccctgcttaagatctcatgtagctgcaatctagstgtttgctggttgtattgcttctgaaactgagggttctcttcccagctcatggtcattggcagaattaaatttcttgttctggtcggactaaggactcctttttcttgttggcaattagccagagaccactttcaacaacctgaggctgctctcaaatccttgccatgtggctgtctctataggcagtttacaacatggctgtttgcttcttcaaagtcagtaggtgagcatctctctggcttcaaatctctcccttcagaggaggcctgaatgcacttcaraagtctcatatgagtaggtcaggcccatccaggataatccctcttttgactaactccgagtcaatttcctagggactttaataagcacctctgcagaatctctttacctttgctatagagtgtagcctaatcacaggagtaatagcacatctattaagaagttccagtcacagtcaaggggaggagattatatagaacatgtacaatagggggtgggattcttggggtccatcctagaattctgccttccagagtgtctaagatgccttgtttggcaagcagaatcttgtccttggcacttctcaaaaaggactaggtttaataacggctaaaacccagttttggggggcagttcagtgtctgagaatcagtgttgttttctttttccacataagtaatattgaaaatataatttttgacttctaaaaaaagtagtcgttttgctaccaatcccacrttcatagtctggcccttcatctttacattttccagctacctatgatgatgatgctatatacctactgtgtcattgtttagaaagtgcttaaaaaagtcagcttattaacatgaagagattttcaaaaatagtatgaggtaaaaaacagcttgcaaagttatgtatactataagtccatttttattaccacttcaggtaggtaggtagaaaacaaaaatggaaggaaggaaagaaggaagaaaggaagagaggaagatgggaggaaggaaaagaagatactaatagcagttgggtgggttttgttttgttttgttttgttttgcttaactttacttaaaatttttttcttcatcgaaattgctcgtgtaattaaaacatataattgttaagtgaagaacatgaaagcttgctcctgaagggtaagagagaataatgagcatttttcatgcaatacaactaccttggtttccagagatacatataatgtaccataaatgctgattctgtaccttttagttttagaacagaagattaacatatattatgacttttgttgctgttaattggagaattgggataaaaataaaatgatattcagtgaagtcaggtaatgtggctcacggaggaaggaaaaatcaaatgcacaaatatagaataagggaatgccaaactgggaatgttaccacagggaaagatctagtggttataagcagtgggtaataaattaggtatgagtcaataatacagtgttataaaaaaagtaagtgtggtagaaaactgagttgtattcacagaatactgcacctaaaatgagtcagagctttatagagtagaaagaagcaatcaataaaatacattttaaaaagtgccaaggaaaaacagaagaagattaggtgattatggctcaaattaacaacattgtaattaatgtgcctggaccaaaacatattagcatttaagattagaaagttacagactgaaacaattaaaatgttgaagataatgagaaatctttcagttcttaaatgcatgacaggttaaaaatttataacttgtagtctaacattaaggagactaaaaatactaaaaaggagacttaaaaaagagactgaaaatagactgctgtctctttaaaagcagcttacttccattttgagtatataatatatgcccccatttaacataaattatataaaaactaaaaagtgctcatcctaaacaaattttgggtcatgattatctaaagcattgaaagtatataattttgtactttaaatttacaatttcatgagaatatattttaatatttagaatataaactataatttcataccaaacagatctagatggaagagtttatatttcgcttgagagaattgtgctaaagtaaaaaactaccactatttagaaatgttctattagtaggcaatctaacctgctaaaawaatctatagttgcataggtaaagcattacctattatttataaaaattataaaagatgattaccaaccactaatgcaggctcttacagatgtttcagatgtattatagtacgttacattcccgaatacttttgcaaaccaaatcttccattctgttcctgtggatttattcaatgttttcactttctacacagcaaaacaacaccatctacaatatactagaaactccagtccctctccgcaagaatacactctgtacatacttgctagaacaagagtttggtctctaaagcattatgagaaatggaccaagcacaggatttgaagttagaagatattggtcatagcagcaccaattagctctataattaaaaatatgtttcttctgtaagacataactcataaggttgttgaggacaaagcacatttaacatataactgccatgcgctctgtaaaaggtgtttattattgctaccactccattgctaaagaatttatagtacttttaattttcttctttacttaaaaaaattatgtaataatttgaccatgttcatcaatctcttgtatgtatcttttatgatacaagatgatgtcttgtatgatatccatgcctttcaataaatatttgaatattcctactaattttcaggtcaaatcaataaatatttgaattcctactttgtaccataatgtggtcaatggagaaaagtttaaatgtgtgtcttagtgcatttgggctgctgtaacaaaacaccataaactggttggcttataaacaacagaaatttatttctcacagttgtggaggctggaagtccaagatcaaggcaccagtttatgtggtgtttgctgaggggcaactttctggttcatagatggcaccttctcattgggccctcacatggtggaaggggtgaagagtctcttttgggcttcttttaaagagaaaccaatcccattcaggaagttgaaggctaatcacctccccaaggccttacctcttaatagcattaccttgtggattaggctttcaacacataaactttgaggggaaacaaacattcagtccatagcaatgtggttctttccttggggagcagctcatattagttgataaatcaatatcccaatcaattgaatcaaagtttcaccaaaagttaaataacagtttaatatttaaataacaacttcagctacagctatagtctcctttccacactacgcattctctttctctgcttaatgaagtaatgaagtcatcttatttctcatagtttcccttacctattgaatctcaagtttgagagttaatctgcttgtcttttcctatatgttgttttcatgtattcatctccgtaccttcaaatatgacatattcatgccttttgtcagctttgtcatttatgaaagataacttatttcaaaattcagctcaccattagctgatgtatcatctgtgtgtagagttgttgctgttttggtgtgttttgttttgttcactggcattttcttttcctagctgagttgtaagttgtccaataaaataataaccagcacttagtaggtacttgaaaaattttcattaaataaatgaatgggaataaatattgcttaaataaatgaatgggaataaactaagccagttgcttaattttatgccataactaaacatttttattatcaatcttatgattttgttggaagaataaagacttattttggggcttcttacgcacttaataattataaattgttcttttgaggtcagagaaaaattcttttgactgaaatattgtattattctaggccataaaataatttttaaattataaatttaatacattgtcattataaaggtttgggaaataaagaagggaacaaggaagtaaaaatgaaaatcagctataattgtaccattcaaagaaacaataatattagacttatatcgtacatctaattttatgttctttttaaggtttactattttatcataagtgtttcccatgttattagtctcagaaagcatcgtttttgttgttgttttgtgttttttctttttttttttggagacagagtctcactccgtcgcccaggctggagtgcagtggcgcgatctcggctcactgcaaccaccgcctcccgggttcaagctattctcctgcctcagcctcctgagtagctgggattacaggcacacgccaccacgcccagctaatttttgtattttttagtagagacggggtttcaccacgttggtcatgctggtcttgtactactgacctcgtgatccacccacctcggcctcccaaagtgctgggattacaggcgtgagccaccgcgcccggcctgcaccgtttttaatgactacaaatctccttagtatgagggtctggaatttaactatttttctcttgctaaacttatagtgttattcctactactctcccacttttcgccattcttatgggtaatccagtaacattgttatgcaaaaatttctgccgatgtttctgtagaagagattcttcaagctattttgattcacaaggaattaacattttaacattattaaaaatcttttaatagaaactgccaagttgccttcaagcatggacaatttatattcctcctaacagaataataggaatacctatttcactccattctcacctgggttatattttagcaaaatacatccaatagaaggagttggacaatgtgactttggcaaaacaaaaaaactttagcattgcttctaaaagcttggaaacttttatgatgtttctcttaatattcaggttccaattccaataatgtcttttgtttctttgtctagattttctatgcagttcatgcttttcaagcacggagtgaccatgaactcagccttcaggaataccagagagttcatatactcaggttttgtgacctaagtggcaataaagagtggtggttagctgaagctcaagggcagaaaggatacgtgccagctaactaccttggaaagatgacttatgcttaagaaaataagccttcaacttttattttccagcaagttgttgattgactacctcataaaactgacattacaaaactttggaccagaaagcaagaaacctctgaactacagaaactgatactgtactgggttttcaggaatactgtacttcctaacaggattattgcatgaatgtattataaaggatacatgttgaaagaaatactaagccaacagaaatagcaaagcaaatgacccaagcttcaactatcaactatttaaaagtgaagatcttttgaaggagtaattatattcttttatcatcaagaaaggttggatccaaaggtttttcaatttacttttttttttactgtatgatgtattttgccttaaatgtttttgtttttcatattgctctcttgcaaatgcatacatgtttatatacatacatataaaccatatatattatgtagctttatacacgtatgtggataatatgaattatacacctatatgtataaatcagagtatacaccaaatatacataagaagaatataccaccaactagaagtctttgataatatattttgttaatgtttcgtttatatgttttgaactaaaactgaataacttgatattaacatgtaacattactgaatgcacactatatgccagacattgttctaagtgctttatatgtagtaacttgtttaatattcaaaacattatgaagaaaccatggcccaaaaaggtgaagtaatttaatccaaatcacattgctattaagtggtgggcctggacttaaacctaggtagtgtaaaccaaaaataaaattctaaggcttccaaccatctaaatagacttccccttcagccagggcttttttctttcttttcttgttgtttttttttttttttaaagagacaataaaaggaggtttttttattcaaaggtataactggataagtagatttgtttacaatcattcttgtgaaatacttttttaaaaaaatacgatcaacttctttgcaaatagtagacacatacctcaacaatgatgacctaatttttgatccataatgtaagattaggtagaaataggcaagctcacactgctaaattaactatcaaatactcagtcaaaactccatttgtggcccccacttcttgatctatttctgttccacttcgtcttctaccatcttgccgactttcctgagcaactgctttgtcgactctctctacctgaccaattgccagatcgacaacctgactggcctgaccagccactcctctgtctggaattaaaagatgtttccatcataatattctttaatttcaggtaatttagctggcactgagagtatccagccggaatcatgccactttgcctgtaacctttgactcaattggaggaatatcaaagcaaacacccatatttcctttcaggaggcacactctggtaatctgagacactgcattactattcagctttctaagttctttccaagcacagctgacatcctgtatttcctctaggctttccagagtcatggtcacaaaccccttatcagagttgattaaagatcatggttcaaagcttgatacaccagaaatgtgggctaaagctgcagccaatgcatctatcgcccctttctcttctatcagtatctgagctgatggttggaaaaaaatcaacagcagcataagaaatggaagccagagaccttatggcatccatgcttttaaatttaactaaatccattgtagaaggaacacctacacatttaaaagtaatttgtgttttttgttccacatgtcttagttgacctttctcttggttgataaaaacatatacaaacccctgtctgtccagctttacccacgcatccagagagatggatataggactcaatatcctgaggaggagaactttgaatcaccaggtcaactacaggaatgtccaaaccacgaggagccacattggttgccaccaaaactttataattacctctctgaagccttttagtgtaatttctctttgtgactgtgcaatgtccccatgtaaacacagtgcattctgttttgtgcggattcatggccatgtcagttacattcttcttcgtctcacagaaaataatagccctcccttcagatccactgtagacttgaaggacatctcattttcatctgtgttttataaaggaggaaattgaggacctcacatggagggactggaatttaaaaccaggtcttctgactttaaggcctttcttttagtgttttcccttttcttttccttaagtcactaaaatctgtagttatataatcttacataaagcatatgcaaaatagaaaaatgatagtcaccacatatctactaatgggattaaaatgtacaatcctaaaagcttacttgttagcacacttgcttatctgtccattcattcattgaaccagtaagtatttattgagagttagtgggaatacaatgctgtgcaagacaaacaagatccctccattcataccacttaaattctagtggggaaaacatctgcacataacaaactaaataaaatgatcataaaataataaatgctatttatataaaactggctactttcattactgctcagttaaagggtcttgtagctcattttatgacatgaaaaaaatcaaggtctaaaagctccttgagacaatttaaactctaataccaaatatacctctataaaataccaaactgagctaaatacggtatatgtgtacttatacatatgtacataacctaaatatacgtgtgcacacattatctatacaaagagccatactcagtgaaagataaattacctcctaaactaaagtcccctctgaggtacaacagaaattaaaataattgcttctcttctcaactctatgtagcacgtattttccatgatgggataaatgttttcatttcaagtgccaatgtgtgaactgtaataaacattactgctttcattttttgtaggtatggaggttacattaactgttatagttgcggagctgagtttttatgtcaggtaattttgtttagtccaaactggttttgaactataaacaattatggatatgtattttttggtttctttgaccccaaagggaaattggggtttatgtcaaattgatgttttatcaaaataaatctgtttctcaaagcaaaagtctctgtaggattgagataattcattatttacatatagggtaaacagacatttactgcctattgagatcataattgagataatggattatctcaatcctggattctaatttactacaaataatttagcaccattatttaacagagcagtttaaaataataatctttccttaaaaaaaaaaagaccaagcttaattttaaaagctttgtgtttacagagatcacctatcaatatactttagaataatgatgttagaaaaacctagggattaaggaagacagtttgagattagagatttgtagagtgaagatttagtagcacaaatcaagtttgatggaacaggctgttcatagtcttgtgaatgtgtgaatttgttggatatccagtttttttgctgtgaataataaactgtttctctgatgcagagggcttcctatcttctctcagaatatacatgtacaacaattgctggttaatttgttagcttgcaagtaagacaacaacgcagaccttccacattttctgacttaacccacttatgcctagtgttccattattgcaatgctcggcttatagagttatttatatcctactgttcaaggtcatcatcaggtctgatttttcaccaaaaaaatttgcaacctctggcataaatgggttaacaatgtacaaaacaatctcaagaattaatcattatataggagcttattgtatacaaagttagctaaaattaggtaaagtgctataacattttgagcactaagtaagatagccttttctttcatggtataggaagaagccatcagtgtgtgaacaagtcatatatttccatctgcaaagacctttgtgaaatggtatttttcttcaaaacttatcaggaatgtgcataaccaagatgaatcaaaattcaacatttattacgtactatgtgcatgtattacattggcaatgtaggaaaagtgagcaatgtgagaaaaaatattgtattaagcaccaggagagttcacaatttattggaaaaagatatacccttaaataattgaaatgaggtgataaaaaaggtaaagatataatatgaagtatgataaatcaattaggaaaatccattgatatgagaaatcaataatgaaaaaataattttgaaaaagatgaaataattgggagggagagggagagtcagttgaaatggggctagcacagaaaatgaacacccagaatacggggaggaaaatagaaaactatgttgggtcgtccctgccgccacataaggcacctcattcatcaggatcaactcttggggctttgctagaagatgaactatttctttttccttaaattcacagatgctttcaatcttctgaagatctcattgagaaccagtcattctaatcattgttttcacacactatggaaatcattagaataaaaatgttgaagattgatttaaaatgaaagtttccaagttttgttatataatatttagcattttaaggtaagaaacaatagaaatttgattatgaagacttttattaaattacagtgtattacagattatatcataataataagcctttcatctttaggctaatatgatacaaaaacctacttggccacattacttcttgagtttcttttgggcagctttcttcttgaccatctgtaatcgcttcatagcattgagctgtgattcttgtgaagttgggcctttaagggatgctgagggagagctgctggattctgaagtagttttgctggtagtacttccactaggtcctgatgttccactatttccattcccacttagttggctgctgcttcctggaactaaactacttggactaggaagacctactttgctgacattgtcacaactaactgagcgactaaggccagttttacccaaggttagaggtggaggtggttttaaaggtacagtgggcgtagtgctgttattggaacctattttggaacctattccacctttggatgatgttgccagaccagtcaaacccacaggtttctggttagctgacgaagtagcaggtttcccagtattgttttgtgttgttgaactcaattttgctgttgaaggaccagcagaggaagttttggctgcaaaagctgcccatccagttaagccactagttactgacgaggaaacgctggcactagaagaatttcctgaaataactgtggatgtctaaaaaaataaagtaaataattacattagagccaagtttaatcagtacctgtataaacatcccaagttatgaattgggaaatttaaatcacaccaccaaattaggttcttatgaagctgatctgaaaaaccacacagaacaaaacttatctgtatctagtgggtattatcatttgcaaagcagaaaatttttgataccatattcttgttctaatgattccaaaagaaaatatatgaaattcctttttgggaattgcttttagattcaattctaagctatatctgaaaaccagatttagtgctttaacatagtttttacccaacaaagtattatcgaccttagttaaacatctaattcttttagacttttctccaaataactagggatcatttcaaaaatttaattcactcttaatagcaaaaatgcccatacccagaatattcaggagaacatatccaagatgaagagattcagtcaatatttatttactgagtgactgtgtgagagaaagaagacagctgtatagattctaaacccattaaaaaaaaatgtcctcctaaattttgagcaacagttacaggagtacaaaatatatgcaaagttaattacttggaagtgta

SEQ ID NO: 97301 - DNA, 29540 bp, Homo sapiens
tctatgaatgagttttgggaggatttaatgagtctcctcaaatacattggaaatattgtgcttatttgcatatgtacacatctatggtaaaagaagtctacctttttaaacagacttttaaaagaaaattttatctaaaatgttagaaatcactgctgtagagatttaacttgcttatccattctctacctcaagtaagaagagagactgctacaaaaaagttcccccaaattatattctggagcctttgttgaataatggggatgagctagtggatattcacaacctggcagtactgatttataccaaggtccttaatttttaagttcttcattttgttttttgctatatcgaagaatataacaaaagcattcacgtaaatatgccttcccattctaatgtattctctccttttgtccatcaaatagtaatggcatgctctgcattagtgttccatgctgcataacaaattaccacaaatttggtggcttaaaacaatacaaacatatttctcaggggctgttgtcaggagtccaagcacggtttagctggatgccctgcttaagatctcatgtagctgcaatctaggtgtttgctggttgtattgcttctgaaactgagggttctcttcccagctcatggtcattggcagaattaaatttcttgttctggtcggactaaggactcctttttcttgttggcaattagccagagaccactttcaacaacctgaggctgctctcaaatccttgccatgtggctgtctctataggcagtttacaacatggctgtttgcttcttcaaagtcagtaggtgagcatctctctggcttcaaatctctcccttcagaggaggcctgaatgcacttcaaaagtctcatatgagtaggtcaggcccatccaggataatccctcttttgactaactccgagtcaatttcctagggactttaataagcacctctgcagaatctctttacctttgctatagagtgtagcctaatcacaggagtaatagcacatctattaagaagttccagtcacagtcaaggggaggagattatatagaacatgtacaatagggggtgggattcttggggtccatcctagaattctgccttccagagtgtctaagatgccttgtttggcaagcagaatcttgtccttggcacttctcaaaaaggactaggtttaataacggctaaaacccagttttggggggcagttcagtgtctgagaatcagtgttgttttctttttccacataagtaatattgaaaatataatttttgacttctaaaaaaagtagtcgttttgctaccaatcccacgttcatagtctggcccttcatctttacattttccagctacctatgatgatgatgctatatacctactgtgtcattgtttagaaagtgcttaaaaaagtcagcttattaacatgaagagattttcaaaaatagtatgaggtaaaaaacagcttgcaaagttatgtatactataagtccatttttattaccacttcaggtaggtaggtagaaaacaaaaatggaaggaaggaaagaaggaagaaaggaagagaggaagatgggaggaaggaaaagaagatactaatagcagttgggtgggttttgttttgttttgttttgttttgcttaactttacttaaaatttttttcttcatcgaaattgctcgtgtaattaaaacatataattgttaagtgaagaacatgaaagcttgctcctgaagggtaagagagaataatgagcatttttcatgcaatacaactaccttggtttccagagatacatataatgtaccataaatgctgattctgtaccttttagttttagaacagaagattaacatatattatgacttttgttgctgttaattggagaattgggataaaaataaaatgatattcagtgaagtcaggtaatgtggctcacggaggaaggaaaaatcaaatgcacaaatatagaataagggaatgccaaactgggaatgttaccacagggaaagatctagtggttataagcagtgggtaataaattaggtatgagtcaataatacagtgttataaaaaaagtaagtgtggtagaaaactgagttgtattcacagaatactgcacctaaaatgagtcagagctttatagagtagaaagaagcaatcaataaaatacattttaaaaagtgccaaggaaaaacagaagaagattaggtgattatggctcaaattaacaacattgtaattaatgtgcctggaccaaaacatattagcatttaagattagaaagttacagactgaaacaattaaaatgttgaagataatgagaaatctttcagttcttaaatgcatgacaggttaaaaatttataacttgtagtctaacattaaggagactaaaaatactaaaaaggagacttaaaaaagagactgaaaatagactgctgtctctttaaaagcagcttacttccattttgagtatataatatatgcccccatttaacataaattatataaaaactaaaaagtgctcatcctaaacaaattttgggtcatgattatctaaagcattgaaagtatataattttgtactttaaatttacaatttcatgagaatatattttaatatttagaatataaactataatttcataccaaacagatctagatggaagagtttatatttcgcttgagagaattgtgctaaagtaaaaaactaccactatttagaaatgttctattagtaggcaatctaacctgctaaaaaaatctatagttgcataggtaaagcattacctattatttataaaaattataaaagatgattaccaaccactaatgcaggctcttacagatgtttcagatgtattatagtacgttacattcccgaatacttttgcaaaccaaatcttccattctgttcctgtggatttattcaatgttttcactttctacacagcaaaacaacaccatctacaatatactagaaactccagtccctctccgcaagaatacactctgtacatacttgctagaacaagagtttggtctctaaagcattatgagaaatggaccaagcacaggatttgaagttagaagatattggtcatagcagcaccaattagctctataattaaaaatatgtttcttctgtaagacataactcataaggttgttgaggacaaagcacatttaacatataactgccatgcgctctgtaaaaggtgtttattattgctaccactccattgctaaagaatttatagtacttttaattttcttctttacttaaaaaaattatgtaataatttgaccatgttcatcaatctcttgtatgtatcttttatgatacaagatgatgtcttgtatgatatccatgcctttcaataaatatttgaatattcctactaattttcaggtcaaatcaataaatatttgaattcctactttgtaccataatgtggtcaatggagaaaagtttaaatgtgtgtcttagtgcatttgggctgctgtaacaaaacaccataaactggttggcttataaacaacagaaatttatttctcacagttgtggaggctggaagtccaagatcaaggcaccagtttatgtggtgtttgctgaggggcaactttctggttcatagatggcaccttctcattgggccctcacatggtggaaggggtgaagagtctcttttgggcttcttttaaagagaaaccaatcccattcaggaagttgaaggctaatcacctccccaaggccttacctcttaatagcattaccttgtggattaggctttcaacacataaactttgaggggaaacaaacattcagtccatagcaatgtggttctttccttggggagcagctcatattagttgataaatcaatatcccaatcaattgaatcaaagtttcaccaaaagttaaataacagtttaatatttaaataacaacttcagctacagctatagtctcctttccacactacgcattctctttctctgcttaatgaagtaatgaagtcatcttatttctcatagtttcccttacctattgaatctcaagtttgagagttaatctgcttgtcttttcctatatgttgttttcatgtattcatctccgtaccttcaaatatgacatattcatgccttttgtcagctttgtcatttatgaaagataacttatttcaaaattcagctcaccattagctgatgtatcatctgtgtgtagagttgttgctgttttggtgtgttttgttttgttcactggcattttcttttcctagctgagttgtaagttgtccaataaaataataaccagcacttagtaggtacttgaaaaattttcattaaataaatgaatgggaataaatattgcttaaataaatgaatgggaataaactaagccagttgcttaattttatgccataactaaacatttttattatcaatcttatgattttgttggaagaataaagacttattttggggcttcttacgcacttaataattataaattgttcttttgaggtcagagaaaaattcttttgactgaaatattgtattattctaggccataaaataatttttaaattataaatttaatacattgtcattataaaggtttgggaaataaagaagggaacaaggaagtaaaaatgaaaatcagctataattgtaccattcaaagaaacaataatattagacttatatcgtacatctaattttatgttctttttaaggtttactattttatcataagtgtttcccatgttattagtctcagaaagcatcgtttttgttgttgttttgtgttttttctttttttttttggagacagagtctcactccgtcgcccaggctggagtgcagtggcgcgatctcggctcactgcaaccaccgcctcccgggttcaagctattctcctgcctcagcctcctgagtagctgggattacaggcacacgccaccacgcccagctaatttttgtattttttagtagagacggggtttcaccacgttggtcatgctggtcttgtactactgacctcgtgatccacccacctcggcctcccaaagtgctgggattacaggcgtgagccaccgcgcccggcctgcaccgtttttaatgactacaaatctccttagtatgagggtctggaatttaactatttttctcttgctaaacttatagtgttattcctactactctcccacttttcgccattcttatgggtaatccagtaacattgttatgcaaaaatttctgccgatgtttctgtagaagagattcttcaagctattttgattcacaaggaattaacattttaacattattaaaaatcttttaatagaaactgccaagttgccttcaagcatggacaatttatattcctcctaacagaataataggaatacctatttcactccattctcacctgggttatattttagcaaaatacatccaatagaaggagttggacaatgtgactttggcaaaacaaaaaaactttagcattgcttctaaaagcttggaaacttttatgatgtttctcttaatattcaggttccaattccaataatgtcttttgtttctttgtctagattttctatgcagttcatgcttttcaagcacggagtgaccatgaactcagccttcaggaataccagagagttcatatactcaggttttgtgacctaagtggcaataaagagtggtggttagctgaagctcaagggcagaaaggatacgtgccagctaactaccttggaaagatgacttatgcttaagaaaataagccttcaacttttattttccagcaagttgttgattgactacctcataaaactgacattacaaaactttggaccagaaagcaagaaacctctgaactacagaaactgatactgtactgggttttcaggaatactgtacttcctaacaggattattgcatgaatgtattataaaggatacatgttgaaagaaatactaagccaacagaaatagcaaagcaaatgacccaagcttcaactatcaactatttaaaagtgaagatcttttgaaggagtaattatattcttttatcatcaagaaaggttggatccaaaggtttttcaatttacttttttttttactgtatgatgtattttgccttaaatgtttttgtttttcatattgctctcttgcaaatgcatacatgtttatatacatacatataaaccatatatattatgtagctttatacacgtatgtggataatatgaattatacacctatatgtataaatcagagtatacaccaaatatacataagaagaatataccaccaactagaagtctttgataatatattttgttaatgtttcgtttatatgttttgaactaaaactgaataacttgatattaacatgtaacattactgaatgcacactatatgccagacattgttctaagtgctttatatgtagtaacttgtttaatattcaaaacattatgaagaaaccatggcccaaaaaggtgaagtaatttaatccaaatcacattgctattaagtggtgggcctggacttaaacctaggtagtgtaaaccaaaaataaaattctaaggcttccaaccatctaaatagacttccccttcagccagggcttttttctttcttttcttgttgtttttttttttttttaaagagacaataaaaggaggtttttttattcaaaggtataactggataagtagatttgtttacaatcattcttgtgaaatacttttttaaaaaaatacgatcaacttctttgcaaatagtagacacatacctcaacaatgatgacctaatttttgatccataatgtaagattaggtagaaataggcaagctcacactgctaaattaactatcaaatactcagtcaaaactccatttgtggcccccacttcttgatctatttctgttccacttcgtcttctaccatcttgccgactttcctgagcaactgctttgtcgactctctctacctgaccaattgccagatcgacmacctgactggcctgaccagccactcctctgtctggaattaaaagatgtttccatcataatattctttaatttcaggtaatttagctggcactgagagtatccagccggaatcatgccactttgcctgtaacctttgactcaattggaggaatatcaaagcaaacacccatatttcctttcaggaggcacactctggtaatctgagacactgcattactattcagctttctaagttctttccaagcacagctgacatcctgtatttcctctaggctttccagagtcatggtcacaaaccccttatcagagttgattaaagatcatggttcaaagcttgatacaccagaaatgtgggctaaagctgcagccaatgcatctatcgcccctttctcttctatcagtatctgagctgatggttggaaaaaaatcaacagcagcataagaaatggaagccagagaccttatggcatccatgcttttaaatttaactaaatccattgtagaaggaacacctacacatttaaaagtaatttgtgttttttgttccacatgtcttagttgacctttctcttggttgataaaaacatatacaaacccctgtctgtccagctttacccacgcatccagagagatggatataggactcaatatcctgaggaggagaactttgaatcaccaggtcaactacaggaatgtccaaaccacgaggagccacattggttgccaccaaaactttataattacctctctgaagccttttagtgtaatttctctttgtgactgtgcaatgtccccatgtaaacacagtgcattctgttttgtgcggattcatggccatgtcagttacattcttcttcgtctcacagaaaataatagccctcccttcagatccactgtagacttgaaggacatctcattttcatctgtgttttataaaggaggaaattgaggacctcacatggagggactggaatttaaaaccaggtcttctgactttaaggcctttcttttagtgttttcccttttcttttccttaagtcactaaaatctgtagttatataatcttacataaagcatatgcaaaatagaaaaatgatagtcaccacatatctactaatgggattaaaatgtacaatcctaaaagcttacttgttagcacacttgcttatctgtccattcattcattgaaccagtaagtatttattgagagttagtgggaatacaatgctgtgcaagacaaacaagatccctccattcataccacttaaattctagtggggaaaacatctgcacataacaaactaaataaaatgatcataaaataataaatgctatttatataaaactggctactttcattactgctcagttaaagggtcttgtagctcattttatgacatgaaaaaaatcaaggtctaaaagctccttgagacaatttaaactctaataccaaatatacctctataaaataccaaactgagctaaatacggtatatgtgtacttatacatatgtacataacctaaatatacgtgtgcacacattatctatacaaagagccatactcagtgaaagataaattacctcctaaactaaagtcccctctgaggtacaacagaaattaaaataattgcttctcttctcaactctaygtagcacgtattttccatgatgggataaatgttttcatttcaagtgccaatgtgtgaactgtaataaacattactgctttcattttttgtaggtatggaggttacattaactgttatagttgcggagctgagtttttatgtcaggtaattttgtttagtccaaactggttttgaactataaacaattatggayatgtattttttggtttctttgaccccaaagggaaattggggtttatgtcaaattgatgttttatcaaaataaatctgtttckcaaagcaaaagtctctgtaggattgagataattcattatttacatatagggtaaacagacatttactgcctattgagatcataattgagataatggattatctcaatcctggattctaatttactacaaataatttagcaccattatttaacagagcagtttaaaataataatctttccttaaaaaaaaaaagaccaagcttaattttaaaagctttgtgtttacagagatcacctatcaatatactttagaataatgatgttagaaaaacctagggattaaggaagacagtttgagattagagatttgtagagtgaagatttagtagcacaaatcaagtttgatggaacaggctgttcatagtcttgtgaatgtgtgaatttgttggatatccagtttttttgctgtgaataataaactgtttctctgatgcagagggcttcctatcttctctcagaatatacatgtacaacaattgctggttaatttgttagcttgcaagtaagacaacaacgcagaccttccacattttctgacttaacccacttatgcctagtgttccattattgcaatgctcggcttatagagttatttatatcctactgttcaaggtcatcatcaggtctgatttttcaccaaaaaaatttgcaacctctggcataaatgggttaacaatgtacaaaacaatctcaagaattaatcattatataggagcttattgtatacaaagttagctaaaattaggtaaagtgctataacattttgagcactaagtaagatagccttttctttcatggtataggaagaagccatcagtgtgtgaacaagtcatatatttccatctgcaaagacctttgtgaaatggtatttttcttcaaaacttatcaggaatgtgcataaccaagatgaatcaaaattcaacatttattacgtactatgtgcatgtattacattggcaatgtaggaaaagtgagcaatgtgagaaaaaatattgtattaagcaccaggagagttcacaatttattggaaaaagatatacccttaaataattgaaatgaggtgataaaaaaggtaaagatataatatgaagtatgataaatcaattaggaaaatccattgatatgagaaatcaataatgaaaaaataattttgaaaaagatgaaataattgggagggagagggagagtcagttgaaatggggctagcacagaaaatgaacacccagaatacggggaggaaaatagaaaactatgttgggtcgtccctgccgccacataaggcacctcattcatcaggatcaactcttggggctttgctagaagatgaactatttctttttccttaaattcacagatgctttcaatcttctgaagatctcattgagaaccagtcattctaatcattgttttcacacactatggaaatcattagaataaaaatgttgaagattgatttaaaatgaaagtttccaagttttgttatataatayttagcattttaaggtaagaaacaatagaaatttgattatgaagacttttattaaattacagtgtattacagattatatcataataataagcctttcatctttaggctaatatgatacaaaaacctacttggccacattacttcttgagtttcttttgggcagctttcttcttgaccatctgyaatcgcttcatagcattgagctgtgattcttgtgaagttgggcctttaagggatgctgagggagagctgctggattctgaagtagttttgctggtagtacttccactaggtcctgatgttccactatttccattcccacttagttggctgctgcttcctggaactaaactacttggactaggaagacctactttgctgacattgtcacaactaactgagcgactaaggccagttttacccaaggttagaggtggrggtggttttaaaggtacagtgggcgtagtgctgttattggaacctattttggaacctattccacctttggatgatgttgccagaccagtcaaacccacaggtttctggttagctgacgaagyagcaggtttcccagtattgttttgtgttgttgaactcaattttgctgttgarggaccagcagaggaagttttggctgcaaaagctgcccatccagttaagccactagttactgacgaggaaacgctggcactagaagaatttcctgaaataactgtggatgtctaaaaaaataaagtaaataattacattagagccaagtttaatcagtacctgtataaacatcccaagttatgaattgggaaatttaaatcacaccaccaaattaggttcttatgaagctgatctgaaaaaccacacagaacaaaacttatctgtatctagtgggtattatcatttgcaaagcagaaaatttttgataccatattcttgttctaatgattccaaaagaaaatatatgaaattcctttttgggaattgcttttagattcaattctaagctatatctgaaaaccagatttagtgctttaacatastttttacccaacaaagtattatcgaccttagttaaacatctaattcttttagacttttctccaaataactagggatcatttcaaaaatttaattcactcttaatagcaaaaatgcccatacccagaatattcaggagaacatatccaagatgaagagattcagtcaatatttatttactgagtgactgtgtgagagaaagaagacagctgtatagattctaaacccattaaaaaaaaatgtcctcctaaattttgagcaacagttacaggagtacaaaatatatgcaaagttaattacttggaagtgtacaatttttatgatgtgttaaaaagttctcatgattttagtttcacaatttgcccatgattccggttaaactatcatgtaagagtctcctgctcctttaataaggattttatcaattgcctcattaggctgcacagtgacattttgggtaggactgatctcattctctgatatatttcataagggtataacacttcaacttctctgattaactttcctggctaatcagaagctcacaatggtaccaatgccactatataaatacatattgctcttgttcacacaagaatatattttttcactttcatattaggcacaaatgtacgtattcaaattaattttgaattgaacttcttattgacaccttttctacctttatactcttaagaagattcacaaaagcattacattcacatataggtaaaagataaaattttacaaaataacatcctacttaaaaaatggtagttattatacctaaaatatatccagttataatttagaactttactctgaaatagttgataaaacatttttagctcttgaaatcaaggtagccttcaatattgtctgcatgcatacatttttaatcaatgtgaaaagtaacaaaaatagagttctgagatattcgatttataagagaaggaatccagatatttgtccacatactctgaaaattgataggaagttttcttacagtaacatattaactatcttatgaagttatccagagaagaaaaactacataaaccatttattcctagaggaatatataccagcaatgagagaaaaagttagtcaagaagtaaacctttaattttcagttatgaaagacctawttttttttccttttcttgctattaaacataaaactgtctgccatatggttaaatgatctttcaaaaaacttcacaaaagaaaacccacctttagtaattaaaagaccaacacttaggaagtacaagcaagaaagcatgttctatgtgtctggcatttcattttaatggcttgctgttgcttagtattgcttttcaacaggatgacagatggtttataatactatcaggacacatagaagtaatataacacaaacaatggagaccaagtgatttcttactatttcagtgtagaaaacaaatttctcaagtttttaactataaatattttcttgcctatttgctagatgggcaagttagaaaagacatttgctttttatatgtgaatgggaacaatttttttatagtataaatttattcacttttataaaaagtgaattttttattaaagaaacacaaaacctcttaatcaaaacaaatatgacagcagtctttaatttgtttgccataaaatgatttcatgttgaattttctaaaaataaactttagtagtaacagattaatctaaaaatctactaaaaagtgattatatgcagaatatagcaactctaattactttcaataaactggttattcttacttctattccaattcaccaagttcctatatgacaaatcaataatggatatgccttggatagcaaatcttccctggcaaattaaaatgaaaaataatctccaaatataattatcaataagtttttaaaagtatttcgtattcatattctttttcatcacatcaagggtatgaagcttactacttacagtcacttagataaggcaataactttagagttttctcaggtcaatctttgagaatttgaggctattttttttttaatattttttcttccatatttagtgctatgcttaatattggaatgtgtacctcagtaaaagtattctttttgttatgaaattagattagaaaattatttttttccatgatataaaaaggccaagatattaagaaataatgtagtatgatttcaaggatgcaaacttaggaatgagaaaggtgataccctcactagacaatgtggtcccttggtataagaggtagataacattgaaagtttattataaagaaacaaaacaagacaaagcaagaaaactccttcaacagccaataagaagggagaaaaaaaaattacaaggccaatctgctcaagtagtgtggggagcaaaattgttgctactgagggcagaggtattttgaatttaaaccagatttctttttctttttttgagttgcagtttcgctcttgtcacccaggctggagtgcaatggtgctatctcagctcactgcaaacttcgcctctggggttcaagcgattctcctgcctcagcctcccaagtagctgatcacaggcaccgccactatgcctgggaattacaggtgcccatcaccacccctggctaatttttgtatttttagtagagatggggtttcatcatgttggccaggctggtctcaaactcctgacctcaggtaatccacccgccttggcctcccaaagtgctgggactataggtgtgagtcatggcacctcgcctgaatttaaaccagatttctgattgaagacaaatatctaaccagatgagaatggtaaagaatgtcattttggaatgatcatagactgttcgtatttgtgataaaaagaaaaacaacagagttagagattaattaatgatataaatgttccctttctacctaatataatagtagtaaagtcttaatttctaaaatatagccatttagtatataaagtttctcattaaatttttwatcaagcaactattttttagtcaactaaactttaagatataatcttagataaaaatagaatctactataccttgacttctgttctcttaaacgctagaaaagttgtctcttgtttcagtttagtttctggtttcttaaccaatggatctttgacagctggagttacagaaacaactgcaggggctggtttctgcggtggtttctgagttttttgagcctgcaaaaatcagtggattaaatcagatacaaaatcttaactgaatatacagaaagataatartccctcacaggactcatcactgaaatgaaatacagttgaacattttaaaaaatagtgtgatgataatgaatatatatgctctttgacaaattattatcatattaatggtcttacagattgtattagtttctaaacagtaaagataatattaagctttagaaataatacagaagagggttagttaaataccattttaacaagataaaattgttttttaaagagcaaaatcacaaactatatgtaaccgttagctttactcatgatgaagtacatttatttctcattggggtttgtcaaatacacaagagttttcttcttggggtctaggcataagtcgactcctcagttgctgagggcaaattaaaacacagctcagatcatttatatggttttaaatatagaacagggagaaaaaaactattgataaatgattaaactttttgaggtttttccacattgcaaaactaggcacactaaatctttagagaaagttaataaatacaaatttctatgttatgaaagaattttcacccactattattttataagcatcttcagttttattttgaccaataactgattttttcctttattttataactaggtacttgactaaattttcctataaactctaatcatttttgagtttattttttagtgttttctaggtagataattataactgtttataaatggttatgtgccatgtttaagagtaattttcagagtcaaacacagttaggattaaaacccagcaactggctgggtgcagtggctcacgcctgtaatcccagcactttgggaggctgaggcgggtggttcacttgaggtcaggagtttgcgaacagccagaacagcctggcccacatggtgaaaccccgtctctactaaaaatacagaaattagctgggcatggtggcgggtgcctgtaattccagctactcaggaggttgaggcaggagaattgcttgaacccattaggtggaggttgcagtgagccgagatcgcaccactgccctccagcctgggcaacaagagcaaaactccatctcaaaaaaacaacaacagaaaaaaaaacagcaactatttttctagatacattacctcaggcaaaatatgtgaatctctaaaagcctcattctcttcatctgtaaaatggtaatagcatttgtttcaaaggtgggttatgaggatgaattatgattatgtaagagtttagcatagtgtctggaaaatgttgagtgctaacaaaaagttactgtttattcatcattattatttacaaaggataatcaaactgaatccagaaaaatccatgcatactgaacggggaaagatgcttcccgccagccattccatagtctttgataatcttcataagcccatacagtactataccagggaatttattaacaatttgtcaccatttctggaagccagaatttggcctattttgctcttgtttgggccttcttgtgtaatcttgggctactgtttgccatactatatagtttgggtccttaaatctcaattcgtatcactttttatactacataccttccacatcaaagtacacctaccttcaacatcacttataaagcaacaattagatcaagaatattaagaatgttcgaagtaattcactgttgattacttgattactggtactagcaggaaagcagagccatcttatccttcattscaaaaccatgttacgagaatgcatccctcacagtaaaacagaaacatatggctccaaaaccatggctttcaatcttaacactgccttccacccacatctagcactcctgaggttagactctgaggacccacctaacttgtatgttttaacagataaagactaattatgatgaagccccaggaagtacttctgcctgtgagatcatgtttcaatcttctgccttccctgttttatccagccatcttagaaactgagtaagaaatacccacaaccctttgtcctttactggtaatactagtttagggaactaggatataattactgattcagttttgttcaacaaaggtactaaaattttcattggatgactgcttcaaacattgcaaaatgtataaaattctccactaaggcactaactgccagaatggcagtactaaaaaccccacctatttctaaatgctgcaaaataggagtgtgttactaccttagattgagaaccactgcaataagtgatatgagtctctcacctgaagctggggaaaaactccactactgcgtagagagaaaactatagaactgaagaataaccttggaccctgccatacacgatcacaacattcttaactaggtcttcctacaatgatgtgtaccgcagaacttgccccagtttgaggaatctgtttgaggagaaaggggatatcaggtcctatttataatatctttgagataccttggaacaataaccaatgcacatatgagaatctcactcaaagcaattatagttagaatgactgtatttagaatccccactgttccaaaattatctcattaaaccttacatttcctggattctgatctttaggctcacttcagatcatgtcttttggtatttccccacatttgctcttggtgtattctagtcatgttataatattagccatgactccccatttagtactttgacttctggacacacagaccagattcactgttgatttctggtactaatctgcatttagcctggcatggtggctcatgcctataatcccagcactttgggaggccgaggcaggaggatcacttgaggtcaggagttcgagaccagccctggcaatgtagcaagactccatctctacaaaaaataaaaaaaaaattagctaggcctggtggcacatgcctgtagtcccagctacttgggaggctgaggtgggaggattgcttgagcctgggaggtcaaggctgcagtgagccatggtcatgctactgcactccagcctagaaaacagagtgagaccctgtctcagaaaaagaaaaaaattacatttgcttcattttatttaacttaagaacaacagaatgtagaatgtgtccagtcttgagctctgcttaagtgctatgccaatgaatacatgctcttactgataaattagatattatttgcaaagcagataaaagaataaacagtatcccagatgaagagaagaagctgagaagcagaamatatgggaacatgaaagttctccacatattcagggaatgacacacttagtctgtgtcagagtggccagagtgtatgaatgtgtatgctgaagcagtgagagagagggctgtaaggtagagtcgggtcaaaaagagaaggtccatatatgcatcctaatgagtataatctcattatataagtaattgagagccactgggcatatataagtaggtaaatattttagaagaattctaatgatagtaagcaaagtggattgataggaggcaaggagatttattaagtggctattgcaatagacaagtaatggatttgtggaacagggtaataaaagagaaatgaatagatttcagagacatataagaggtagaattagcaaatctggtaaacaatgggatatggaattaaaagaggcatcaaagatgttttctaattcaggcaattgcagaaaaaaaaaactggataatagaacaactttcacttttaaatatattgaccttaaagtatctatagactatctagttagctatagaagctcacccaggaagagggttagaaccataaacatagatttgacataaatcagaaaaaatggaggagaaaaaacttgggggaagaacagtgcttactttagatattaaaggagctaaagtgataataataatgaaacagttgagtacatactaaagaaagatagattattgtcacaatttgtttcttttgacaatttccaattcttagtggtttcttatcaatgctctggaatgcattgctcatctgtaataatttcacttgagatcctggagggctagtttaaataataaattaaataaaaaccaaactgagcagaacagattgtaacttgtcatagaaatttcctgttacaagtaagaaatatacacactattgatatacacacttttcatttactactttttatttcataggaataaataaaaacacttcctatttctgatttaactgattaaaaagtaaaatgggtatcccgagtttttacttttaactaagtacttctgacctttaaaagatatattggttagacaaatttatatagaaattcatttgattaacagacatgagaactctgcaattgagaatcactaatttaaggcaggggaagagagatggaagtgggagggagaggtggagaataagacattatggcaatttcttgttttctttaaaagaaaaattatgaaattcatttatcatttatctattttataagtgaataaaagttagaaaactatccaatataacaaatgaaaagatatttcactatgatattaaaggcaggtatgttagtcaacagtaaaaagagaaagtacataggaagaatgaggtaatggtcacttgaggacaatgagaaggaaagactaagcaacagagaaatgcagctggaaagacagatatgcacatataaatatcgcctctgtacacatcttatccatgcggtggtttaagctcactcagaaattttctatatttccttaccagatctcaacaaagagtggggctttgtatctcaccacttctcagtgctgcatggtattttaaaatgtttgtcaatacattgacagactagtaaggaatattcataatttgtgtgtcaccaatcttgttttatctatattagaattagataaaactaaaaagagaaaaatgcacataacatggtctggtctttagcaatagaaatattaatcacatgtacatrctatacatataaataaataatcagcttatattatttattttttcaatatcttaaatattcaaatctttgttttgaaagcacataccaacaaaaacattgacagactgtttaaaataaagaaaaatatgattcctaccattcttttcatttgtctggtacatcgggcacaataccacaccaggcgagggtcattcgcttccttgtctgtcacctgsggtttatgacaatctcggtggtagagattatggcactcctgacattctactaattgattgccagatgccaccatcatttgcctaagaaaacataccattaaacattacactacttttttaaatgccataatttaaagttatttcaggggccaggtgtgctggctcatgcctgtaatcccagcactttgggaggccaaggcaggcggatcatttgaagtcaggagttcaagaccagcctggctgacacggtgaaaccctgtctctactaaaaatacaaaaatcagctgggcatggtggtacacacctataatccccactactcaggaggctgaggcaggagaatcgcttgaacccaggagatggacgctgcagtgagccaagatcatgccactgcactccagccttggtgacagagtaagactctgtctcaaaaaaaaaaaaaaaaaaaaaaagttatttccaggttgttctggtaaagtttggtatattaaaaagaaaaaaaatcccagaaacccaaagagcaaataacaaaccccaacacttggcatgcacaaaagcataagcttttaaagcttatggtcaaccattaataaatatatagaatgccttaattaaatttggctattttctcgtcatttctcgtcataatttttgcctttctctcagaaggtagtagactctgattagtcttccaacagcctcataacattttgtatctccattaaattcccttatattagttagctgtatgttgttgttgttcttcattaatatgagtcacctaaaggtgagtactggacctaattatccacagtccttagcacattactgtgcacacatagggtgctcaataaatgtctgatcagattaatagaatgaagccatgtgtgtataaaaaagtataaatttcaacagcacaaaaagcaatcaccatagccttagattatcaaaggcatatatatcataatataataatcactttccctctggaacccaaaaatgcagaaaatgttacaacataacagatttaaaagccatagttgggaaagacaaaatagttgacaattttcaatatgctaaattgttatatgggcagttacctacttatctccaccccagttccaaatagtaaaaacaaaatagaaaatgcacaacaatttttctgattttgggggttgaggagtggaaagggtcatgtgttctttataaagtaacaaaagaatctgtggcaaggtacaacttacctacaaacaacgcargccaatcccatctccatggcaaaatcatcagcactggtctcctcaaaactggaaaggtcagccataggtaaatccttgctactttggacagtaatgggagatgactgtgtttctggtttctccaatctaggtttctttggaatatcaactccttcagtgatgtctgatttcatctataaaaagcaggcatcagaaaatgataaagtaatgtggtagaataaactttaagtcactgaaagacgagtgagaaggacaattggcaatgaacaagtccattttacagatatattcacatagttagggacagatgtgcacattaaagatctgtagaagaattgcaatgaatttattagtatattaaatgaaaccagcaagatagaaataaataaatcagaacagtttaacaaatatttgtatttctctttgtactcttctatctactaaagaattatggaagatcgatggatttacttagactagtatctaccatacagacttaacacatatttgcttcaaagcaaattcggattcccttctttaagatataaatattatcaatatacccattagatttggcaaaaatcaaaaagtctgataagacatggaatttggaattcttatactttgttgatgacagtgtaaatttagtacatctacttttgatagaaatttggcaatgcctagtaatgttgaagatgtcatatcctattatattcacttataggtatacatcctatagaaactattaacatgacatatgtataaagtagctcactcaaactccattgtaatagaaacaaaggagaaatatctaattgtgcatcagtaggggaatgataaactggttaatcattcccctatgataaatcagtaggggaatgataaactggtattatgtagtagctaaaagaaatctagatctacatgcattaacaaagatacatttcaaaagcacatagttgagtggagaaaaagttaccaaaggatatacacacacacagtatgataacatttacataattttttttttaagacagagtcttgcagtgttgcccaggctggagtgcagtggcacaatctctgctcactgtaacctccgcctgctgggttagagtgattctcacgtctcagcctcctgaggtgctggaactacaggtgtgcgccaccacacctggctaatttttgtatttttagtagagagggggttttgccatgttggccagggtggccaactcccgacctgctgacctcaagtgatcctcctgccttgacctcccaaagtgctgggattacaggcatgagccaccacacccagcttcacttatgtagatctaaaaacagagaaataatctaatgtagtttatgaatagccactatttagcaaaagtatgaaaacatacgggataatatactccatcttgagggcaagggttactgaagatatctttcaaatgtatttttttctaactactaaaatcttaattactatatgtagaaatcatctaaaaatagacaatccaagaatcatctttggcactgttcaggtgcataccactctataaagtttatgtttagtcatttacatctatactctttcccatcttttctttcttgctttcctttttttttgagacagcgcctcactctgtcacccaggctggagtgcagtggcacgatcaccgctcactgcaatctctgcctcctgggctcaagcaatcctcccaccccccacccgcccacaaacagctgggactacaggtgcatgccaccacacccagatgatttttgtattttttgtagagatggggtttcatcatgttgcccaggctgatcttgaactcctgagctcaagcagtctacctgcctcggcctcccaaagtgtatctatcttttcttcttaacaactgttccatctaggatctctgaggcatagattaaagtttacactcaaagttactatactccctaggactcaaatatttattgacaataacttttaaccacttaactttaaaatytgtaaattttactcattttttgaaaagtcaaaatctatagctatcaatatatattcactgagtgttgattattatatacctatacccattattatataaaagaaataggcataaaacaytgtttctttctgcttatggaacaactaatttactttcttttaacaagattaaaataaaatcttactttatcagcaggtctcttttcagcttccttctttaccttttcagttgtgaggaccttgccattattattaccagaaggaagactggatgatattttgggctcttgcttaatggaaatgttttttgtgcttgaaattttgggtggctccacatcctaaaagatgaaaaaaggtaccagtaattaaatatttagactgatcatcataaaaaaagatcattaatataaacaattttcagttaaaaattaagacatttcattataaccaatgtaatattcctttcttaaatagttaaatagctttattgagaaataattgatatacaaactgtaccttttttatttttattttttgggacagagtctcactctgttgcccaggctggagtggagtgctgtggcacagtcttggctcactgcaacctctgcctcctgggttcaagtgattctcctgcctcagcctcccgtgtatctgggactacaggtgcaccaccacacccggctgatttttgtagtttcagtacagatggcgtttcaccatgttggccacactggtctcaaactccggcctcaaatgatccgcccacctcggcctcccaaagtgctgggattaaagacgtgtaccaccacacctggcccaaactacacctacttaaagtgtaacatttgataagttttgacatatgtatacgtctgtgacaccatcactacaatcaacataatgaacatatccatcatctctccaaatttccttgtggccctttgtaattactctcttacaggtatacaccctatagaaaaatatgtctcccatcatcaagcaagaaaaatatgtctcccatcatcaggcatatagaaaaatatgtctcccatcatcatcatcacttatctgttttctgtaacaatacattagtttgcatttcctagaaatttatataaatggaatcatattcttttttggtctggcttcttctactcagcatatttattttgagattcatccatgttgtttagtgtatcaatagttaattcctttttattgctgaataatattccattgaatgaatagactacaatttatttatcaatttacctattgatggatatttgggttgtctgcagtttgggactattacaaataaagctgttatgaatattcatgtacaagtatttatatatatatctatgtttttatttctctagaaaaaataggagtgggttatatggtaagtattaatatatgcttaattacttgagaaactgccaaactgtggcagtaccattttatatttccaccaagcatatatgagagagttccagttccttcccatcctcaccaatgctttgtatggctactctttttaaattgtagatgttctaataggtatgtagtgatatctcatttagatttaatttaaatttccccagtaactaatgatgttgagcagcttttcaagtgttcatatggcatacatatatcttctttggtaaactatttgataaaatattttgcccatttaaaagaaatgaatctgtttgttttattactaagttaaaagagttcttcatagattttgggcacaaggcctttatcagatatatgatttgcaaatattttctctcagtctgtggcttgtcttttcattctgtttaaattcaattccttattcatgtattatagctttgctgatatagataacttgttatttgttgtcattaatagtatgcataaactttggcagctcttggaattccccctcccccaaaaggagggcactttcccatcattctaaacaaaactaaggcagctgagtgcagtctattttactgtgataatatgtaaaagtacaaaagtataaatgggaataatacacaacaatttcagaatagtggttacctctgaggggggaagagaagaaaaaggaaggaggaatgggtcctcagatctagtggtggcagggcttgatatattattatgctgattgtttagacaacgggttagcaaactgaggcctataaatagttttttataaacagttatattagaacacagccacacccattcattttataatgtatggctgcgttcacattaccatggcagaattaaatagttgcaatggagaccatctggcacacaaaatctagaattcttactatttggctctttataaagtctgttgatcactggtgtagacttagtaaagtgttgaagaaaatgttaataatgcagattaaacttaaaaatgtgtggtgggcaggtgtggtgacacatgcctgtaatcccagcactttgggaagccaaggtgggcagatcacttgagtccaggagtttgagaccaacctgggcaacatggcaaaatgctgtctccacaaaatataaaaaaattagccaagcatggtggcatgcacctgtagtcttagctactcaagaggctgaagtgggaggattgcttgaacctgggagggagagagcgcagtgagccaagattgtgccactgcactccagcctgggtaacacagtgagaccctgtctcaacaaaaaacaacagaaaaacaaaaacgtgtattgtgtgtaactaaaaaattgaagacaaagtcatgcagtattaaactattacctaattcagcaaaaaagttgttctagttgttgacggatgagttaagttttaactccattatttcacatttgccttcctcattaatgtaaatgaatatcaaccaatattcatgttagaatacacttggagacctggtaatgttagtaagcattacctccaggtgattcttatccatgctaaagtttgagaaacactggcataaatcactcttcttacacaaatctagtgatgaaaatattcagctgaaggctaaaattaaatggacctgggctttaaaaacctataacaaagtagtttctgaaaactgatcaagagaaatgaactctagctagaaacctaagggcagcgtgctttttaatcacaacaaatttttcatgttctttaagagataaacttccattttagaaccccattaaaacaattttttttctttagtaataataggtttccctatctggacaataccaacacccacagtggaatgaatttggtagtatgttttgtagagccatattgatttggtcgatctgaactcactgaacctactgcaatgagaatggatagaagaaatgaagtcacaatggttctgctattcaaaatacaataaaaaggcttcggagtactagacctagtattgaaagaaggctggggacaaaatgccagtgtttacttgggctctgagcctgggactagatcctctcttgagcttcagattctggttagacttgagctagtcatgttctattttctccttctcagtttgggatctaagtccacagacctgagtgatttggagtttgagggtcagagcttagaaggatttgatagaatgtcttagtaggtattagggaatataataagagttgtcattcagtgacagcctattatgtaccaggcaggtactacactaggtaactcatttactggatctccttcaatttttacaactctgcaaagtagttcttattatccccattttaccaataaacagactaagtgaaatgaagtttctatgtacctcagtttccttatgtaaaatgaagaaaacagttatctatcttaaaggatcattatcataattaaaattaattattcacataaactactcagaaaagtgcctgggacatcaagatacgttgtctattatcatcacacaattataagatttaagtgggatttaaaacaggtgtgtttggtatcaaaacatatattcttttcacataaagctgccattggctgctttgttattatcaagacaggagctacacagttctcagagttcatccatacctccttttctcttaaattatcctacccatattcaatttattttgttgaaagatctgtccttttacttgattttttttaatccttaaaatattaggcaataattagaagtaagttgtggttacattcagcagcttaaaaaaaattctgatcacaaagaatcggaaattaaagtaagtcgtaaacaagtgaattcatatacacataaagtagtagaacagaatatcctgcacccccagctgatttttctatgtggtgtaacagttctctgaaaacttgaagggaaaaaagaaaataaagaatataatttcttcatgctacaaggaaagattatttcggcagagattgttttgagatggtctatatgttatcaatgtagtactacaggccttacaaaactctctccaagctttttattcattcaagtaccttttgagatggacggtaactggaatcaatgccccgagccaaagattcatcaagcagtgcttttagcttttcagcagaatctttactctttgaatgcaagaaacctagtgctttcaaaaaaatgggatcaagttccaagttcacagtagcagccattgcaaacgcctgaaggaaaaaaagagaaagtaatctagaagacaatgcacaattatctatgttaaagttttacttttctgttttttaatttgtaatagataatactgtacacatgatataaaatttaaaatcaccaaaaagttattacaaataaaagtaaatttccttcttattcctgacaggcattatctagttccttccccctgaaacaactagcagtatcagttttctgtgtatccatatcgatggtaacgttttaaatccaggtaggcctctccctgccacagaactccttcctaactgtgttttaaaagatacacttcgcagtttcagtacatagaacttgatgggtttacgtcaagtttactctgtatcaaaatttcttctctcaaaccttatttccataacacaagggaagacttagtgtgcaggtgtttgtgtgtgtaagggctatcgtaagagggcaatggtgaaaaggtatattaagtgattagctatcatggtcactgctgccacttttacctcaactctttttttttttttttctaaactcacctcttcagttctctgccccaaccctaaatgtctcagaaaacatattaatgataaccttatttgatcacatttagattgtggtatctcatgcattaacctatttttaaaagtaaggtctctgagggataatatcatatctacttaaaacacacacacacacacacacacacacacacacacacacagagcctatgatgctttgtgtcctaaagagcttaaaaaatagccaagatggataaagatatacatcaaaggcttatgaaattccacaatactaaaaagttttgtttttagttaataccaatgctatcatgtggttctgcttctggttgtcactttttcaaagacctctccaggcaagaaattatcaaaataaaaatgtattctttgtgttcaatcctttgatcaatatactatggcttgaaatcttctatccttgaggttaatattgtattaatgcagcacacttgcattgctatagttagggaactgtcagcaattccacagttatctcccattttcaggggtttataacaccattaaaacttgctgtaggttgaatcctagcatatgaaagcacatctgaaaatggattttgttgtcccctcccctccagcttcactcctcatccttctccacatctgacaagaaacacacatacacatccctaggcttttttttttttttttttaagttcccaggaaggtattagttatctacctgataactacaaaattactgtcgaattctgtactgtactaaaatatcatctgaatcacccatggaaaggaatccaaaggccagtactataatgaaaaagtaaccttatctcaaactgttgtatttctaagaatttaacaaaattgaaaagcagcctctgtcacttcttaaaattatattattatatacatcacctctacataatgataggtacagaaaaattattttaaaatttactcatggggctggtcaccatgtacgttctgaggaaaaaatagctccttaataaaatttccaagattaaaagggtaaacctgccattcccccagcatatacaagggtaacagcctaatctcttttttttctttaaattccactcctgtgacagtttactaatctt

SEQ ID NO: 97302 - DNA, 38664 bp, Homo sapiens
ttgtccaataaaataataaccagcacttagtaggtacttgaaaaattttcattaaataaatgaatgggaataaatattgcttaaataaatgaatgggaataaactaagccagttgcttaattttatgccataactaaacatttttattatcaatcttatgattttgttggaagaataaagacttattttggggcttcttacgcacttaataattataaattgttcttttgaggtcagagaaaaattcttttgactgaaatattgtattattctaggccataaaataatttttaaattataaatttaatacattgtcattataaaggtttgggaaataaagaagggaacaaggaagtaaaaatgaaaatcagctataattgtaccattcaaagaaacaataatattagacttatatcgtacatctaattttatgttctttttaaggtttactattttatcataagtgtttcccatgttattagtctcagaaagcatcgtttttgttgttgttttgtgttttttctttttttttttggagacagagtctcactccgtcgcccaggctggagtgcagtggcgcgatctcggctcactgcaaccaccgcctcccgggttcaagctattctcctgcctcagcctcctgagtagctgggattacaggcacacgccaccacgcccagctaatttttgtattttttagtagagacggggtttcaccacgttggtcatgctggtcttgtactactgacctcgtgatccacccacctcggcctcccaaagtgctgggattacaggcgtgagccaccgcgcccggcctgcaccgtttttaatgactacaaatctccttagtatgagggtctggaatttaactatttttctcttgctaaacttatagtgttattcctactactctcccacttttcgccattcttatgggtaatccagtaacattgttatgcaaaaatttctgccgatgtttctgtagaagagattcttcaagctattttgattcacaaggaattaacattttaacattattaaaaatcttttaatagaaactgccaagttgccttcaagcatggacaatttatattcctcctaacagaataataggaatacctatttcactccattctcacctgggttatattttagcaaaatacatccaatagaaggagttggacaatgtgactttggcaaaacaaaaaaactttagcattgcttctaaaagcttggaaacttttatgatgtttctcttaatattcaggttccaattccaataatgtcttttgtttctttgtctagattttctatgcagttcatgcttttcaagcacggagtgaccatgaactcagccttcaggaataccagagagttcatatactcaggttttgtgacctaagtggcaataaagagtggtggttagctgaagctcaagggcagaaaggatacgtgccagctaactaccttggaaagatgacttatgcttaagaaaataagccttcaacttttattttccagcaagttgttgattgactacctcataaaactgacattacaaaactttggaccagaaagcaagaaacctctgaactacagaaactgatactgtactgggttttcaggaatactgtacttcctaacaggattattgcatgaatgtattataaaggatacatgttgaaagaaatactaagccaacagaaatagcaaagcaaatgacccaagcttcaactatcaactatttaaaagtgaagatcttttgaaggagtaattatattcttttatcatcaagaaaggttggatccaaaggtttttcaatttacttttttttttactgtatgatgtattttgccttaaatgtttttgtttttcatattgctctcttgcaaatgcatacatgtttatatacatacatataaaccatatatattatgtagctttatacacgtatgtggataatatgaattatacacctatatgtataaatcagagtatacaccaaatatacataagaagaatataccaccaactagaagtctttgataatatattttgttaatgtttcgtttatatgttttgaactaaaactgaataacttgatattaacatgtaacattactgaatgcacactatatgccagacattgttctaagtgctttatatgtagtaacttgtttaatattcaaaacattatgaagaaaccatggcccaaaaaggtgaagtaatttaatccaaatcacattgctattaagtggtgggcctggacttaaacctaggtagtgtaaaccaaaaataaaattctaaggcttccaaccatctaaatagacttccccttcagccagggcttttttctttcttttcttgttgtttttttttttttttaaagagacaataaaaggaggtttttttattcaaaggtataactggataagtagatttgtttacaatcattcttgtgaaatacttttttaaaaaaatacgatcaacttctttgcaaatagtagacacatacctcaacaatgatgacctaatttttgatccataatgtaagattaggtagaaataggcaagctcacactgctaaattaactatcaaatactcagtcaaaactccatttgtggcccccacttcttgatctatttctgttccacttcgtcttctaccatcttgccgactttcctgagcaactgctttgtcgactctctctacctgaccaattgccagatcgacaacctgactggcctgaccagccactcctctgtctggaattaaaagatgtttccatcataatattctttaatttcaggtaatttagctggcactgagagtatccagccggaatcatgccactttgcctgtaacctttgactcaattggaggaatatcaaagcaaacacccatatttcctttcaggaggcacactctggtaatctgagacactgcattactattcagctttctaagttctttccaagcacagctgacatcctgtatttcctctaggctttccagagtcatggtcacaaaccccttatcagagttgattaaagatcatggttcaaagcttgatacaccagaaatgtgggctaaagctgcagccaatgcatctatcgcccctttctcttctatcagtatctgagctgatggttggaaaaaaatcaacagcagcataagaaatggaagccagagaccttatggcatccatgcttttaaatttaactaaatccattgtagaaggaacacctacacatttaaaagtaatttgtgttttttgttccacatgtcttagttgacctttctcttggttgataaaaacatatacaaacccctgtctgtccagctttacccacgcatccagagagatggatataggactcaatatcctgaggaggagaactttgaatcaccaggtcaactacaggaatgtccaaaccacgaggagccacattggttgccaccaaaactttataattacctctctgaagccttttagtgtaatttctctttgtgactgtgcaatgtccccatgtaaacacagtgcattctgttttgtgcggattcatggccatgtcagttacattcttcttcgtctcacagaaaataatagccctcccttcagatccactgtagacttgaaggacatctcattttcatctgtgttttataaaggaggaaattgaggacctcacatggagggactggaatttaaaaccaggtcttctgactttaaggcctttcttttagtgttttcccttttcttttccttaagtcactaaaatctgtagttatataatcttacataaagcatatgcaaaatagaaaaatgatagtcaccacatatctactaatgggattaaaatgtacaatcctaaaagcttacttgttagcacacttgcttatctgtccattcattcattgaaccagtaagtatttattgagagttagtgggaatacaatgctgtgcaagacaaacaagatccctccattcataccacttaaattctagtggggaaaacatctgcacataacaaactaaataaaatgatcataaaataataaatgctatttatataaaactggctactttcattactgctcagttaaagggtcttgtagctcattttatgacatgaaaaaaatcaaggtctaaaagctccttgagacaatttaaactctaataccaaatatacctctataaaataccaaactgagctaaatacggtatatgtgtacttatacatatgtacataacctaaatatacgtgtgcacacattatctatacaaagagccatactcagtgaaagataaattacctcctaaactaaagtcccctctgaggtacaacagaaattaaaataattgcttctcttctcaactctatgtagcacgtattttccatgatgggataaatgttttcatttcaagtgccaatgtgtgaactgtaataaacattactgctttcattttttgtaggtatggaggttacattaactgttatagttgcggagctgagtttttatgtcaggtaattttgtttagtccaaactggttttgaactataaacaattatggatatgtattttttggtttctttgaccccaaagggaaattggggtttatgtcaaattgatgttttatcaaaataaatctgtttctcaaagcaaaagtctctgtaggattgagataattcattatttacatatagggtaaacagacatttactgcctattgagatcataattgagataatggattatctcaatcctggattctaatttactacaaataatttagcaccattatttaacagagcagtttaaaataataatctttccttaaaaaaaaaaagaccaagcttaattttaaaagctttgtgtttacagagatcacctatcaatatactttagaataatgatgttagaaaaacctagggattaaggaagacagtttgagattagagatttgtagagtgaagatttagtagcacaaatcaagtttgatggaacaggctgttcatagtcttgtgaatgtgtgaatttgttggatatccagtttttttgctgtgaataataaactgtttctctgatgcagagggcttcctatcttctctcagaatatacatgtacaacaattgctggttaatttgttagcttgcaagtaagacaacaacgcagaccttccacattttctgacttaacccacttatgcctagtgttccattattgcaatgctcggcttatagagttatttatatcctactgttcaaggtcatcatcaggtctgatttttcaccaaaaaaatttgcaacctctggcataaatgggttaacaatgtacaaaacaatctcaagaattaatcattatataggagcttattgtatacaaagttagctaaaattaggtaaagtgctataacattttgagcactaagtaagatagccttttctttcatggtataggaagaagccatcagtgtgtgaacaagtcatatatttccatctgcaaagacctttgtgaaatggtatttttcttcaaaacttatcaggaatgtgcataaccaagatgaatcaaaattcaacatttattacgtactatgtgcatgtattacattggcaatgtaggaaaagtgagcaatgtgagaaaaaatattgtattaagcaccaggagagttcacaatttattggaaaaagatatacccttaaataattgaaatgaggtgataaaaaaggtaaagatataatatgaagtatgataaatcaattaggaaaatccattgatatgagaaatcaataatgaaaaaataattttgaaaaagatgaaataattgggagggagagggagagtcagttgaaatggggctagcacagaaaatgaacacccagaatacggggaggaaaatagaaaactatgttgggtcgtccctgccgccacataaggcacctcattcatcaggatcaactcttggggctttgctagaagatgaactatttctttttccttaaattcacagatgctttcaatcttctgaagatctcattgagaaccagtcattctaatcattgttttcacacactatggaaatcattagaataaaaatgttgaagattgatttaaaatgaaagtttccaagttttgttatataatayttagcattttaaggtaagaaacaatagaaatttgattatgaagacttttattaaattacagtgtattacagattatatcataataataagcctttcatctttaggctaatatgatacaaaaacctacttggccacattacttcttgagtttcttttgggcagctttcttcttgaccatctgyaatcgcttcatagcattgagctgtgattcttgtgaagttgggcctttaagggatgctgagggagagctgctggattctgaagtagttttgctggtagtacttccactaggtcctgatgttccactatttccattcccacttagttggctgctgcttcctggaactaaactacttggactaggaagacctactttgctgacattgtcacaactaactgagcgactaaggccagttttacccaaggttagaggtggrggtggttttaaaggtacagtgggcgtagtgctgttattggaacctattttggaacctattccacctttggatgatgttgccagaccagtcaaacccacaggtttctggttagctgacgaagyagcaggtttcccagtattgttttgtgttgttgaactcaattttgctgttgarggaccagcagaggaagttttggctgcaaaagctgcccatccagttaagccactagttactgacgaggaaacgctggcactagaagaatttcctgaaataactgtggatgtctaaaaaaataaagtaaataattacattagagccaagtttaatcagtacctgtataaacatcccaagttatgaattgggaaatttaaatcacaccaccaaattaggttcttatgaagctgatctgaaaaaccacacagaacaaaacttatctgtatctagtgggtattatcatttgcaaagcagaaaatttttgataccatattcttgttctaatgattccaaaagaaaatatatgaaattcctttttgggaattgcttttagattcaattctaagctatatctgaaaaccagatttagtgctttaacatastttttacccaacaaagtattatcgaccttagttaaacatctaattcttttagacttttctccaaataactagggatcatttcaaaaatttaattcactcttaatagcaaaaatgcccatacccagaatattcaggagaacatatccaagatgaagagattcagtcaatatttatttactgagtgactgtgtgagagaaagaagacagctgtatagattctaaacccattaaaaaaaaatgtcctcctaaattttgagcaacagttacaggagtacaaaatatatgcaaagttaattacttggaagtgtacaatttttatgatgtgttaaaaagttctcatgattttagtttcacaatttgcccatgattccggttaaactatcatgtaagagtctcctgctcctttaataaggattttatcaattgcctcattaggctgcacagtgacattttgggtaggactgatctcattctctgatatatttcataagggtataacacttcaacttctctgattaactttcctggctaatcagaagctcacaatggtaccaatgccactatataaatacatattgctcttgttcacacaagaatatattttttcactttcatattaggcacaaatgtacgtattcaaattaattttgaattgaacttcttattgacaccttttctacctttatactcttaagaagattcacaaaagcattacattcacatataggtaaaagataaaattttacaaaataacatcctacttaaaaaatggtagttattatacctaaaatatatccagttataatttagaactttactctgaaatagttgataaaacatttttagctcttgaaatcaaggtagccttcaatattgtctgcatgcatacatttttaatcaatgtgaaaagtaacaaaaatagagttctgagatattcgatttataagagaaggaatccagatatttgtccacatactctgaaaattgataggaagttttcttacagtaacatattaactatcttatgaagttatccagagaagaaaaactacataaaccatttattcctagaggaatatataccagcaatgagagaaaaagttagtcaagaagtaaacctttaattttcagttatgaaagacctawttttttttccttttcttgctattaaacataaaactgtctgccatatggttaaatgatctttcaaaaaacttcacaaaagaaaacccacctttagtaattaaaagaccaacacttaggaagtacaagcaagaaagcatgttctatgtgtctggcatttcattttaatggcttgctgttgcttagtattgcttttcaacaggatgacagatggtttataatactatcaggacacatagaagtaatataacacaaacaatggagaccaagtgatttcttactatttcagtgtagaaaacaaatttctcaagtttttaactataaatattttcttgcctatttgctagatgggcaagttagaaaagacatttgctttttatatgtgaatgggaacaatttttttatagtataaatttattcacttttataaaaagtgaattttttattaaagaaacacaaaacctcttaatcaaaacaaatatgacagcagtctttaatttgtttgccataaaatgatttcatgttgaattttctaaaaataaactttagtagtaacagattaatctaaaaatctactaaaaagtgattatatgcagaatatagcaactctaattactttcaataaactggttattcttacttctattccaattcaccaagttcctatatgacaaatcaataatggatatgccttggatagcaaatcttccctggcaaattaaaatgaaaaataatctccaaatataattatcaataagtttttaaaagtatttcgtattcatattctttttcatcacatcaagggtatgaagcttactacttacagtcacttagataaggcaataactttagagttttctcaggtcaatctttgagaatttgaggctattttttttttaatattttttcttccatatttagtgctatgcttaatattggaatgtgtacctcagtaaaagtattctttttgttatgaaattagattagaaaattatttttttccatgatataaaaaggccaagatattaagaaataatgtagtatgatttcaaggatgcaaacttaggaatgagaaaggtgataccctcactagacaatgtggtcccttggtataagaggtagataacattgaaagtttattataaagaaacaaaacaagacaaagcaagaaaactccttcaacagccaataagaagggagaaaaaaaaattacaaggccaatctgctcaagtagtgtggggagcaaaattgttgctactgagggcagaggtattttgaatttaaaccagatttctttttctttttttgagttgcagtttcgctcttgtcacccaggctggagtgcaatggtgctatctcagctcactgcaaacttcgcctctggggttcaagcgattctcctgcctcagcctcccaagtagctgatcacaggcaccgccactatgcctgggaattacaggtgcccatcaccacccctggctaatttttgtatttttagtagagatggggtttcatcatgttggccaggctggtctcaaactcctgacctcaggtaatccacccgccttggcctcccaaagtgctgggactataggtgtgagtcatggcacctcgcctgaatttaaaccagatttctgattgaagacaaatatctaaccagatgagaatggtaaagaatgtcattttggaatgatcatagactgttcgtatttgtgataaaaagaaaaacaacagagttagagattaattaatgatataaatgttccctttctacctaatataatagtagtaaagtcttaatttctaaaatatagccatttagtatataaagtttctcattaaatttttwatcaagcaactattttttagtcaactaaactttaagatataatcttagataaaaatagaatctactataccttgacttctgttctcttaaacgctagaaaagttgtctcttgtttcagtttagtttctggtttcttaaccaatggatctttgacagctggagttacagaaacaactgcaggggctggtttctgcggtggtttctgagttttttgagcctgcaaaaatcagtggattaaatcagatacaaaatcttaactgaatatacagaaagataatartccctcacaggactcatcactgaaatgaaatacagttgaacattttaaaaaatagtgtgatgataatgaatatatatgctctttgacaaattattatcatattaatggtcttacagattgtattagtttctaaacagtaaagataatattaagctttagaaataatacagaagagggttagttaaataccattttaacaagataaaattgttttttaaagagcaaaatcacaaactatatgtaaccgttagctttactcatgatgaagtacatttatttctcattggggtttgtcaaatacacaagagttttcttcttggggtctaggcataagtcgactcctcagttgctgagggcaaattaaaacacagctcagatcatttatatggttttaaatatagaacagggagaaaaaaactattgataaatgattaaactttttgaggtttttccacattgcaaaactaggcacactaaatctttagagaaagttaataaatacaaatttctatgttatgaaagaattttcacccactattattttataagcatcttcagttttattttgaccaataactgattttttcctttattttataactaggtacttgactaaattttcctataaactctaatcatttttgagtttattttttagtgttttctaggtagataattataactgtttataaatggttatgtgccatgtttaagagtaattttcagagtcaaacacagttaggattaaaacccagcaactggctgggtgcagtggctcacgcctgtaatcccagcactttgggaggctgaggcgggtggttcacttgaggtcaggagtttgcgaacagccagaacagcctggcccacatggtgaaaccccgtctctactaaaaatacagaaattagctgggcatggtggcgggtgcctgtaattccagctactcaggaggttgaggcaggagaattgcttgaacccattaggtggaggttgcagtgagccgagatcgcaccactgccctccagcctgggcaacaagagcaaaactccatctcaaaaaaacaacaacagaaaaaaaaacagcaactatttttctagatacattacctcaggcaaaatatgtgaatctctaaaagcctcattctcttcatctgtaaaatggtaatagcatttgtttcaaaggtgggttatgaggatgaattatgattatgtaagagtttagcatagtgtctggaaaatgttgagtgctaacaaaaagttactgtttattcatcattattatttacaaaggataatcaaactgaatccagaaaaatccatgcatactgaacggggaaagatgcttcccgccagccattccatagtctttgataatcttcataagcccatacagtactataccagggaatttattaacaatttgtcaccatttctggaagccagaatttggcctattttgctcttgtttgggccttcttgtgtaatcttgggctactgtttgccatactatatagtttgggtccttaaatctcaattcgtatcactttttatactacataccttccacatcaaagtacacctaccttcaacatcacttataaagcaacaattagatcaagaatattaagaatgttcgaagtaattcactgttgattacttgattactggtactagcaggaaagcagagccatcttatccttcattscaaaaccatgttacgagaatgcatccctcacagtaaaacagaaacatatggctccaaaaccatggctttcaatcttaacactgccttccacccacatctagcactcctgaggttagactctgaggacccacctaacttgtatgttttaacagataaagactaattatgatgaagccccaggaagtacttctgcctgtgagatcatgtttcaatcttctgccttccctgttttatccagccatcttagaaactgagtaagaaatacccacaaccctttgtcctttactggtaatactagtttagggaactaggatataattactgattcagttttgttcaacaaaggtactaaaattttcattggatgactgcttcaaacattgcaaaatgtataaaattctccactaaggcactaactgccagaatggcagtactaaaaaccccacctatttctaaatgctgcaaaataggagtgtgttactaccttagattgagaaccactgcaataagtgatatgagtctctcacctgaagctggggaaaaactccactactgcgtagagagaaaactatagaactgaagaataaccttggaccctgccatacacgatcacaacattcttaactaggtcttcctacaatgatgtgtaccgcagaacttgccccagtttgaggaatctgtttgaggagaaaggggatatcaggtcctatttataatatctttgagataccttggaacaataaccaatgcacatatgagaatctcactcaaagcaattatagttagaatgactgtatttagaatccccactgttccaaaattatctcattaaaccttacatttcctggattctgatctttaggctcacttcagatcatgtcttttggtatttccccacatttgctcttggtgtattctagtcatgttataatattagccatgactccccatttagtactttgacttctggacacacagaccagattcactgttgatttctggtactaatctgcatttagcctggcatggtggctcatgcctataatcccagcactttgggaggccgaggcaggaggatcacttgaggtcaggagttcgagaccagccctggcaatgtagcaagactccatctctacaaaaaataaaaaaaaaattagctaggcctggtggcacatgcctgtagtcccagctacttgggaggctgaggtgggaggattgcttgagcctgggaggtcaaggctgcagtgagccatggtcatgctactgcactccagcctagaaaacagagtgagaccctgtctcagaaaaagaaaaaaattacatttgcttcattttatttaacttaagaacaacagaatgtagaatgtgtccagtcttgagctctgcttaagtgctatgccaatgaatacatgctcttactgataaattagatattatttgcaaagcagataaaagaataaacagtatcccagatgaagagaagaagctgagaagcagaamatatgggaacatgaaagttctccacatattcagggaatgacacacttagtctgtgtcagagtggccagagtgtatgaatgtgtatgctgaagcagtgagagagagggctgtaaggtagagtcgggtcaaaaagagaaggtccatatatgcatcctaatgagtataatctcattatataagtaattgagagccactgggcatatataagtaggtaaatattttagaagaattctaatgatagtaagcaaagtggattgataggaggcaaggagatttattaagtggctattgcaatagacaagtaatggatttgtggaacagggtaataaaagagaaatgaatagatttcagagacatataagaggtagaattagcaaatctggtaaacaatgggatatggaattaaaagaggcatcaaagatgttttctaattcaggcaattgcagaaaaaaaaaactggataatagaacaactttcacttttaaatatattgaccttaaagtatctatagactatctagttagctatagaagctcacccaggaagagggttagaaccataaacatagatttgacataaatcagaaaaaatggaggagaaaaaacttgggggaagaacagtgcttactttagatattaaaggagctaaagtgataataataatgaaacagttgagtacatactaaagaaagatagattattgtcacaatttgtttcttttgacaatttccaattcttagtggtttcttatcaatgctctggaatgcattgctcatctgtaataatttcacttgagatcctggagggctagtttaaataataaattaaataaaaaccaaactgagcagaacagattgtaacttgtcatagaaatttcctgttacaagtaagaaatatacacactattgatatacacacttttcatttactactttttatttcataggaataaataaaaacacttcctatttctgatttaactgattaaaaagtaaaatgggtatcccgagtttttacttttaactaagtacttctgacctttaaaagatatattggttagacaaatttatatagaaattcatttgattaacagacatgagaactctgcaattgagaatcactaatttaaggcaggggaagagagatggaagtgggagggagaggtggagaataagacattatggcaatttcttgttttctttaaaagaaaaattatgaaattcatttatcatttatctattttataagtgaataaaagttagaaaactatccaatataacaaatgaaaagatatttcactatgatattaaaggcaggtatgttagtcaacagtaaaaagagaaagtacataggaagaatgaggtaatggtcacttgaggacaatgagaaggaaagactaagcaacagagaaatgcagctggaaagacagatatgcacatataaatatcgcctctgtacacatcttatccatgcggtggtttaagctcactcagaaattttctatatttccttaccagatctcaacaaagagtggggctttgtatctcaccacttctcagtgctgcatggtattttaaaatgtttgtcaatacattgacagactagtaaggaatattcataatttgtgtgtcaccaatcttgttttatctatattagaattagataaaactaaaaagagaaaaatgcacataacatggtctggtctttagcaatagaaatattaatcacatgtacatrctatacatataaataaataatcagcttatattatttattttttcaatatcttaaatattcaaatctttgttttgaaagcacataccaacaaaaacattgacagactgtttaaaataaagaaaaatatgattcctaccattcttttcatttgtctggtacatcgggcacaataccacaccaggcgagggtcattcgcttccttgtctgtcacctgsggtttatgacaatctcggtggtagagattatggcactcctgacattctactaattgattgccagatgccaccatcatttgcctaagaaaacataccattaaacattacactacttttttaaatgccataatttaaagttatttcaggggccaggtgtgctggctcatgcctgtaatcccagcactttgggaggccaaggcaggcggatcatttgaagtcaggagttcaagaccagcctggctgacacggtgaaaccctgtctctactaaaaatacaaaaatcagctgggcatggtggtacacacctataatccccactactcaggaggctgaggcaggagaatcgcttgaacccaggagatggacgctgcagtgagccaagatcatgccactgcactccagccttggtgacagagtaagactctgtctcaaaaaaaaaaaaaaaaaaaaaaagttatttccaggttgttctggtaaagtttggtatattaaaaagaaaaaaaatcccagaaacccaaagagcaaataacaaaccccaacacttggcatgcacaaaagcataagcttttaaagcttatggtcaaccattaataaatatatagaatgccttaattaaatttggctattttctcgtcatttctcgtcataatttttgcctttctctcagaaggtagtagactctgattagtcttccaacagcctcataacattttgtatctccattaaattcccttatattagttagctgtatgttgttgttgttcttcattaatatgagtcacctaaaggtgagtactggacctaattatccacagtccttagcacattactgtgcacacatagggtgctcaataaatgtctgatcagattaatagaatgaagccatgtgtgtataaaaaagtataaatttcaacagcacaaaaagcaatcaccatagccttagattatcaaaggcatatatatcataatataataatcactttccctctggaacccaaaaatgcagaaaatgttacaacataacagatttaaaagccatagttgggaaagacaaaatagttgacaattttcaatatgctaaattgttatatgggcagttacctacttatctccaccccagttccaaatagtaaaaacaaaatagaaaatgcacaacaatttttctgattttgggggttgaggagtggaaagggtcatgtgttctttataaagtaacaaaagaatctgtggcaaggtacaacttacctacaaacaacgcargccaatcccatctccatggcaaaatcatcagcactggtctcctcaaaactggaaaggtcagccataggtaaatccttgctactttggacagtaatgggagatgactgtgtttctggtttctccaatctaggtttctttggaatatcaactccttcagtgatgtctgatttcatctataaaaagcaggcatcagaaaatgataaagtaatgtggtagaataaactttaagtcactgaaagacgagtgagaaggacaattggcaatgaacaagtccattttacagatatattcacatagttagggacagatgtgcacattaaagatctgtagaagaattgcaatgaatttattagtatattaaatgaaaccagcaagatagaaataaataaatcagaacagtttaacaaatatttgtatttctctttgtactcttctatctactaaagaattatggaagatcgatggatttacttagactagtatctaccatacagacttaacacatatttgcttcaaagcaaattcggattcccttctttaagatataaatattatcaatatacccattagatttggcaaaaatcaaaaagtctgataagacatggaatttggaattcttatactttgttgatgacagtgtaaatttagtacatctacttttgatagaaatttggcaatgcctagtaatgttgaagatgtcatatcctattatattcacttataggtatacatcctatagaaactattaacatgacatatgtataaagtagctcactcaaactccattgtaatagaaacaaaggagaaatatctaattgtgcatcagtaggggaatgataaactggttaatcattcccctatgataaatcagtaggggaatgataaactggtattatgtagtagctaaaagaaatctagatctacatgcattaacaaagatacatttcaaaagcacatagttgagtggagaaaaagttaccaaaggatatacacacacacagtatgataacatttacataattttttttttaagacagagtcttgcagtgttgcccaggctggagtgcagtggcacaatctctgctcactgtaacctccgcctgctgggttagagtgattctcacgtctcagcctcctgaggtgctggaactacaggtgtgcgccaccacacctggctaatttttgtatttttagtagagagggggttttgccatgttggccagggtggccaactcccgacctgctgacctcaagtgatcctcctgccttgacctcccaaagtgctgggattacaggcatgagccaccacacccagcttcacttatgtagatctaaaaacagagaaataatctaatgtagtttatgaatagccactatttagcaaaagtatgaaaacatacgggataatatactccatcttgagggcaagggttactgaagatatctttcaaatgtatttttttctaactactaaaatcttaattactatatgtagaaatcatctaaaaatagacaatccaagaatcatctttggcactgttcaggtgcataccactctataaagtttatgtttagtcatttacatctatactctttcccatcttttctttcttgctttcctttttttttgagacagcgcctcactctgtcacccaggctggagtgcagtggcacgatcaccgctcactgcaatctctgcctcctgggctcaagcaatcctcccaccccccacccgcccacaaacagctgggactacaggtgcatgccaccacacccagatgatttttgtattttttgtagagatggggtttcatcatgttgcccaggctgatcttgaactcctgagctcaagcagtctacctgcctcggcctcccaaagtgtatctatcttttcttcttaacaactgttccatctaggatctctgaggcatagattaaagtttacactcaaagttactatactccctaggactcaaatatttattgacaataacttttaaccacttaactttaaaatytgtaaattttactcattttttgaaaagtcaaaatctatagctatcaatatatattcactgagtgttgattattatatacctatacccattattatataaaagaaataggcataaaacaytgtttctttctgcttatggaacaactaatttactttcttttaacaagattaaaataaaatcttactttatcagcaggtctcttttcagcttccttctttaccttttcagttgtgaggaccttgccattattattaccagaaggaagactggatgatattttgggctcttgcttaatggaaatgttttttgtgcttgaaattttgggtggctccacatcctaaaagatgaaaaaaggtaccagtaattaaatatttagactgatcatcataaaaaaagatcattaatataaacaattttcagttaaaaattaagacatttcattataaccaatgtaatattcctttcttaaatagttaaatagctttattgagaaataattgatatacaaactgtaccttttttatttttattttttgggacagagtctcactctgttgcccaggctggagtggagtgctgtggcacagtcttggctcactgcaacctctgcctcctgggttcaagtgattctcctgcctcagcctcccgtgtatctgggactacaggtgcaccaccacacccggctgatttttgtagtttcagtacagatggcgtttcaccatgttggccacactggtctcaaactccggcctcaaatgatccgcccacctcggcctcccaaagtgctgggattaaagacgtgtaccaccacacctggcccaaactacacctacttaaagtgtaacatttgataagttttgacatatgtatacgtctgtgacaccatcactacaatcaacataatgaacatatccatcatctctccaaatttccttgtggccctttgtaattactctcttacaggtatacaccctatagaaaaatatgtctcccatcatcaagcaagaaaaatatgtctcccatcatcaggcatatagaaaaatatgtctcccatcatcatcatcacttatctgttttctgtaacaatacattagtttgcatttcctagaaatttatataaatggaatcatattcttttttggtctggcttcttctactcagcatatttattttgagattcatccatgttgtttagtgtatcaatagttaattcctttttattgctgaataatattccattgaatgaatagactacaatttatttatcaatttacctattgatggatatttgggttgtctgcagtttgggactattacaaataaagctgttatgaatattcatgtacaagtatttatatatatatctatgtttttatttctctagaaaaaataggagtgggttatatggtaagtattaatatatgcttaattacttgagaaactgccaaactgtggcagtaccattttatatttccaccaagcatatatgagagagttccagttccttcccatcctcaccaatgctttgtatggctactctttttaaattgtagatgttctaataggtatgtagtgatatctcatttagatttaatttaaatttccccagtaactaatgatgttgagcagcttttcaagtgttcatatggcatacatatatcttctttggtaaactatttgataaaatattttgcccatttaaaagaaatgaatctgtttgttttattactaagttaaaagagttcttcatagattttgggcacaaggcctttatcagatatatgatttgcaaatattttctctcagtctgtggcttgtcttttcattctgtttaaattcaattccttattcatgtattatagctttgctgatatagataacttgttatttgttgtcattaatagtatgcataaactttggcagctcttggaattccccctcccccaaaaggagggcactttcccatcattctaaacaaaactaaggcagctgagtgcagtctattttactgtgataatatgtaaaagtacaaaagtataaatgggaataatacacaacaatttcagaatagtggttacctstgaggggggaagagaagaaaaaggaaggaggaatgggtcctcagatctagtggtggcagggcttgatatattattatgctgattgtttagacaacgggttagcaaactgaggcctataaatagttttttataaacagttatattagaacacagccacacccattcattttataatgtatggctgcgttcacattaccatggcagaattaaatagttgcaatggagaccatctggcacacaaaatctagaattcttactatttggctctttataaagtctgttgatcactggtgtagacttagtaaagtgttgaagaaaatgttaataatgcagattaaacttaaaaatgtgtggtgggcaggtgtggtgacacatgcctgtaatcccagcactttgggaagccaaggtgggcagatcacttgagtccaggagtttgagaccaacctgggcaacatggcaaaatgctgtctccacaaaatataaaaaaattagccaagcatggtggcatgcacctgtagtcttagctactcaagaggctgaagtgggaggattgcttgaacctgggagggagagagcgcagtgagccaagattgtgccactgcactccagcctgggtaacacagtgagaccctgtctcaacaaaaaacaacagaaaaacaaaaacgtgtattgtgtgtaactaaaaaattgaagacaaagtcatgcagtattaaactattacctaattcagcaaaaaagttgttctagttgttgacggatgagttaagttttaactccattatttcacatttgccttcctcattaatgtaaatgaatatcaaccaatattcatgttagaatacacttggagacctggtaatgttagtaagcattacctccaggtgattcttatccatgctaaagtttgagaaacactggcataaatcactcttcttacacaaatctagtgatgaaaatattcagctgaaggctaaaattaaatggacctgggctttaaaaacctataacaaagtagtttctgaaaactgatcaagagaaatgaactctagctagaaacctaagggcagcgtgctttttaatcacaacaaatttttcatgttctttaagagataaacttccattttagaaccccattaaaacaattttttttctttagtaataataggtttccctatctggacaataccaacacccacagtggaatgaatttggtagtatgttttgtagagccatattgatttggtcgatctgaactcactgaacctactgcaatgagaatggatagaagaaatgaagtcacaatggttctgctattcaaaatacaataaaaaggcttcggagtactagacctagtattgaaagaaggctggggacaaaatgccagtgtttacttgggctctgagcctgggactagatcctctcttgagcttcagattctggttagacttgagctagtcatgttctattttctccttctcagtttgggatctaagtccacagacctgagtgatttggagtttgagggtcagagcttagaaggatttgatagaatgtcttagtaggtattagggaatataataagagttgtcattcagtgacagcctattatgtaccaggcaggtactacactaggtaactcatttactggatctccttcaatttttacaactctgcaaagtagttcttattatccccattttaccaataaacagactaagtgaaatgaagtttctatgtacctcagtttccttatgtaaaatgaagaaaacagttatctatcttaaaggatcattatcataattaaaattaattattcacataaactactcagaaaagtgcctgggacatcaagatacgttgtctattatcatcacacaattataagatttaagtgggatttaaaacaggtgtgtttggtatcaaaacatatattcttttcacataaagctgccattggctgctttgttattatcaagacaggagctacacagttctcagagttcatccatacctccttttctcttaaattatcctacccatattcaatttattttgttgaaagatctgtccttttacttgattttttttaatccttaaaatattaggcaataattagaagtaagttgtggttacattcagcagcttaaaaaaaattctgatcacaaagaatcggaaattaaagtaagtcgtaaacaagtgaattcatatacacataaagtagtagaacagaatatcctgcacccccagctgatttttctatgtggtgtaacagttctctgaaaacttgaagggaaaaaagaaaataaagaatataatttcttcatgctacaaggaaagattatttcggcagagattgttttgagatggtctatatgttatcaatgtagtactacaggccttacaaaactctctccaagctttttattcattcaagtaccttttgagatggacggtaactggaatcaatgccccgagccaaagattcatcaagcagtgcttttagcttttcagcagaatctttactctttgaatgcaagaaacctagtgctttcaaaaaaatgggatcaagttccaagttcacagtagcagccattgcaaacgcctgaaggaaaaaaagagaaagtaatctagaagacaatgcacaattatctatgttaaagttttacttttctgttttttaatttgtaatagataatactgtacacatgatataaaatttaaaatcaccaaaaagttattacaaataaaagtaaatttccttcttattcctgacaggcattatctagttccttccccctgaaacaactagcagtatcagttttctgtgtatccatatcgatggtaacgttttaaatccaggtaggcctctccctgccacagaactccttcctaactgtgttttaaaagatacacttcgcagtttcagtacatagaacttgatgggtttacgtcaagtttactctgtatcaaaatttcttctctcaaaccttatttccataacacaagggaagacttagtgtgcaggtgtttgtgtgtgtaagggctatcgtaagagggcaatggtgaaaaggtatattaagtgattagctatcatggtcactgctgccacttttacctcaactctttttttttttttttctaaactcacctcttcagttctctgccccaaccctaaatgtctcagaaaacatattaatgataaccttatttgatcacatttagattgtggtatctcatgcattaacctatttttaaaagtaaggtctctgagggataatatcatatctacttaaaacacacacacacacacacacacacacacacacacacacagagcctatgatgctttgtgtcctaaagagcttaaaaaatagccaagatggataaagatatacatcaaaggcttatgaaattccacaatactaaaaagttttgtttttagttaataccaatgctatcatgtggttctgcttctggttgtcactttttcaaagacctctccaggcaagaaattatcaaaataaaaatgtattctttgtgttcaatcctttgatcaatatactatggcttgaaatcttctatccttgaggttaatattgtattaatgcagcacacttgcaytgctatagttagggaactgtcagcaattccacagttatctcccattttcaggggtttataacaccattaaaacttgctgtaggttgaatcctagcatatgaaagcacatctgaaaatggattttgttgtcccctcccctccagcttcactcctcatccttctccacatctgacaagaaacacacatacacatccctaggcttttttttttttttttttaagttcccaggaaggtattagttatctacctgataactacaaaattactgtcgaattctgtactgtactaaaatatcatctgaatcacccatggaaaggaatccaaaggccagtactataatgaaaaagtaaccttatctcaaactgttgtatttctaagaatttaacaaaattgaaaagcagcctctgtcacttcttaaaattatattattatatacatcacctctacataatgataggtacagaaaaattattttaaaatttactcatggggctggtcaccatgtacgttctgaggaaaaaatagctccttaataaaatttccaagattaaaagggtaaacctgccattcccccagcatatacaagggtaacagcctaatctcttttttttctttaaattccactcctgtgacagtttactaatctttctactgattttatttcatataggtaaaggaaatagcagtttacttatccagattgttataaaacaatttattttattgggtgctgaccaaagggttgacacctaaaagaacccttgtaatatattagaaaaaccatttcttgaaatttctatgctgaaaaatgaaagccaagtatttattgctatgtatttctacaatcacaggtaagaggtttacattacagattaggtgacaagagtcagcacctagattacaagactgcggaagtcatcaacaccaacattccagttggaaccttggagtcagttctttttatgcaatcttgccattataaaacttaacaggctttgtacccctcccctaaattactaacatggccctttgacccagtggtccccatggtggaatacagagaaaaaaatattaactttttaatttatttctatttctttttttttttttttttttttttgagacagagtctcgctctgtcgcccaggctggagtgcagtggcatgatctcggctcatggcaagctccgcctcacgggttcatgccattctcctgcctcagcctcccgagtagctgggactacaggcgcccgccaccacacccggctaattttttgtattttttagtacagacggggtttcatcatgttagccaggatggtctcgatctcctgaccttgtgatccacccgcctcggcctcccaaagtgctgggattacaggcgtgagccaccgcgcccagccaatttatttctatttctatttattttttaaaaatctattcatatacagagtgataatagtgtgttatataattgatctttaacctcaaggagctttatcttcagccagtgaaatctgaaacttgccacaactattgtcctcttttattacaatcaattctcctttctgactacaatcttccattactctatctcttccactgccttaatccagggacctcttcaaagtgccaagtcaatctttcttctgtatttattcatttctctattcccattctacttgttctttgttacagaagcctccaatttcttgtcccttctgctttctccttattggcaccctcttgccctgacttttgtttcctcaccaaacagaaaacagtagttgaacctaaaataaaacacttatggttatgtggtttatattttatattttagttttctatcttacctttactcccccttttctgttgccttctctaatctctgttacttttccttccttaccggcaaatatccatatagtgaaagaagtttactttctacagcagtcataaagaggtcagcaacttggtgtaactgtgttgatctacacatacaaaaatattttcctggagttacaccaaatcatgttacttctatacaattcctttcctgtatattcattcctaaacccatggccaaaacagactgcaaaagagccatatcattcttactatggattagagttctagaaaacaaagtcctgtgtgtgtgtatgaaagaaaaatgtatatatgaaagatatttaatatattaaatgtaggtttcatttaaaaagtagatgttgctttcaaaaaggagaatgtgagaaaattaatatttaccactttaaagctttcgctgacctagggaagtggtagtagtagtattgataggagtgaattcttaggtgatgctgggaattagctgtgtcaaatgcatatagcacaaaaatcgccattactgaacaatgatcttttttctgtatctcttattatccttgatttattgcagtatgccgtttacttcctatccagctcacattctgtggtccaccctttcaatacctctttcagtactctaggcacccgaaagccctgtagtttccctactttatagacatccaccctgctagccattctctctctgcctgcacccaaactctaagtgcaactgggaggaatatacatacattctatcttcagaatcaccattctcagcttggcgttcagtacaacttggcaattctctcatccttctctggtcaactcacttccccactttctgcaaagatcagttatacttcctccattttcttttaaaattgcttctgtgtttcagtagatggcctcacctacttcacaaagagaggctgtcagagaggaattaagtcgacttccttccagcacatctacaaacttacctgcactcatcctttcctctttcccatctgataaaaaaggagaaggtagctctctatgtagtgtcacctggatctggatcctatctcttcttgtcccctcttgaaccttggcctatggattatttcccatatcttctttttttttttttcagcctttctactggcatcttttcattgacattaaatatattcaaacatcttctatcttttctcttttatagcaaaacgttctcagaaatcatatgcttttgtactctttttcttcattccttctatttacacagcaattcttgcaattcagcctttgtcccactattccatgaaaatgctctcatgagtcattcgccgcctcagtcaggtaaacctaatacatacgattgtccctcctacttctttgtcagtcatctttgtaggttcctcctatccaattaaaaatgagttcctcagtgctaggttctgggtctcttcttgacttgttctacatcttcttccaaaaatgtgttctctgagtcagcagcataggtatcacgtcagaacttagaaatacaaactcttggtctccattcctaggcctactgaagaaaaaactctgggagtagggtctagaaatctgtgttaagccttccaggcaattctatctactctaaagtttgggaattattgccctagacaatttgatctatatagtcttttgccagtgattactaatacatctctgcagtccatgtgtctctcccaagatccaactgccagcttgacatggatatatcattggtgcctcctatgcaacgtgtctccaacagagccactcatacactattcccttttctcctaaccagttcttcctctagtaatccctttttcaaatgatatttaccctattgcccaagccagtaacccagaagcagctttaactcttcccacttccttaattcccacccccaattcaataaccaaacctcttaaacatacctcaaatctatccacccttttcaatccttactactaccaccctagaccaacctagcatcatctattatctggcccactgcaaaagcttaatcagtctcccacaatcactcttgtcatccctttaaaccttttcatatcactcacttgcttaaaatccttttatcacttctcacaatccaaaggttcaagaataagattcttaacaaggtctccaattctctacatcaggggtccctaaccttcaggccatgcagcaggaggtgagcagtaggcaagcgagggaagcttcatttgtatttacagccactcccatcacttgcattactacctgagctctgcctcctgtcacatcactggtggaattagattctcataggaatgcgaatcctatgtgaactgtgcatgtgtgtgatctacgttgtgtgctcctcatgagaatctaatgcctgatgatctgtcacagtataccccatcatccccagatgaaaccgtctagctgcaggaaagcaagctcaaggttcccactgattctacattatggtgagttgtccaattattttattatatattaccatgtagtaataagagaaataaagtgcacaataaatgtaatgcacttgaatcatcctgaaaccatgtcttcaatgaaactggtccctggtgccaaaaaggttgtggaccattgctctacatgattaataatacatataaagcagttacaacagtacctgacacatagttgacactcattaaatgttacctagtatcttaggccattctcactctctctgttatagctatctgacttatttcaagtcctccaatatactctttcttaccttagcacttcagtagaaagtgtgccacccccacctccatcttaagtcacctctcaagtttcagtttttcctgcacattccctcaacaaaactagaagtttcactgttacatagcccaaaaacattctgtacttatttgtaatattaatcacactgttaattatgtaaataatctttctttctcattagaatgtaagttccatgaaggcaggcagtggattggtcttgcctactgttgtaacccctgtctggcagagttcctggaaaacagcaaataactgtaaatgttggccaagtaaatacttgttatctacttccaatttcataaaactttctcttcccttgagttctgttatactcaacttttctgtttttcctcttctatctctgactactctttctttggcttatcttctttgttgcttttggtattgtccaagtatttgtccttggctatcttcttagttctgctagcagtttcttcttggtaatcttatacacatcaggttttcaactatcatctctgggtagatgatttaatatgttttaccccaacttcaatctctttttttttttttttttttttgagacatggtcttgctctgtcacccaggttggagtgcactgagatcatggctcactgcagcctcgaactcctgggctcaagtgatcctcctgcctcagcctcccaagcagctaggactacaggcatgcaccaccgtaaccatgcccaggtaattttgttgttttttaagtagagccagggtcttgctatgttgctcttatctggtctcaaacaatcctcctgttgtggcttcccaaagtgctgggattacaagtgcgagccaaatctcttaaatttgaatcccatgtttccaaatgcttagtgtatgtgtctatgtgattccttaatggcatctcaaattcagttacaactaaaattgagattctgattatcttcccgaaaagttccttgtcctgctcttactttcaataaatgacacaactttcttttagtcaggtttgagaccaaagtctttccttcactgagtctttccctactccttatattcaaataatcagaattcctgtggattctgacggcaatatttttcacacttgtcctacttttcacttccactgctactactgaaattcaggttttattagcttacttgaactatggcaataacctcgttattttccttgacttcaacattgttgccatatgaattttcctgaaacccagttttcttctttttcattaaaataaaaaaaaaaattcttgctgagaagttagggctttctaccaccttcgaaataaagaccaaatttcttggcctagcatttaagaagattcagtaactggcacaaaaattatcattcatcatccccagatctgccttatagctagctgaccctgccactcttattttttttgtccaggaagctctttacctatttttatatatctacatcctatcaagaccctattcaaatacttctcatgaagatttgactgacagctgctgtgcccctctccattccaaaccctattaatagtctctccattcaaggatatctcatagtgctttttcatggtattgcaactttctcccttgaagcatttttttttttttttggcacaagtgttatgtcccctacaaaactctgagtactttaagggcagagtctatatttatctttttgcctatctctttgccactttgcaaagtacaacaaaataatggctatagaattactggaattaagtgatcaaagtatagtggtcttatctctccttctacacaattgtagccatttccaaggtcccttcagcaaaaatcacaaaagtaactcacccctgcccccacaaaaaaaactccaaacatcaaaaaagcaaaagcaaagcaatcacctctttcacgactggggacttgtagtacaatgttcctatctgtaaaattctcacaatctttcgcctgtcttgcttaattcattaatcccactggtctgtaaacttgatgacagcaggaacttgttttgttcactgttatttccctagtgcttgaaacttaataagggctcaaaaatatttatcgaatgaacgaactaggttttttgcgtaaatgtcaccttataaggcttctgtgatctctccagtctaaattgggcattcatatataaatataagtatgtgctttctcctagatccatttttcaccctacctggcaatctcaaaagaagtccaaagttgatcatatgcacgtgccccagatgaaggaaacagaaactgttcacatagagtgcagtattatcgttgccatttcataatggctctaaaaaactttgttcttcatgacttcgcaagctcttgcaaccccttccaataaacattattttaaagatgctgcctttttcattcctccactgagttcttggttctggataacactgataccttagggacacctggaatcgcaggagaaaaggctccgattccaaaccaatcaagtggctgaaagctgacagcaaacacttagaaaaggaatgtcaatcctttgatcaaagcatcacacatcgaagtcctagaatgggggatggtccttgacaggggagccaaaagatgagagacaatgagggagctacgtagagaagtcactaaaaccctccgacaaagtccgaggcaggattccaagtcccttgtccctagacctagaaatatgctcggtccgcatgtcccggcccgcaactccctcggaggaagcacagtcctcactgaaaggggagagcagtcagtctagggcacgcaaccgcccgtaaattatgattccccttgaggagcgaggaaactaataccccacgtagctactctcccacctcgctcctggcgcgggggtctcgagcctccaggaggccaggagcagagtcgctcagcataactcaccgttccgccccgccctgccgatccgtctgttcccggtggtcccttcggaaacggttcccgcactggccggctccgaaagcaggaaaacaaaggttcccacagtaggggcgggggaaacgtttggcagtgcgacagtaggaagtgacgttacttccctttttccggtccgccggattatgaatgacggccggcgcgagtattttccacataaggtggctgtcgtttttctcctggcstctgtggaggcgagtggtctgcgggcagcagctcccagaggcagccttggaattccagctcggactgggcgggaaggcgcaggcggcccaggtcgccgacacgctcacgcaccctccctgcctggccgcgcctctgcgaccaggtaaagagggcgctcgggccgccggcttctcagcctccgcgaccccctaagaactggtcttttcttcgggggtctgcagggctgaggatgcgggggaagggtgggaaggacaagggcgtggtatcatcgtcctgatttttctcccgccctggggccgcctcaaactcctttttggccactcctgctgaaggtgcgggttgagggctctgggcttctcggtagtacgcgtttcccagtttccccctagccagtccctcatgtcttcctctgctgatggagaaatggggcagcttccagttggaggcgttggttggggtggtttgatatttgctgttaagtgttacttcaagacctcttgggtcacactaacttctcttctctctttggcattgagttttccattccagcccttcctgattgcagaaagcagttctatgtgaatactacttaacatttactccaaaggacttgcttcatttggggccatttgcttatgttttgtcatcacagcagtatctcttgggtttttaacttctatagaaagtttaatttgcatgaaagttgctttggtttcaaaaacgtttgctaatacacgtacttcccatcccaactttctacctggttttgggatgagatgacttgtttttttcccctttattcttaatgccaggatcccattccttgtcataaattcttgaatatcaagaaaatgccagctttagtaatatattgtgtgctacattattgataaagaaggtggtgtatttctattttacctaagcttatctgtaaaaacaatgtttacaggagaaaatgcaaaagctagcaagaactagtgatgtgataattttaaacatgtaaacatagtcatttaaatccatgataataaactgttataacacaactaagtgattcgctgtcatatttaataaacattaagctatgcgggtttttttttctttttttttaactgcctgatggggagcatacaccactgagaggattgctttaagcacactcattactaaaaattgtgtttgtattacacctgaaagtatcgttttgtgaggtctcacttcaaaaataagactgaaaaggtcaatgagatttgagaatcatcatttctttttattttatatactttgcacttctacgtgtttttgctttaatttaaacacagctcaaacttgagcttctgtagtagtgggcccatcaattttttttttttttttttttttttgagctggagtcctgctctgtcgcctggggatggattgcaatggcaacatccgcctcccgggctcaagcaattctcctgcctcagcctcccgagtagttgggattacaggcgcccacaatcacactcggctccttttttttttttttttttttcagtcgaggaggggtttcaccatgttggccaggctggtctcaaactcctgacctcaaatgatccgcccgcctcggcttcccaaaggggtgggattacaggcgtgagccaccgcgcccggcctgtttttgtttttttaaacttgttttacttgtagcttttgtttcatcatctgtgatttttaaataaaaataaatactgagtatccaattagcttttctaacaaagaataaatacttggaatgcagatattgaaaccatttagattaaaacaagcacaggtattgtttgctgtgaaaattcagtaattttatttcatacttggtaacatgttagccatttgcgctgtcgatcactgttaattatgaggtcgggtttagctgaaggcattatgactccatggcaacagatgattccctgattctccagagagattacacacttcgtttgtggctaaggttactgtaagcttttcacttaaaaacttttcctacttctttaccagataagaaaacagctaattttaatcactggcttttgttctctaggacttaactgcatcccatattacgtatttaatgagcttgaaaaaatctcagtgtttttcttatcgtttttgaccctaaatatttaaggtaattggctgctatctatctgttgaggggcatgtttttttgttttgttttgttttggttaaatctatattattgtaataaaatagggtacaattttcagccaaatactgttgttttatgaaaagcataaaacacaagataagttataaaattcaaaatgttgaacatatgatgtaggagagaatttaggcaggtttaaattttaatctttaagaaaagtaagtgtttgtgatttttcatacttataaactgtgttgaacttcttattttgtacaataggttgatatgcacatggattaagggtttcacgtttatattttaccatttcatgattccctggctttcagcctcagtaacaaatatgttttttttcagtatttggttgggaaaaacttttcaatcaatataaatcctttacctttcatggaaagaagcttgaaaatataaaccataatttgggttttgcccatcaaggtttgcatattttaatagtgccagttgataaggaatttggttataaattataaagaaataatagtagctagtatttatttaaggacttaatatgtgacaagcttttttctgtatggcacactacatggtaggtacagttattattgtctccattttattatataagtgaggaaacagatatgcagaaaagttttttatagctactaagaatcagaaccagtatatttgcacccaggtggtctggctcaacagtctcggctctaatctattactttataattcttgttttataaatattcttgctaggcacatgtatggaatctagttaagattcttagttcctttgccctggatataagtatacataaaaacttctgtgcttgctttatttatgagtttggttagattccatttatacttttcccgattcacctcacaaaggtgatcttatttcttcattttaatttatacttagttggtccttaaaatagagttattaatttggaaaagaaagaatggtgtcatgaagaatgagatacacattgtaccaagactaaagttattaataatactctcagacagtgatttctgacattcatatatgtacattcattccttgaactaaagtttcagttcattaagcactggagatgttatagtgttaggtgataagagctatgaagaaaaagggaagctaggtaagaggctagggtgtgctttttcaattcaggcagtcaggagaggctgttctgagttaatatttatgcagaaaaatcaatgaaatgagggagcaagccctgtgaatctcttggagaaaagcattctaggcaaagcaatagcaagtacaaatattctcaagtggcaccttccaaaaacagcaaggacagctatggctggaagggagtgaagaaggataagagatgaggtcagaaagggatagctagggtcacagtaggcctataggccataataggaaatttggattttattttgagtgtgctgaagagccattggatggttttgagcacgagacatctgatttatgtttttaaggatcaccctgttgttggagaatggactgttttatggaaagtggaggaaaatagttaataggcttttgcagtagtccttgtaagcactggcgatgacttagattaaggtggtagtggtagaggtgctgaggagttggatttagcatatacttcaaaggtagagatggcagggtatgagagagagaaaaaaagaagttgagtgggacttttgagtttttggcctaagcatctgggtaattggtgttgccattttaccaggaagtagaacacgaagggaaggggagcaggtttagaaaaacatccacatggagatgtcaagtagaatatagtagtctggagttagaggagaagatacggctgggatatacatgtaagagtcagatcatatttaaagctatggcactggagatcacccagaacagtgctgtcatattgtgagttgtgccccattaatgagtcaggaaatcaatgtaatgagtaacaaccagcatttaaaaaaacaagcacagagtaaaaaatatcagatttatcccatattgtaggataagtattgcttcatgacatttttgtttctattttattcagtgtattgtgtgttacattataaaatatatacctaattgtgtggcatgctcaaaagtttgaaagccagtattcgaaggatggagtgtggattgagcagagagcaaaacactgagctgtgggtcactgagacatctgcagagtagccaatgaaaggaatcaggaaagaattgccaaagaatttaatccagtgcagaaacttgtcaaataacccagcctttggaatggaagtttatatcaaggattactgaaaccagcatacttgcttagaataacataatatctgacaattttcactttggtaaaattgcttcaatttatgaaattttatttataaatagtactgttatattagaacaatacctattcttaaatgtctctaaataagatcttttatgaatttaattaatacttttggactgatgtacaattctcatctctataatggaaataaaatacttttaaggattgtgagcattagaagtaatgcacatgttctgtgtgcttagcacatagtaggtggacaataaaatgtatgtaatatttaaaactttatttacctaacatttgttgagctcctatcaaattgtagtcacaaagataacttatttgaaaaaacaaaaaacaaaacacaggttaatcatttgcagcagttatgcactttttggtcttcattatataatatataatttatctaatatataatgttatgtatacataatgccatagatcttgacttgaattttgatcacaaaattttcaagctttattttttctggactgtggagaagtatgcttgtttttaatatgtttactgtttatctctcattctctgtgttttatcaaggctaagatatattcattagaatgaaagtgaaaaaaaaaaaccagatctgaatgcctaaatattaaacctatgactaattccaccatttaaaaatatattagaacattcctgagtaatgaaatcaaagacataatcttttctttttacccatttattcattcggcaagattcccaagcaaattggcacgtccaggaaagagatgcacactctatttaatatcctgaagtttgtggttttgtctgctactttctcactccctctctgcagagtggcacctgtcaaagctgagaaagagtaaattactctatttctgtgcttggcaggaatgtaatatggagtaacaagagctgtgccgcagaagccctggagacagaagttgattctatagtacctaccttcttaaagctcgtgacagaaaattagcgaactaaggcattctgaagctagaaaagaaaaaagaggaaggatttttttttttttgcctgtgatatttgcatacttggagcaaatactggttctactctctaaaaaggcacagtgcaagccaaaaacatcacatttgtacaggtttacaaatatttaatatttattttaaaaattatattagtacataatagggagacattattcaaggagagtaatttttttttttattctaagatcattaagtaacatttttaatctcccagggggaaaaccaacatctatattaaaaaaaatacgttaagaatcaacagtactttgttgcattttctctcaggcatctcattaatttttagatatcaccatgggcaggttattgctattctgttttgctgacatttagcattttattaagtgctaacagtgagaagagtttatagaatatgtctaaaatcctattttcatattcttatgtgccttacaacgtggcaaatataggcatactttttaaaagaatatttctacatatcttaaaagctattaaatagcatggctttgtttccagttttttaaaaagtgttaggatgagcctcgtaattactattttttagactgttgggcaaatgatgaaatcagtcatgttttctttcaaaactgctttcttgaaacacttaggggtgagtcttcttt

SEQ ID NO: 97303 - DNA, 12993 bp, Homo sapiens
ctcctttattattttgaagcaaacatcaggaatcatttcacccataatatttcactatgtatctctaacagataagaattgctccctctacactttttaacataaccacaatatcatttaataattctgtcatatcacctagtgttcatattttcaattgtctcataaatgtgatttttaaaatcaattattatccagataaggactggatctattgttcatttgtgcaatttttaattttcactttttggaatttcttttaaaatttaattttgtttaataattacataacatatttatataggtccaaagtcaaatgtacctaaataaggtaaattgaaagatatctggcttttctccatgacattctacctgtttgctccttccccttataggtaaccattttaaaaattatggcttattcttttataattttttttaaatataagcagacaggcatgtatattttcatctcccctcttaaataatggtagctgacactgtgtatccttttttctgccttactcttaacattatatcctacagcttattccatagcaccatttagagatagtctacactccatttttcaagcagcataatactctattgtgtggatgcatcatagtttattcaaccagtccccaatttacagacattttaattcgtgttttgatattacagataatcctgcaattaatagtgtggtacatgtcttttgacattttgctcatgtatttgtgggatcaaatcctagaaaaaggattaatgaatccaagagtaatacatacagaacttagcctgataacatgaaatatccctgcataggccaggctcagtggcttacgcctgtaatcccagcgctttgggaggccaaggcaggtggatcacctgaggtcaagagtttgagaccagcctgtccaacaaggtaaaaccctgtttctactaaaaatacaaaaattagctgggcgtggtgacagacccctgtaatcccagctacttgggaacgtgaggcaggagaatttcttgaacctgggtggcggaggttgcagtgagccgagatcacaccattgcactccagcctgggtgacagagcgagactccatctcaagaaaaagagagagagaaaaaaagaaacatccctgcatagggattgtaccctttgcattcccatgtgcaatatgtgtgagtgctcttttccccacaaatcagccaacagagaaccttgttaaggtttttccattttgccagcctagtaagtatggaaagtatctcagttttactatgcatttttcttatgttaagcagatatacatttacttacttttccttaaaacagtatttaacaaatattactaatttgggtttttttctttgtttaaaagaatgcaagtgtgggagataaagttctctacggtctctatggcatagtggaacatagtggctcgatgagagaaggccactacactgcttatgtgaaagtgagaacaccctccaggaaattatcggaacataacactaaaaagaaaaatgtgcctggtatgccatcctaagtttattttattcttaaaaacaaacgaatatgtgcttccttttctgggagagctaagttattatttcatagatgcctctagtggatttgcttgcttgctttattttaacttaattgattgattgattgattgattgagacagagtctcagtcatccaagctggagtgcagtggcacgatcttggctcactgcaacctctgtctcctgggttcaagtgattcttatgcctcagcctcctgaatagctgagattacaggcacgtgctaccacacgtgactaattttttatatttttagtagagacggggtttcgccgtgttggccaggctggcctcaaactcctgacctcaagtgatttgcccgcctcggcctcccaaagtgctgggattacaggtgtgagccaccatgcccagcctcaactggattcaccttaagaattccctctaggagtgcctagaaaatctcaaatattatgaagactgtacccttctaggtcatatgagatgacatggtattttaaggtactgagtcattgtgtattatagtggagtagcattttatttaacaataccaaaagtttttgaagccatatcagattgtcagaagagttggagttgaaaatttgctggctttgtttatgggtcatccaactaactttgctttttttgtttgtttttgaaatgaggtctcactttgtcacccaggctggattgcagtggcaggatctcggctcactgcaacctctgccttccgggttcaagcgattctcctgcctcagcctcccaagtacctgggactccaggcgcctgccaccacacccggctaatgtctgttgttttttaaattagagacggggtttcaccatgttggctgggttggtctcaaactcctgacctcaagtgatccacccacctcagcctccccaagtgctgagattacaggcatgagccactgcgctgggccagacagcattattaattatacctataatattaatgctttgaaagaatttgttctaatgagtacacatggacacagggaggggaacatcacacactgggcctgtcgggggaggggggctaggggagggatagcattaggagaaatacgtaatgtagatgacaggttgatgggtgcagcaaaccaccatggcacatgtatacctatgtaacaaaccacattctacacagatattccagaacttaaaaatataatttaaaaaaaaaaaagttctttttggaaaatgcttaacccaagaaaaaacagacttctcaggtaaaatttggcattagatagagtttgtaatgaatatgttattgtttgtaatttagagtaagaacctaaagcatacttactttaaaattgtacttctttttgttttgctaggtttgaaagcggctgatagtgaatcagcaggccagtgggtccatgttagtgacacttacttacaggtggttccagaatcaagagcacttagtgcacaagcctaccttcttttctatgaaagagtattataactattaatggtaatgattatttaggtcatttgtttttgaatgccacagtgataactataatatataatgtgcctttctagtcttccctcttctgtaggaatagcatgttcctcaaatggtcctgaactttttcaccattttggtgaacccttttaaagtaaatttactcaatgctttaaaattcatagtcttaaaataaatgtgaattttgtttccaggtatttattctggggtacaaaaacttcccagaatttacagtaggaaaggaaacccctttatgatgtggcttattattacaagcattcagaaatgatgctggctaagtcaaatcattccttgagacagtgattcctaaatgtaatgccaccttcctgaactctcacatattctatatcatggttattttaaaaaatatatttttagccttttgtaaccttagtcttgttttgagcaatcatattccatgttttatgtgcttttatatttttataataaatattaaagtaaaactattaaaaattgtttatccacgtaccacttaacttaaaatcatctcagggccatctagtggtatatatgtgtactaccatttaggaaactgctataacacataatttcatgaagtaacacctaatacggtgtagttccctggtcatattttatacaattcaaccatataaaagggtgtcactgtaatttcagtagtgtgggtttacaaataatctgctggttagcttattaccttgaggttttgaaaaactagaattatattgaggcatttcataaacatatctcttgcaccctcttcatggtggagttaaggataacttgcaggtggttggccaaggcccaatatagatgattataacatttagaattggcaattagaagttgataatccatataggaccataggatagctttgaaatataaattaccaaattatatttgtaaatgatagagaattatattcttaacagaaaaatatatactttttctacttcttgtaaatactaaacacagttttggggttttgaaatcactttgtcttcagcaagcatcattaataagttcaggtgaatttagcttttaatggggcattaagctggcatttttgattttctttttaaataatagcaaaaatatcatttttcccctctagaatacaaattattgagctgtcaaaacttggcatgaagaatatactattacttaggcttaaatatcaaaagataatggctacttcagtgtcatattgttgaaatagaaacaaaactgcatggttcaagcatcctaatcattagtgccaatgaatgatagtgcaggcaagtgccaggtaaatgcctagtcccacttcattctcctcctgggaagaaaggataagaatagtggctgcagataaggtatggaaatatttaatcaagactgtcttaaacacataagcatatataatgttatcaaggttaccagtgctgccttttgatatatggatgaacataactgtaattaaagacggtaatagtatacaaaatgcagagcttaaaaatgtcattgcataaattctatttttaagatgttgaaatgttagtagtgtttttcttgatttttaacagtgaaataatcaagaaatatatctttaagttaatctgcaaagtcaggctgtgttctgtaaaaggtatttcacagcattttctgtttaactgtaatctgttatcatggagatctcagtaccagagcagtgaattttttgaaaaatattgactgtctttattcaagtcagccatcttggtaagagcagttttcatccccccactgcccaaatgtaaatatagatcacctaatttttcttacagaaagatactgttaagaggcatgcacttttcatcggatggtcacttgtttcttgtttcaaagacaaatatttggatagatacccatacttgctatgagtcagtcacagtgctgacactattttaacatcatttaaaatggaaagatctacatagatttttgacattattccagaagtaacatgcaagtaagatatttttattgtcattttcttcatgttaaaggagctacttatgaaacctatttttttatggcctagagtttatgagtgctttttccttgtcttctgaaaatggaataaattggatttttgatacttaagaatttcctaaagatagcttttgtaacagagaaagcatgttaaattacacatgggtctaccttaaaatttttgttattatttccaaagcacatttgcagggatagtaaatgtatatagtagcaagtctactataataacagtagtttctggatcacctcaggaaacagtataaataaataataatgtttacttatcatcaacataactaccatagtgtttgaatgaattaaagtttcattagctttatttagaaactggtttaccccagcttcccgtttttttccaaatataaaatgataaaatattgattatgtgccaatattgtcatttaatgttcttaaaacttgtgaagaccacctttttaggtagctgagaagagtgatagttggtatcaatttgttagccaggcatggtggctcatgctgttgggaggctgagtggggaagatgcttgagcccaggaggtcaaggtgcagtgaaccatgatcacaccactgcattcctgcagagtgacggagtgagaccctgtctcaaaaataaataaaaagaagacagttggtatcaattcaaagaatagttgatgcctgttctcttattttaaatgtaccaacagagctattttactgtatttaatagttcttagcttccatgtgtgatgattttaatcagtgattttatgcaatagctgaagaaaattttctgaagattaagctgtgaaatgtatcaaccctcatctaatttttgtagtacaaaatgacatcctgattccttttaaaaattcacgtttgtaatttatttttctgcatgtattgatcaaataagcctaaaccaaatatgtgcaataaaaytgagcctttagatagtatctagtgcattgttaaaaaagattatttctagatatttatgatgtttttgtttacgtagaaatcatgaattcaaatctgtttaaaagatgaccatattttcaattttgagtaatacatattattcctactgttttttttcttttgccatgtttctagaaaacagctgtgtaacttaytgagcgttattttggtgttactgtataaaacatgcataataaatattcttatttatctcatgttacaagattggtcctggaattttcacagtttacgttattgacagaatgttttatcaacaatgcatttgcttatgtcttagtccactcaggctgctataataaaataccatcaactatgtggtgtattaacaaaaatttatttctcacagttctgggagctgggaacttcaagatcaaggtgccagyagacttggggtctggtgagggcccacttctgttcataaagacagtgctttcttgctgtgtcctcacatgggaaaagtacaaggcatctctgtgggtccttttccatgcagcccattcatgagggttccatcctcatgacctaatcacttctcaaaggccctatctccaaataccatcacatttgggatttgtgaatgttgtaggggacgtaaaccttcagttcatagcagctttctcagctatattcaaaataccctacatattttagaaattctctatttcaaaacagtttatgggccactttacctcagatttcagtatctaccaaggacgatcatcttcctttcaggggtttcttaaaaggtgtattacttagacaggataattattaagacaagggtaaggtcttgcaccagcaattaagaaatactttgcctacccatttgtgtctaaacttcttccagatcatgaagctctttgagattatgatgaaagttagagactatcttttatttgtttagtcatttagtaagtattttttaggccaggcacagtggctcatgcctgtaatcccagcactttgggtggccaaagtgggcaaatcacctgagaccaggagttcgagaccagcctggccaacatgacaaaaacccatctctactaaaaatacaaaaattagctgggcatggtggcacaggcctgtaatccctgctacttgggaggctgaggcaggagaatcgcttgaacccgggaggcagaggttgcactgagccaagatagtaccactgcactccagcctgggtgacagagactgtctcaaaaaaaaaaaagtatttgttgaatacctgttgtgtggtaggtactagggatacagcagtcaacataagagccagaaatctaaaaggtgaggaaatacacattctaagaatgtaaggaaaatttatgtcaatggtaatgatatggagaaaaatcaagcaatatggactccctatgaagtcatgcagaaattaaggtacaggggatgaagatatcctagagataaaaggcatggtgatattagtactgatattcctgaaagagaaagctgagtgttgtaggaaggatggggttttaattctggggccctctcttctggcaatatagagacggagaagggaagtcttaacatctgtatgttcccagaaaaatgtatctccctaattcttgtatgtaattttgaaggttcatggacacttctgaagccatttcatacgtattttaaattgcacccaagaagaaatatctgagatgtttgcattcccatatgtattaggataggctgagttgtgctgcagtacaaccccaaatcccaactcttaagggaccggggccaaaagtcccatcaaggtaaagttttatcctccaagaccaggctctctggaagtgctatatcagatttggatgtttgctcctactgttctggagacccaggaaccaaaaggatatcttctgttttccacatacttaatgtagagtggtggaactgtatctgcaacaaacattctgaatggggaagaagaatgggagatacagttaggatccctaagtctaggtatggggtatattcatgattagggttcttttctatctcctaggaagaattcccttgtatattgttctccgtgactctagagtccaacctctgggaaagttttggtggttttttttttttttttttttttttaatcttcatggctacatctgaacagctactgagggatatatatgccaactttgggagttgcacagcttttttgagaccatttcttagatgactagggactgtaatttctcttaatttggaatagccacaagttgttgtagccaaggtttgtgtgtgtttttaatacaattcttaaaattttagtaggcttctcatctgtagatagatttgaaggggtgggttgcccctccacacctgtgggtgtttctcgtaaggtgggacgagagacttaggaaagaaaaagacacagagacaaagaaataaggggacccggggaaccagcattcagcatatggaggatcccgccagcctctgagttcccttagtatttattcatcattcgtgggtgtttctccgagagggggatgtgtcagggtcacaagacaattgtggggagagggtcagcagacaaacacgtgaacaaaggtctttgcatcatagacaaggtaaaggattaagtgctgtgcttttagatatgcatacacgtaaacatctcaatgctttacaaagcagtattgctgcccacatgtcccacctccagccctaaggcggtttttccctatctcagtagatagaacgtacaatcgggttttatactgagacattccattgcccagggacgggcaggagacagatgccttcctcttgtctcaactgcaagaggcatgccttcctcttatactaatcttcctcagcacagaccctttacgggtgtcgggctgggggacggtcaggtctttcccctcccacgaggccatatttcagactatcacatggggagaaaccttggacaatacctggctttcctaggcagaggtccctgcggccttccgcagtttttgtgtccctgggtacttgagattagggagtggtgatgactcctaaggagcgtgctgccttcaagcatctgtttaacaaagcacatcttgcaccgcccttaatccatttaactctgagttgacacagcacatgtttcagagagcacggggttgggggtaaggttatggattaacagaatctcaaggcagaagaatttttcttagtacagaacaaaatggagtctcccatgtctacttctttctacacagacacagtgacaatctgatctctcttgcttttccccacaagtttgaatcacaaaagattttaggtaagaacaggcagtcattgaacataagtttaccttactttctccaacctggcctaaatggacaatacctgcataaagcccaatgggatctattgttaaataactaaagtattattttataccctcgtatttcattatgccagattcactactatctaggaaatgcttaagtaactatattaagaatcaaagagtaggctgggtgcggtggctcacacctgtaatcccagcactttgagaggctgaagtgggcagatcatgaggtcaagagatcgagaccatcctggccaacatggtgaaactctttctctactaaaaatacaaaaattagcggggcgtggtggcatgcgcctatagtcccagctacttgggaggctgaggcaggagaatcgcttgaacccaggaggcagaggttgcagtgagccaagatcacgccactgcactccagcctggcaacagagtgagactccatctcaaaaaaaaaaaaaaaaaaagttgtaatttgtaatgatgtgcctgtagcatactagctttaaatatttttcatcctccattgtattatgtggtaaaatatatacaacataaaatttaccactttaaccatttttaggtgtataattagggtcattaagtgcattcacatttccagaattctttcatcatcccaaacggaaactctgtacccattaaacagtaacttctcattcccgccttctcccaactcctgggaacctctattctactctccatctgtgtgaatttgcccattctaggcgcttcatataagtgaaattgtacaatatatgtccttttgtgtctggtttatttcatcttgcatgttttcaaggtttatccatattgtagcatgtatcagaatttcattcccttttaaggctgaataatattcaattgtatatatataccacagctttaaatttttattaggttttaagatggatgtgatatggcacctaataacactataaaggttcaaatctcaagaaacagcaatagttcctatttcgatatattttccacatatcatcttacttagcttatttccattttgctttaaggataatttgtttctgtaataatggaaggtgacatgtcctcccctagaattttctacttcactccattcattcattcattcattcattcattcattgagacagagtctcgctgtgtagcacaggctggaatgcagtggcacgatctcggctcactacaacttccacctcccgggttcaagtgattctcatgcatcagcctcctgagtagctgggccaccacacccagctaatttttgtatttttttgtaggcagtttccccatggtggccaggctagtctcagactcctggcctcaggtgatccaccctccttggcctcccaaagtattggcattacaggcgtgagccacattggccaaattttctactttaaacactgaaaacagaggaagttaataaaaattttaacctataaagtcccctggttgttagtcattaacagcagattgtcagataagactggtaaaatgatggctgctaagcatttgatgatccaggcgcaggatgatcaaactgcagcagatcatgcacgtgacagctgcttacatagaaatttaacaccacaacacacattcttagaaaattctgtgttgaaatacatacacttacctgatgtgtccataagatcataatgttacggggaactcttagaacagagtggttagagaaagggaactggaattggaactgtaaaattcattttctggtctggtaaatagcaattgctgagggtgtctcattaaactggcacaaggaacaaaatgtgaggtatttaataatcctctccacttcacaatgcatttccaaaatgactggcctacattaggatcattgttgaacatattaatgcaaacatatagcagatgtaaaaatttctgtgtgcaaagcagatgctggccacttggagggcagaggtgagggggaaatcccttacccgaaaattgcctcacctttactagggaaacaagcaaagaattacaatatgattatagagagtaggaacatgacagtttcactaggccaatcaggtttctctaagaagatagaacattcctctgatgagaatgtttctcagagaattaaacttgaaaatcagacctgatgcaaaaaacttggaaaatgcacaaaatcacagagcaaaattagagattactgataacatgtggtatatgtccttctagtttttgctccatacagtggtttttatttattttattcttttgagacagagactcactctgttgcccaggctggagtgcagtggagggatctcggctcactgcgacctctgaccctgagttcaagcaattctcctgcctcagcccccctagtagctaggattacaggcgcctgccaccacgcccaggtaatttttgtatttttagtagagacggggtttcaccatgttggccaggctggtcttgaactcctgacctcaagtgatctgcccgcctcggcctcccaaagtgctgggattacaggcgggagccaccaagcccggcccatacagtgattttttaaaatcagactgtccagtagtcttatttgtgctaagtggaaattagggaaagggtcagagaaatagggatttccttttgccttcagtagtatcctcatgaacctgcgtcatggtgttgttaggtgtaattaatgaaggtttctcacaagataaaatgttattttgaggaccacgtccgtggattggaggaaaggcagatggttagctagtgacgactttattataatgctaattcaggagtatctgggtctctagtgctgaggaaaactgaattttcatgcaaagggcatctatattttcacatctgtatctttatccatctagctgtgctcttactattttgtttctacggtaatttgctatttcttttgcacgacaattgcccaatgaaataattcagatacttcgtgcactttgtcacgcagaagttttcatgttactctctggaaaggcacttcccaagatgtagctaataaacactgtatctttggaacatttttgttttccttttaacttgtagctcctagcctggaaattgatacttttgacacttgaacgttgttcatataaaaacactgtgaaatcaacatactgtctttgaggaatggcattgcatgcgtccttttgagaagccatcttgtagttgaaggaaagcagcaggacggaaaccagacttcccccccacggttccctaaaggtcacggataaagaatgaaaaaccgggactagttaagccaaggagagaagagcaagtgttcccggaagggggcgcgatgtgttgaggttaacaaagagaaagacagctgcggggtcagctaaggtctccgctttcgctaccgacccagactgctcaccttcacaaactcacgttttcctcaagcggcaccctcggcagcgctcaagtgagagtattccatccttggaatactccgagaaggttcgagccagaagttgg

SEQ ID NO: 97304 - DNA, 13312 bp, Homo sapiens
tacttagtaaagaattgtagccatgttttctacctaggtggtgagcttcctttaggcagagactctatcttacttatctctgaattccccacatccaacacatgtctggcacatagtaggttttcatggtttaatctaatgaatgaattaatcaaccaatcaaacaatataggagtgagacatggttaagctttccaaattctgtggttaggttatccatgccatacctcactccaaggcctgtagtgtatcaggatgtatcacttgtagtgtaacagggactcttcctgggaagcagtatagtcattaagagaaagagatccaattccagctccaccactgcccggctggtgatgccaccatacatgtcacttaacctctctgtaattcagcttcctcttctgtgaggaagggctaataaccattcctgtttcacagaactattgtaaacactaaatgcgttaaaatactaccattagttgtattatacaaagacatttctagataacaacagggaagaaaatcaaaattattaaccaaaccttcaaggcattgccattaaaggaccctgtcccatggggtataagaggagggacaaacattcacacatcgttgcagtcccttcatgttagcacttctaaatactgagccaaggacagccacccccagatgctgccctattccccaccactctgcctctcctgcgccgacccttgccaccccacctcttatgccccttgatccccatctgtatattccaccattcccaaccctggagtcaatcctattccaaatcatgggaaaaatataataagcccttggccatctctataattttggaattttgaaatcttggagaaaaagtataggttcttctgtattagaaaagatcccatttccagagaaggcacaaatgcatgacaagaacactccatcaatccctgtggggcactacttgaaattttcccacaagctgatcttatagaagagggagattaagaaaagtgaaagttatttttcacaggaggctctagtagggacagaaagtcatcatgaaagcatcatgacaggtccacctgatcccagactcaacctctgaattgcttccacattgtctgtgccacacaagctcctgagccctctgcagcctgaagaaatgagtgaaatctaaatgtggttctggggtaagaacctactttccatcttggaatctcacagagaccccaaagctaaataaaaattccttcaatttctcttttttaaaagatattattactgctgacttatttcaactttcaattatttgattataagcgatcttttacattttctgtttgcttatttaatgtctgtttatttttttatgaattgttcaagtagatttctgtcttaatcttgtgaggtagcatttaccataaacctaaaactcagacacctaaaactagcaggactatagcaaataggttactgttttatttttgaatgagaaggccttgattcagtgttgaacagcaagaagaatcaaaagatttttattcaacttcaagtacaaaattatctttgaatttgtttatttatctcctgagattaacctgataaactgaactcttcatggactaggacccagtggaacaattctttggatttctaaagcggtaaggcagaccagcaccctccgtggccagtacagagagggcaggccaaccctaggataaagcagaagggaacaagctttgggcattgctgtggatggagaagcctgagtgctgcttctgggcaggtaaacatatgcctggatgtgctgcagggatcttagcttgtccccatcaatgtcctcctttgagtcagaagaaaacttttcagtaattgggcagaagggcagtgggctacttctttaaactgttgaaagtctcctttcagctctcatgtctcaggccagagagacaacttagggtggcattcagtttcctggtctccaggctaaagtaatcattttgaaagctgattcctctgtgtttcagagatgctccccacagatctgaactactgggggtctccaacctgtcacaagcctaaggggggaaaaactaacaatatcccttttagtaacagatttctggtaaaatttggatcactgggctggagcaattctcaggccatagtggagatgccatcaaattcttttcttaatggcatggactaaccgtcctctaggactactgtcgggagcttttgtcctaggtcatgatttctgctgacataattggaatatctgaatccatatgataaggagtcctgtttcaagtaatttaggcagactatgtacttcagaaaacaagactgagccataaaaagggaggaggaggcacacagaccctgagatctttggtgagtgtgtctcaggcggatccgaagctgacaaaccatgtgagtgtgtatggccatgaaaactttgaattatctgccagacagagtaagtgccctaaaaccaagatacattttaaaatgcttttattctgaatatttattcataggtcaagcctcatatttcattccattaatgcattcatattgcacctgttttcctctcccttaggtgctttacatatccaaatgaacaaataccaattcacttcaggttccttggctgtctcttaactctcggcctctgacactctccctccctcctactgctctcttggctcttctcaatccccaaccctaagtcccatgatccccaccctcagaatcgcccacatgtctctgtttgttttgccccaaaagatgccagactggagataatttttctttgatttaaaatccaggcataaaaaactttaccaattcatccttggccccttagttctagaaagaaggtaattaaaaaaaaaaaaagtttgttaatcccaagtgtggcttttatcaagattctttaaataaccctttgttatttaaccagactcaattgaccacctaactggtaaaaggaaaaaaatatatatcacggctcatatttagcataacaacctaatcatcaggtaaattccactgaacaagaattagagaaacctgaagacaatcttcccttttagaaggctgaacttagaaacctcgtataattcaactccactgaaagtactgctccactaccctggaaaagcaactccatggtttatctctagattattgggtagtaattgttttttgtccacttttgattaaagtaaaaatacaccattgtgcacaaagggatgtgtacatctcataaatttttacaaactgaacactcttgcataactagcaccaggtcaagatttagggtgctaccagtaccccagaagcctccctcatggctcctcccagtcattaactcaaccaaatgcaactacaagtctgacttctacctcaatagatgagctttgcctggttttgaactttatattaatggaattataccaaatgcactcttttatatctgacttcttttgctcacatattatgtccatgagatgaatctacattgtggtgggtagcattaatgcattcttttttgttgccattgtttgttccattatatgaatgtaccacaatttgttcattcattctacctttgatggacatcggaattgtttccagttttggcaatggtgaataatgctgctacaaacattctagtatatgccttttggtacacacacctgtgaatgtctgttgggtttatacctaagaggggaattgctgcatcatcaggtatgcatatattaagctttaaaagatactgtcaaagttttccaaagtaattttaccaatttacactcaatgaaaatttcaattctgcacatcctctacaacatttagtattgtcaatttgtaaaattttaagcattctcataggtggttagctggagctccttgtggtattaatttgcatttccctaatggctgttgatgttgagcaactttttatattatatgcctgttggctatggaggtactcccttttaaaatgtgccagtttgagtctcttgtccacttttaactgattttttcttatttgtaggaaatttttaaataaattctggatgctagtcctttgtctgatatttataatgtaaatattttcttctgtctaatgtaaatatcttcctctgttgcttgccattttattctccttaaagtaagaaaagattcttggccaggcacagtggctcacacctgtaatcccagcactttgggaggccaaggcaggtggatcacctgaggtcaggagttcgcaaccatcctagccaacaaggtgaaaccctgtctctactaaaactacaaaaattagccaggtgtggtggcaggcacctgtaatttgtacttgggaggctgaggcaggagaatcacttgaacccgggaggaggaggttgcagtgagccaagaccgtgccattgcactccatcctggcccacaggagtgaaactctgtttcaaaaaaaaaaaaaagagtttgttgctcccaccgagttctggagaacgccagcagctcgctgcttaaaattaaaccacagggttccatgatgggtcgacttgatgggaaagtcatcatcctgacagccgctgctcaggggattggccaagcagctgccttagcttttgtaagagaaggtgccaaagtcatagccacagacattaatgtgtccaaacttcaggaactggaaaagtacctgggtattcaaactcgtgtccttgatgtcacaaagaagaaacaaattgatcagttcgccaatgaagttgagagacttgatgttctctttaatgttgctggttttgtccatcatggaactgtcctggattgtgaggagaaagactgggacttctcgatgaatctcaatgtgcgcagcacgtacctgatgatcaaggcattccttcctaaaatgcttgctcaaaaatctggcaatattatcaccatgttttctgtggtttccagcatcaaaggagttgtgaacagatgtgtgtacagcacaaccaaggcagccgtgattggcctcacaaaatctgtggctgcagatttcatccagcagggcatcaggtgcaactgtgtgtgcccaggaacggttgatacgccatctctacaagaaagaatacaagccagaggaaatcctgaagaggcacggaatgatttcctgaagagacaaaagatgggacgatttgcaactgcagaagaaatagccatgctctgcgtgtatgtggcttctgatgaatctgcttatgtaactggtaaccctgtcatcattgatggaggatggagcttgtgattttaggatctccatggtgggaaggaaggcaggctcttcctatccacagtgaacctggctatgaagaaaactcaccaatcatctccttcctgctaatcacatgttaatgaaactaagccctttttaacaatgtcactgtttgcaagagtctgattctttaagtatattaatctctttgtaatctcttctgaaatcattgtaaagaaataaaaatattgaactcacagcaagagaatagtttttaaaataaatctcaatttgtaagcatctgtgttagtcactttgggctgctataacaaattaccatagatggagtgtcatagacaacaaacatttatttttcagtctggaggctaggaagtgcaagatcaaggtgccagcagatatggtatctggttagggcccacttcctagtttgcagatggtcctcttcttgctacatcctcacatagcaagagcagagaaaaaaagcaagctcttatgtgtctttttataaggacactaatcctgttcatgggggcactacctttatgacctaattacctcccaaaggccccacctcctaatgtatcatattgggggttaggatgtcaacacatgactttggggtgatacaaatagcccattgcagcatatagaattaaaatgtaaatatgaagaaaaaaggaagtttttgttttttttgtggggggtggggttaaggaagaagatagtaatttcaggactaggcattgtagctcatgcctataattcctgcactttgggaggccaagrcaagaggatcacttgctgccaggagttcaggaccagcctagttaatagagagaggctaaggtaggaggattatttgagcccaagagtttgaggctgcagtgagctgtaatcatgccactgcactccagggtgacagagcaagaccctgtacctaaataataataataataatttccactttatttttcaatattcaaatatttttatataattctgcattgttctgtatgtagatcctaattttaaaattttacaccatcatagatgaacaaaggtaggaagcagtttggcttcaatagcttacagtaaaagaagtaaaggagttcagcctcaaaacgatattgttgatctgtcatgttatgaaaaataatccagtgtttatacttaacggatgccatcccttattaattatttactattttcttagtctaagtaaacactctttattaaaataagcaatgatacttgacatgggcctaagaaatatatagttagctaactgacaacattgtcagttagagggatttcttttttaaattaagtacagatttcttcaccaaactccaggataacagaaaagaggacataaaatttggacatagtctctggataaataaatgtaaatttaaatataaatcatataacaggaaacgaaattaaagaaaataaatttttcaagaaaagtaaatttatggatgataattctgtaacatagtcagggcaaagttttttctttttattttaatttaaggattttatgtttgtttttcacttgttgtaacctcacatgaccaaatggtatgatgcacactgagatactcaataaatgtgcagttattcttagccttttttcctagaactttaatattaacaaggaaaattttgaagtgcacaatgaaaagataacactttgtgtatggggaagaatatcatgcagttgatgacagtacattaaaattcacacaaaaggacattttgactagcattccgaaagagtccattgattataagattatctatgaggttttggaccaggcattacactactgaattatggctaactttggtttgtgatctagaccaagtcacctaatctatcttggattttagttttctggtttatgaaattaaggagttaagctaaatgacttgggtttcttttcatgtatcataatcaaaatgctgtaacttctctagtgaattcatagaacactgactcttataactatgtcatgaaatactttatgctgtgaacaggtatacgtgtataatatatgtatagctatgaacaaataaattttaaataaatgcacaatgaattctaaaaaaaaaagagagagaaaagaaaatattctcaatttgaataaagtcagtgcactagcctttcagtttatggtttgttcttcttgcatctttttaaagaaatctttgcatgttccaaggttttaagtacattctctaatacattaaatacattgttatattctggaaaatttatttcacattaagatccatgatctaagaatttatttttgtttatggtccgggataggtagcaaagtttgttttgttttgttttttcccaaatttcaaccagttgattcatcaccatttactgaaggaagaaaaatagcctttggcactgtactactgtggcacctttgtcataaataaggtggccagggatatatgcgggtctgtttcaggactttttcttctgttcctttagccaatgtgttgatccttggaccaaggaagtagtgttaattactgtggctttataagaagttttggaatctggaattctatactctttaagtttgtcttcactcttcttcaggattgtctttactattcttgatggtttgcatgtatatataaatttcagaatcagtttgtcaatttccaccaaaaaaaaaaaatgctagagtttttcttaagatggcattgaatctatatttcaatttggtgagaatacccatcttttcaattgttaaccaaaaataaaattctaagctgcccaaatatctgaacagactcctcctcttggccaagggcattccaaagttaacctgaaaaactagttttggccatgagaggaagtggggagtcagatatgactcacagctgaccagcattaacatgaacacagaaactttaaaactgataagagtcttaatagactctttaagtctgataagaaacatttatggctgggcacagtggctcatgcctgtaatcccaacactttgagaggccgaggaggggggatcacgaattcaggagatcaagaccatcctggctaacatggtgaaaccccatctctactaaaaatacaaaaaaaaaaaaaaaaaattagctgagtgtggtggcgggtgcctgtagtcccagctactcgagaggctgaggcaggagaatggcgtgaacccaggagacagagcttgcagtgagccaagattgtgccactgcactccagcctaggcaacagagtgagactccgtctcaaaaaaaaacaaaacaaaaacatacaaacaaaaaggaacatttataatctattctctctgaagcctgctacctggaggcttcatcagcatgataaaaccttggtctccacaaccccttatcttatcccagacattcttttctgttgattctaaatctttagacaataacttaactcttttaaccaactgccaatcagaaaatattttaatctacccatgacctgtaagcacctcccccattttcagttgtcccaactttccagaccaaaccaatgtatatcttacatgcatcgattgatatgttatgtctccctaaaatgtataaaccaagttataacccaatcaccttaggcacatgttatcaggatctcctggaggttgtgtcatgggccattggccactcatatttggttcaaaataaagctcttcaaatattttacagagtttacttcttttcattgacatgatattgagccttctaatccattaacttgttacagcttcctacttaatttctttctactttaatttctttcagcaatattttatagttttctgtgtagaagccttgcatatctttattttccctatttaatattttttgatgctagtaaaattttaaaaatcatttcctaatttgatgtggctgatatatgcagatacaattgatttttatatattgactttgttgtatacagtggccatgctaaattaactattattaattctaatagtcaatttttgtagattcttttggaatttccaagtatacagtcctatcatccacaaaccaaaacagttttatttcttgctacatattacatatgtcttttgtttcattttcttgtcttattgcactgactaggaattccaatacaatgattcataaaaatggcaatagcagacatccttgcttcatttttgacaccaggggcaaggtttttagtgtttaatcattaaaagtgacatttgtggttagcttttaaaaatactttttattattaagaaagttactttctatttctactttgcaaaggattttttcatgaattggtgttaaattttatcaaatgctgtttcttaattttttgagatgatcatatttattttctcctccatcctgttaaaatttatacagaattccactatgttcagagaacatactccatatgattttgactttttgaaatttgttgagacacattttatgacccagcttacagtgtattgtggcaaatgtttctcatgtacttgaaaagaaactatacgtctacagttgttcagtacggtgttctatatagaactggaaaattggaaattaagcaattcactaccgattaacctatgcaataaaaaaaagtcatgaaacttaagtaaagcagcgcttagagaaaaatttataaccttaatgcttacgctggaagaggaataacatttcaatttaggattgttttatttttattttccttttgaaatgacgcttctaatatagtgaaatgccttttcttatatataacagtgcttctcaactgaggacattagcaaggtctaaagacaattcttggttgtcatgattcagggcggggaatgttgctgacatctagtgagtaaaggtcagggatgcttataagcatcctgcaatgcacaggatggtccctcacaacaaagaattatccagttcaaaataccaatagtgctgagttgaaaaacccttttatgtaataatactttttgccctaaaatctacattgatagtaatagttagtagaacctgatgtatcttttatcctttgaccgtcaactttttgtgtgttcttatactttttgtgtgttcttatactcttttaagtataatataactggatttttatttttatacattctgataatattttatttaacttgaagaatttagtccgtttatatttaatataaagatggatatatttgggttcaaatctgctaccctacaatttattttctttttgtaaacatatattttccccattttttctcttatcttgtctttcttgtgataattgaaatatttctaaaaattgtttcattccctcccccactggcttgttacatagggattatttgctatttttttagtggttgccttagaaattacaacatgcatttttaacttattatcgtttactgcatattaatacttctaccacttctcagaaaacacaagggtctttgacactttaatttacacagtccgtctcccttgtatgatattgttgtcttatatttatattctagaaacattttaaaccttacattataattgttgttttaaacaggcagtatattgatttatattttttacatacttacccattctcctcattccttcctgaagtttcacatttccatttgggaatattttccttccacctgaagaaatccctttacagttttgggttttttttttttttctgcaagagatgaattccctaagcttttgtttatttcaaaatgtcatttttgttttatcttcattttgaaaatattttcctcagtataaaatgctaggtagactgttttctttccacactttacagatgccattccatcattacctagctttcatgaattctcttaaaagtcagttgtaaatcatattgctgctgctgtgaacatgtttctttttttctggcaacttttaagatgtttttgtctttttcatcaattttattattgtgtgcatacgtgtagttttctttgcatttatgctacttaatgatacataaactcctgcctctatggtttgatatctcatgggtttgtgaaacttctcagccaatttatcttcaaatattacttatttgacacattatactgttacatggatccattttctctcttttctctttctggaactccagttacatatatttaggccactcacaattttccatctgtatcatatatttcatacttttcattcttttttttccctttgtgcattaatctggatagtttttgctggcctatcttccaattaaacaatccttttactgagttctaatctgttattaaaccatctattgaattattaaacttagtaacaggaatttgaattagacaatttctatttgattcatttttattggttcttgctctctgtgaaatttttaattttcttctctattttgttgagcacattaatcatacttatttgaacacatgcctgtgtctgacaaccccaaatctgaatcatttgtaggtcttgttttcccccttgggtttttgttttgtttgttgttttgggggtttgttttgtttggagttttaggggtgtggcagtttgttttggttttagtcttttggtcctgtttcctatcatgccagctaattttttctatgttaatgtataagcaaccctctctgtgtataagtccacagagaagatttaatttttttttcttgaagacagatggagaactattagatcatctcgatccaggcaaggtaagtctacttctggttttcccttgttcctagttcttgaccctttgggaatctcaactgaaagcctagagtatttaccagagtccctcctcctgaattccagttgagccttctcagcacagtgactctaccctctctgcttagctttttaccgtcttgcagctactttctgcttagttaatcagcatctcatcccacatatgtacttcttaaaatgtgacaaatgactgtaggggaaattgcaggtagaatacggggctcaatattttatagtaaactttcctctagtatcctgctcttcaagtcctgactgcctcaggaaacttgaaccctaatatttgactcctagcccaatgagtatccttctacgacccttctgttcagattctgcaccctgccccacaacttgtaaacgtcccaaaaggaaaaattgatagggaatgtaggcctcactttaatgcattctccctctcttgggatcttgacctgtcaagtcctgactgccttgatttccctttgctgcctttaaaaatgtctgttttctagatgttcttagcaggagagttagtctgatactagctactcaatcttaatcaaaagcatgagtggtaattactttttaataggctacaagcaatacaaagttaagaactaattggatttattaaattatttggttaattaaactaataactaccttgaatttccacagcactgctcttccaatgatttcaaagtattttagcacattaacaaaggaccattactagtttcctccagctctaacttataaattttaaattgatgtaacagaagaaaataacttaagttcataggcatgaggtatccagaaaaattagataaaaagaggtactaaatatgctgattgccaaaatcatcagaatgatttgaaatcccaagaaatagactccccctaagtacactatgattcatattaagcttgtagttgcccatatcctctggtgttctagagggatatggaaagtatgtagcatgtgcttagtgctggtttggttacatcatcaaacagagtaagcagattggtatcaaggcttctcagaaagtttttagaaacataattatagtaaaataattgtctgtaagacttatgagacaacaaatactgtcattaaacattggtttcttatgtaagtggaatcgtaacagtattacaaaccatattctgtttatccttttaggtttactgtagcagtagcctttgaagtca

SEQ ID NO: 97305 - DNA, 29062 bp, Homo sapiens
tggtctccatctcctgacctcgtgatccgcccgccttagcctccaaaagtgctgggattacaggcgtgagccaccgcacccggccatcagaggatttctttatggtggacactgaatattgtaaaagagatcctttcttccagtaagtcctaagcagttcacttcccaatgaatgcaaggtggaagatgggggcctcaccagacacagcctccaactgcttagtgagagcatgcatgatgacatcattctccacgatatagcccatgtcatctaaattatccttatcaaacattatcagggcctctgagcaggcgtcccacacctggaaacacaaaaggaaagtctgcattaaaaccaagagggaaacatcactccaatcagaaacaatattgctttcccaagtgacagagcagaaaatcacaatttgtcagcctctctggtaggaaaatataaaatgagaagaaaattctcctgggaatgcttctccccacttcctcggactgaatgtgaaccttgtctgattcctcctacattcacagaacacttggagaaagtggactccgatatcttaagacagaccaagacatcttgacaaaattgaaaagataaaggggcacctgcattcgccgaaaggctctgtatctcatgttgcagatatggtcccaggcaccaaaacctacaaaagaaaggatctatagaccagagtgacttcacaaggacctgggctcccccttgtccctccatcctgttacgtaagaggttgttttcagtgttcttcaataatactctccacttctatcttgtttgatgttagtacctaagctactctgttccccagttccaggttgtatagcatgaaaaaagacccagcttctgccgggcgcggtggctcatgcctgtaatcccagcactttgggagactgaggcgggcggatcacgagatcaggagatagagaccatcctggctaacaccgtgaaacctcatcttcactaaaaaatacaaaaaatcagctgggcgtggtggcgggcgcctgtagtcccagctacttggagaggctgaggcaggagaatggcctgaacccgggaggcggagcttgcagtgagccgagatcgtgccactgcactccagcctgggcaacagagcgagactccgtctcaaaaaaaaaaaaaaataaaataaaaaaaaaaaagactcagcttccatgatcaaaaggtcaaatcacataaagtaggggaaattaaaaacgaaaaccaaatccatgtattttttttttttttttttttgagacggaatctcgctctgtagcccaggctggagtgcagtggcgggatctcggctcactgcaagctccgcctcccgggttcaccctattctcctgtctcagcctccccagcagctgggactacaggcatccgccgccatgcccggctcatttttttgtatttttagtagagacagggtttcaccgtgttagccaggatgatctcgatcgcctgaccctgtgatccgcctgcctcagcctcccaaagtgctgagattacaggcgtgagccaccgcacccggccccaaatccatattgttctttttcttcatcatcctgctgaagttataaacctcctaaagacaatttttaaaaaattatttttacaaaggatttctagtaacttgaaaccatttgttttttctttttcaagatacaaggtcttggtatgttgcccaggctagacttaaactcctgggctcaagcaatcctcccatctcagccttccaagtggccaggactataggtacacatgactgtgcctggcctatgttctattttttagctcttcatagcactgaacagatttattcattgaggaaatatttactgagcaccgactatgtgccaaatacagtaaagtgggaaaccaatggacaaagtccttggccttctgcagttaacattctaattggagagatggacaataaaaaacaaacacataatataatgccaggtagtagtaagcattatgaagaaaaatagagcagggaaaggggctagaaagtgatggaagagttcaatttgagatggggtggtttcagacaggatggtctgagggaaacatctagcagacctaatgacaatttgctaactggttccatgtgcacacattattcatctgcaccccaagggaatttcacgtgtaagctccctagcttgctagaaggcttgactcaggatgaagagagccctgctattcaaagtgaatgttcatgattagttcatatgatttcagttccaccaattcataatgacacaacatcacaagtgaagtcaacatgatggacccacatgcctcaaggatgcattcctcagacagggagttgaggcagtagcaactgcaggggtccacatcttcaactctgccctagactaccaatcccaccccctctctccacccacctcagtgagctccctccttgtcagatgctctgatgactctgccccatgggatacactagaaagctaagtgggaaaggagattggatctttgaaggaggatcttctactcactactgagaagcgttgcagagccaggggaaatggagctgaccctgttgctgtaagtttctgacaatttctccagtactttctttggacctgcttcgagcaacaggattttcttgtcatgaaagtgaatatcatatccttaaaaaaagaaaatttatatcatcttaggaaaatcaagaatttcctttcccattaccaagagaaacaacagagtaaccacttaacccttagaatatgaatttcttacagagaacataaacactatacccatgcagagtcctaagcaataacatataccaccattttagctatgagaaccaccctgcccacaactgtaagacttctccaaagaccactacatgccacgtgccaagaagcaaataatggcaaacacctaactagcaaacagaatgccctagaaaggaaaaatgaagtaaaaaagttagactacagtatttaaacaccagttcttttcaatctccagagtattaagtcactaaaaattacaactcctgttcaaaagaaaaagtggaataaacaagcaaaattcaatgcagtctcaagattaaaccaagaataaagaattagagtttataaaggccggtgcggtggctcacacctgtaatcccagcactttgaaggccgaggtggacagatcacctgaggtcaggagttcaagaccagcctagccaacatggtgaaacccgtctctactaaaaatacaaaaaaattagccaggtgtgatggcgggcacctgtaatcccagctacttgggaggctgaggcaggagaatcgcttgatcctgggaggaggagattgcaccactgcactccagccagggcaacaagagcaaaattctgtctcaaaaagaaagaattagagtttataaaagaaaacgtgagccaggcatggtggctaacgcctgtaatctcagcattttgggaggccgaggtgggaggattgctcaagcctaggaattcaagaccagcctgggcaacatggcgagaccctgtctctacaaaaaaaaattttttttaactagccaggcatggtggcacacctgagctatgtttgtgcaactgcactcctacctgggggacagagcaaaaccctgtctcaaaaactacaaaaaagaaaagaaaagaaagaaaggtcaggcacagtgggtcacacctataatcccagcactttgggagactgaggtgatggatcagttgagctcaggagttcaagaccagcgtgggcaacatggtgaaaccccatctctactaaaaacacaaaaattagccaggtgtgatggcgggcgcctgtggtcccagctcctcagaaggctgaggcaggagaatcactggaacctgggaggcagaggttgcagtgagctgggatcctgccactgcactccagcctgggtgacagagcagagactctgtctcaaaaaaaaaaaaaaaaaaaaaaagttagctccagccatacagacagtgagcggtccatcttggcagcttttgctgtggaggatggggcacagggacatgctctgtagagcatgctctgtaaagggcactatcttcttttttttttttttttttttttgagatatcgagtttcgctcttgttgcccaggctggagtgcagtggcgcgatctcagctcactgcaacctcccccttccagtttcaagcgattctcctgcctcagcctcccaagcagccatgagaaccaccctgttacagaagtctatgatctgctttaagttaaattttgtgtatcttgtgagatgaggatcatagggtggaacagctgcccttagatcagggtgtccaatcttttggcttccccaggccacagtggaagaattgtcttgggtcacatataaaaaaacactaatattaatgatagctgatgagctaaaaaaaaaaaaaaaatcacaaaaaaaaaatctcataatgggccaagcatggtgattcatgcctgtaatcccagcactttgggaggaaggggcaggtggatcacgagatcaggagttcgagaccagcctggccaatatggtgaaaccccgtctctactaaaaatacaaaaattagccaggcatggtggcacaagcctgtaatcccagaggttgcagtgagctgagatcgtgccattgtactccatcctgggcaacaagagcgaaactccatctcagggaaaaaaaaaagtgaaaagactacaaaatggaagaaaatatttgcaagtcatttatcagataagggacttatacagaataaacaaaataatggccaggcagggttgcttatgccggtaatcccagcactttgggaggctgaggcaggtggattgcttgagcccagaagttccagaccagcctgggcaacatagtgagacctcgtctctacaaaaaaatacaaaaatcagccgagtggtggcgcattcctgcagtcccagctatttgggaggcagaggcaggaggatcaattcagccagggaggttgaggctacagtgagccgtgatcgtgccactgcactgcagcctgggcacagcggaagaccctgtctcaaaaaataaaaataactcttaccacagtattcaagagacaaactgctcaattaaaaaccgggcaaagggtctgaataggcatttctctaaagaagatatacaaatgaccaataaacatatgaaaggatattcaacatcattaatcattagggaaatacaagtcaaaacctggagatcccactttacttacacccactagaatgtctataaacaaaaagacaatgacaagtactgtccaggatctggagaaactggaactctcatttataaataaccccgggaaggcctgttttcccatgagtagaacagactctgaacgcccctcccacttttgaccctaatggaccctgaaggaccacacgcattccggcgtgccctggggttcctctaggaggggaggggagaagcgtcgcgagacctgagaaattgtctttgggcaagtcgtgctagggctctcacggctctcatcgtgcctccgcggcccggtttccggccactagtagcctggagaagggcttacccaaggcacaggccatggcagcgcccaccaggcctccacccgacaccaccacgtcatacacggtgtctgttgaggcgccggaccacctgcgccaggacaccagcgggccgctgtggggagctgcacgcacagccccgcatcggctgacaagccgggccgccatggtgcagacctgcgccgtcgcactcagaactcccgcaggcccacctacgtagtgcgtccggagcagagcactccaatcccgtcccgcttccgcggcgtcctcagaaccggaaataaaatgcgcggagaaaataggccaatcggaaaacgaaccttgcctcctcgggcgggatggatcggaggctgccctggaagccaaccagacgccaaagctagaaaggggtggaccctggccccgcatagctctcgctgccaccgctgctgccactatcgctgtcactgtcgctgctgcctctgtccagctgaaatgaccgtggggaggcctgagggagcccccgsaggcgcggaggggagccgtcaggtgaggagagraaagagactgcccccgggmaaggaatcccggagaggaaaytgttgggcgttgccttggagasagrcagcaggggcgtgtcacggaggggcgtgggattaaaatgagcgtttagggaccaggaggcggactctgacttacagacctgaacctctcggactttatacgaggctcttgataggcaatgtcactcagttttcgcttatcctcttagtactctatgaccagtagtacaattgtcgtctcatttttgtagaagagaaaactgaggcacaaagagatkaagaaaattgctccccaaatttggccgggcgtggtggttcacgcctgtaatcctagcactttgggaggccgaggcgggtggatcacctgaggtcaggagttcgagaccagcctggccaacatggtgaaactccgtctaaaaattwaaaaaaaaaaaaaaaattggccaggcgcgctggctcacgcctgtaatcccagcactttgggaggccaaggaaagcggatcatgaggtcaagagatcgagaccaggctggtttccatggcaaaaccccgtctctactaaaaatacaaaaattggccgggtgcggtggcttactcctgtaatgcagcactttgggacctgaggtcaggagttcaagaccagcctgaccaacatggagaaaccctgtctctactaaaaaaaatacaaaattagctggacgtggtggcacatgcctgtaatcccagctactcgggaggctgaggcaagagaattgcttgaacctgggaggtggaggttgcagtgagccgagattgtgccattgcactccagcctgggcaacaagagcaaaactctctcaaaaacaaaaacaaacaaacaaaaaaatacaaaaaattatctgggcatggtggtgcgcgcctrtagtcctagctactcgggaggctgaggcaggagaatcacttgaacccgggaggtggaggttgcagtgagccaagattgcaccactgcactctagcctggcgacagagcgagactccgtctcaaaaaaaaaaaaaaattagccaggtgtggtggcgcgtgcctccagtgatccaccagccaaggcctcccaaagtgctgggattacaggcgtgagccagtgcacctggtggaccccaaactattaaaggcaaaaagtagattggcagttgcttagggctggtggggtggggtgtggagggttaggggaaatagggagtgaccactaaagcgtgtggcatttcttttaagggcgatgaaggtgttctaaaattgtgatggtagttgcacaactctgtgtatatactaaaaccactgaattgtacactttaaatgagtgaatatattgtatagaaattatgtcttaataaagttgtctttaaaagaaaagaaaaaacgtgcccaagatcacacactgtagcagagccagggctagggtgcatacatatctctgactcttaccctggattttagtaagcctggctcctcatcaatcaagtgtcaattcaaaattcctccacaatgaaaaataaaaatcagcccaggactgagaaagtataactcagactgtcataggcatagataatgccaacggcaagagcatcaggaaacagtgtttctctcagggccataacataggtgcaaaattactaacaccccttcttccaaaaggcttactgatcaattacttacccaccctactttattcttctcaccttttgaataagtattgccgttgggcggggcccaatggctcacgcctgtaatcccagcactttgggaggccaaggcaggcggatcatttgagctcaggagttggagaccagcctgggaagcatggtgaaaccccatctgtacaaaaaatacaaaaaytagccaggtgtgatggtgtgtgctgtagtcccagctactcgggaggctgaggtgggaggatcatcacctgagctcaggaggttcaggctgcagtgaggcatgattgcaccactgcactccagaacctgggtgacagagcaagaacctgtctcaaaaaaaaaaaattgctcagtcattcrcttaactaaattgtccccacttcatgacagcaccattccagagttgatacctggttccctgaatcaatcagggaagccaaccctataaaaatcacaccctcaaccctaagttccctgtggttttccgtagtgtcctgcagcaagttaataagcctaactgatgtactgattacaagtacattcctaataaccttaatctgatggactttatcaaccaaaaagctttccataggcactccatctttttataacctcacagttgtttatggttttcacagaatttatcatcatcttatattgtctgtctcctcttactacagtgtaagcttcrtgagagtaaggaccttgtttgtcttgttctcagccaaatgcccagtgcacatcaggcacccagtaaatattttatgaatgaatggagtactgaaaaagttaattgtgtgtcccacttcttaagacattgctcttccagccagaccatactgtctgtcttgttaatcatccattccttttttttttttttttttttgagacggagcatcactcttgttgcccaggctggagtgcagtggcgcaatctcatctcactgccacctccgcctcccgggttcaagcgattctcctgcctcagcctccccagtagctgagattacaggcacccgccaccacgcccaactaatttttgtatttttgtagagacgggatttcaccatgttggtcaagctggtcttgaactcctgacctcaggtgatccacctccctcggcctcccaaaatgctgggattacaggcatgagccactgcacccagccatcatccattccttgacagagtgcaaattagctagaacatgaggaaagcagaggagtagaaataagggaagggagagaaggaagatgagcaagaagtaggttaaaacccaagtaagggagagtgtggccatcatcatgggcaggattcctggagtgcaggggtcagaaagcctggtgtaggtgaggtactctgtaaaagcttactgcactgtatggcatagggaaccaacttcagctcttcacttccctctccatcccttcaaccaagcgcacttcatagaccaagttgtgaaatttctttagaccaagaaacacaccttatttttaaaaattcctcccaaagtgttgggattacaggtgtgagccagtgcatctggcagacyccarattctccccagtccctaatatacagaagcttattcaaagcsaaattaagttatgatttgaatacctttgaaattattgtttgacccacagcctatttctattctattttagatatttccccccgagtccttcgcagacacagaggcaggagaggagctgtccggggatgggctggtwttgcccagggccagcaaacttgacgagttcctcagcccagaggaggagatagattctacttctgactcaactgggagcatttaccagaacttacaggaactgaagcagaaaggsagatggtgtctgttggagtctctctttcagtctgacccagagagtgatgaaaacctctctgaagatgaggaggacctggagagtttcttccaagacaaggacagggggatggtgcaggtccagtgcccgcaggctctgaggtaaggcactgcagctccacggctgcctcactccacacctccacacaggtcacatcgtgtctctgggcttcatcttcctctgtaaagcaaagagcacttctgcaagttgccatttactgaggctctagctgagaatcagcttttggttccaaacaggtgttctgattcctccccaggaatcctgaattactttgggcaacacttagtccagtgatgcactggaattaattaaagggcagcctttcctcaggtgcaggggctcacacctgtaattccagcactttgggaggctgaggcaggcggatcacttgaggtcaggaattcgagaccagcctggccaacatggtgaaaccccatctctactaaaaatacaaaaattagccagtcatggtggcgtgtgcccgtaatcccagctactcaggaggctgacgcatgagaatcccttgagcccaggaggtggtggttgcagtgagctgagatcacrccactgcactccagcctgagcaacagagcaagactctgtctcaacaaataaaaataaaataaaatttaaaaatgggccgggcaccgtgtttacgcctctaattccagcactttgggaagccgaggtggctggatcatgaggtcaggagttcaagaccagcctggccaagatggtgaaaccccrtctctactaaaaatataaaaaaattagccgggcatggtggcaggtgcctgtaatcccagctactcggaaggagaggcagagaattgcttgaatctgggaggtggaggttgcagtgagccaagatcacgcccagcttgggcaacagtacaagactccatctcaaaaaataagtaaataaataataaaaaataaaaaaaaatacagggaagcatttcctaaatacactttccctgagaatgacaacaaagtacctttatcttggtcaagccttagaaagtaaatattgartgagataaagtgtacattatctcattactttatcttatttaatatttactttctcctccaataacctggtaagtagacattaatttttgccactctacataggaggaaattgaggttttaacagaactttgctcaaagtttgaagcaagatttaaacccaggtctgtctgactctaaagctctactctgctcattgttctctctctcatatgaaatattagagtgcaaagtggcagttcttggatcaattctgagaagagactttccattagggctgccaggattgtctgtgggaaggtcatggacatagaggcctgtggggctgtggtgttaggctgagcagccagctgtgaccagtgggaagggaggactggggaggaggtctggagggagcagggcctcctgactgccctgtcctccactcacagatctgcttttttcccaggtgtggctccacaaggcgctgcagctccctgaacaaccttccctccaacattcccaggcctcagacccagccaccctcaggctcccrgcctccctcccagcacagaagcgtcagctcctgggcatcatccattactgtccctcggccattccgcatgacgctgcgcgaggcccggaagaaggccgagtggctgggctcacctgcctcctttgagcaggagaggcagcgggcccagaggcagggtgaggaagaggccgagtgccacaggcagttccgggcacagcctgtgcctgcacatgtctacctgcccctctaccaagagatcatggagcgcagcgaggcccgaaggcaggcagggatccagaagaggaaggaactgctcctctcttctttgaagcccttcagcttcctggagaaggaggagcagctaaaggaagctgctcgacagagagacttggcagccacagctgaagccaagatctccaagcagaaggccaccagaaggattcccaagtccattctggagccagcccttggggataaactccagggtaaagacatccttgccaccttgctgcctcctgcctcggggaaycaatcccaccatagggatttagtcagggcccagggatctgcctggcttggagatttgctgcttgggtggacccactagaggctgcacgcttagtgcaggccattggggagggttaggtctgtctatacaatcaggacctgtatggtgccaggagtgagaggtcccacagtgtccccaaggctcgtcctgttgacatctaagtgaatgcacatgagggcctctgcaccagcacaggtgcaggaatagagaaccagtgagacacctgaggaccagcttgggctcatgccaccaccagcacactgccctgagatgctcccccatggctccttcrtcctggtgaggtagtgtcaatcgccgaaattacctgggggatgattatttacacatttccaaaagtatagctccaaataaggggctcaggctttattcacttttcggtagcatgtgccatgctccaggcactgtgccatggtgaacacacagacatggagtttgtagatatgtgaggaaaacagataaagacaaatacatacaaatgtggcgagttatttacaaggattaaaaggggaagcatggragcatatatcaragggacctaacccggggattggtgaagcaagggagcagttagggaaggtcccctgagaaagtgggccctggggctgaactgaaggaggggcgaagagggaggagaagtggagcaggcagaatgtggcatggaggggagagaaagcagagcatctgcaagggatggaaaggtcgagggctgagagaagagggagtgggaaggaagaggcaggcatgggccagacatgaggagctttgcaagccacgttggcgagtctggacttcatcccaagggcacagggragccactgagggagtgaggcagggtggcccatgatcagaaatatagttcagaaggatccttctgattgctgtatagataatctgagagggcagcaagactggagggatgttgagccaagaggaagctatttcacaattcagtagagaaattgtgcaactggttgcagggatgaaaaaacgaggatggactggagagaggttaaagaggaggaaatgacagaacttgtgactgatgagagacacggaggagtcagtgatgtgggcaaagggcctgggcagctgggtggatggtagggcctttctctcagatggggaaacctgggagaggagcaggttactggcccacttcctctgcttcatctctgaagaagcaatcatagaaagtgctcagtaagtgtagatggtcactgcttctgcagcctgattgacacaggcagtggtgttctggatgacatttattaacaagctctccagaaaaaaaaaaaaggaagctggtttgtaatgtttgttattttctgtggcataattactcctattcaggccatctgcaggcatctcacaggatgttaacgtgtcagaattcctgaaaagttcctacttgcctccagtaacacttacagctagtgtgtaaaagagggaaagttctccaaccctgtaggtttcttgcttggtcctttcttacccatcaccatcctttctccacagaagctgagctcttcaggaaaattcgcatccaaatgagagccctggacatgctccagatggcctcttcccctatcgcctcctctagtaaccgggctaacccacagccccgcacagccacccgaacccagcaggaaaagcttgggtttctgcacactaacttcagattccagcctcgggtgaatcctgtggtccctgactatgagggcctttacaaggccttccagagaagagcagccaaaagaagagaaacccaagaggccactcgcaacaagcccttcttgctgaggaccgccaacctgcgccaccctcagcggccctgtgatgctgccaccaccggaaggaggcaggtgagagcccaggcagctgtgggagggtcagggctgcggyctgaaatacagggtggggccaggtcttcctggaaagcacttctcaacaaggttttcctatcttttttttaaacaccagctcagttgtaagcagattcactttcctataaactccagaccacagcccagcctgggcaacagagaccccatctctaaaaraaaaatacaaatatttgccacatgtggtggtgtgtacctgtagttccagccattcaggaggctgaggtgggaggaccttctggctgcagtgagccaagatgatgccactgtactccagcctaggcaacagagtgagaccccatctaaaaacaacaacaaaaaacaggccaggcgtggtggctcacgcctttaatcccagcactttgagaggccgaggagggcagatcatctgaggtcaggagttcgagaccagcayggccaacatggcaaaaccccatctctactaaaaatacaaaaattagctgggtgcggtggcgggcacctgtaatcccagctacttcagaggctgaggtaggagaattgcttgaacctgggaggcggagattgcagtgagctgagattgtgccaccgcacgccagcctggacaacaagagtgaaagttcatctcaaaaacagaacacaacagaaaccatagggacacttcttttcctcccttactgtagaaggatttcacagaaataagtccaagcaggcttgagaggcaaggagttgggatcagttgttgatgtctctataccaattccaaggaactcttctcatttgactaaaaactttaggattgatatccaagtcttggcttggttgtgaaayttgagatctctttatccttrccttattcccaggaaaaaaaatgaagattctcattttcagtccttcagtgaagctgaatcctagtaaagatagaaaatggctgggcgcggtagttcacacctgtaatcccagcactttgggaggccgacacgggtggatcacctgagatcaggaattcgagaccagcctgaccaacatggtgaaaccccgtctgtactaaaactgcaaaaatgtagctgggcatggtggctcacaacctgtatagtcccagctacgtgggaggctgaggcaggagaattgcttgaaccaggcagctggaggttgcagtgagccgagattgcgccactgcactccagcctgggcaaaagagcgagacgagactctgtctcaaaaaaaaaaaaaaaaaaaaaagatagaaactaatcacacatgctgtcccaccaataccaacctttgtttcttctaggattccccacagccaccagctacacccctgccaaggagtcgttctctgagcggccttgcttccctctctgccaacactctccctgtgcacatcacagatgccaccaggaagagggaatctgcagtcaggtgagtggtcaggctgcacgagacycatgctctgattctggccccaaatgctggaaacctccctgccaaggggcctcctttcctgttatcagagatacctcaaggggtcaaagggaattttctgatcaggactggaacaattgcggttctccacacctggtgcttggagaacagctagccatcattcagcacatattcatagtgggcttattctgtgccaggcacagtgttaaggctggagatcttagggaacctccagtttattatctagtctgaaatacagaaaagcaaagaagcaatggccatattttttgagtagtgcaatgatggggggtaaaggggactgtgagggcactgggcagcctggagcaggggggtcttgtcttgtggaatagatgtctaaagtgaaactgaagaacaaggaagagttcgccagacaaagcctggagagaaggaaggttccagacagagagaacatggataaaagcccatgggtgagaggaagggagtagtgaggaacaagaattcagagaagcatgctagcaggtggctgaagttgccgcaaakatgagacatccrttgcatagatttgagattctctgagattcatcttgggaagatgtcagagtctgttgggcagcaagagcctgcttatttttaactcttcaactgacctgattctgttatgatgttctcattaagccagcccccagcaagggttcttccaccaggcttctgagctgaagtaggcaagagaggtcatggtgtaacagcagcttaggccagggagaggactaatgtcttactgccttcccatggggcatgtagsggagtactcagaacctacttggatcgttaagccccacagcagggattgtagaagagtatttacggtccaagggatactcctttcttcttcagacttcagttagacctactaaatcagggctaattaattgctcagtatcctgagggcccaagaacacaggcctcctgaacaaagaggctggccttcctrtagaggacatccacatctgctttccagccacagggaatctgacatattaacagattaaattttcatgtccttcttcccagtatgtccatttgaatataaacatccaaatataagagtcttggttgattttccttttggaagaactcaacatattactttgtagataactgaacaaactaagtgctacaagttgaacccaaatagtctgcactgagggaggctcatttccagttctctctgaatgtgcagatttgtattcccaaaggaccatgaacccagacaccttccagcccactgtttmcagcagagtggtcaaggccagaggcttcggagtcagaggtcctggtccaataggggcttttccactggcatgctgggtagctttgagcaaggggcttacctcctttgagcctcaatcacctcccctataaaaagggaatttagtatttacctcataaggcagttatgaggacaatgtgaaatgtaatggtacttggttcataataaggagctcagtaaatggtagctattagtattattttgtatccagataggcgaagacctattgaatgttggactrtttaagtaaggatatatatattttttttcgagacagagtcttgctctgtcgcccatgctggagtgcaatggcgcaatctcagctcactgcaacctctgcctcccgggtttagtgattctcctgcctcagcctcccaagtagctgggattaccggcacgtgccactacacccagctaattttttttgtagttttggtagagacagggtttcaccatgttgaccaggctggtctcgaactcctgaccttgtgatcagcccgcctcagcctcccaaagtgctgagattacagccatgagccaccgtgcccgacctaagtaaggatattttaactgacgtttctccagttcagtaaatgcacttctagggtaggaactcactgtgtccctagtgctggaaaggcttcatctgccagtgcatttaatcctagaattttattatttttaaaaatggcagttgaggtaaattacatgccccattcattaaaaacaccaacttactttccagaaaaggttactaagattgctttattttatttatttatttwttattattttttgagacggagtctctcactgtcrcccaggctggagtgcagtggcacgatctcggctcactgcaagctccgcctcccaggttcatgccattctcctgcctcagcctcccgagtagctgggactacaggcgcccaccaccgcacccggctaattttttgtatttttagtagagatggggtttcacagtgttagccaggatagtctcgatctcctgaccttgtgatccgcccgcctcggcctcccaaagtgctrggattacaggcatgagccaccatgcccggctattttattttattttattattattattatttttgagacggaatttgatctgtcgcccaggctggagtgcagcagtgcgatcttggcttattgcaacctctgcctcccgggttcaagcgattctcttgcctcagcctcccgagtagttgggattacaggtgcacaccaccatgcccagctaatttttgtatttttagtagagctggggtttcaccgtattggccaggctggtcttggactcctgacctcaggtgatccacctgccttggcctcccaaagtgctaggactacaagtgtgagccaccacacctggcctaagattgcttttcagtatacccaggttggtaatctatactctttttctgcctccttcctttagaagtgcacttgaaaaaaagaacaaagcagatgagagtattcagtggctggagatacacaraaagaagtctcaagcaatgtccaaatctgtgaccttgcgtgcaaaagccatggatccccataaaagcctggaggaagtgttcaaagcaaagctgaaagagaaccggtcagtgtcctctatgtgtcaaaaggggtgcttgccttgggatccaacagaccactggcctattgccagaaaatgcaaaatagagttatcgaggtaggtaggctcctgtaatcacagcagggtcatgattttccaagtcagataggaatttacagtgtacacgagagttacactgctttactggaaatgaagggtaytctggattagaaaagatgaaattctttctaaaagtcttgctaattccaggaacaatgaccgtaaaagagcgaaagaatataagaaagaactggaggaaatgaagcagcgaatacaaacaaggccctatctctttgaacaagttgccaaggtaaaactaaaccatcatttgttttctttctgccttagataaaaggactctgaaaaattacaaaacaattttaatatgtgggtattaaaattttccttgaggcccagaaattctaatttcactactaccttcttttcccaaaataaatagtacaatagagaatgctgcttgtgttgatttcatccaagagtggactccaaaggcatcgataaagggatatttcacttcctagagctttcactgtagtctaccattcagatttcatcagactgggcattagaccccagagacacagggaccatttggctctttctatgctctggagccactgttcacagtgctggaaaggtatctctcctctggcagtgctgctggccctgggcctccccagcctctagagctgtggtatatttataggtctccaagcattaggatgcccacaaacaccctgcaaggctttctctagactaagtggctttcaggctggaagcctgaaatttttttttcttcttttattttgtatgcatgtgtrtgtgtgtgtgagtgtgtgttccttatggagcagggctaacccataggcagtgtacccgaagtatcctggaagagtatcattttaagatattctctgtagacttttagggatgttggactcagctgagatctccgtaaggatgtaaggatgctctgtttctactgcattaggctctgtggatctctttcctctccagtttcagacaagttggggttccatagtgacctagttccaatggcagggcattagctccatcttatagttagtacattgtctaggcatttgctggctccacttcctcctccctccataaatctttctcctctcacacacataagcacacatggtcttggatttacttagcaacctgcattgttcaaaatctcatgcttctttatgttaatgttaagcaagctcactcttcagatctcaacagatctttcacctctctaggaaaaatacaaagtactctatgattttgttcttgaatacttaaacaaaaaataatattctgctggtccacatgcagaccatctgtccttccactaagagtcttggtgtagcttattttctattttattttagtgttcctgataatggtttgttgctttaaaatcttaggtttttagtccatccttttaaatctgggtctcatttgtctcccaaaagtctaagtcattgcttttcaaaattgtgactcccaaatcaacagtttggcatctctggggagtgttagaaatacagaattacagtcctcatctgacacctaccaaatgtgaaatctgcattttaacaagacctcaggtgatttatatacacattaaggctggaaaacaagggttaaataattttcttgcaaatctatgccccacaataagggtggtggtggttgtggcagtattgtaacaatactgattaagtartttagaattgtctggtaattcataagacagctacaacagattaatttccatcccacaggatctagccaagaaagaagcagaacagtggtatctagacaccctgaagcaggctgggctggaggaagactttgtgagaaacaagggtcaaggcacccgrgctgttcaagagaaagagaccaaaatcaaggattttcccaggtaacctgaaatgttgctgtcattctgcagctctctaaattgtcatacccagtaataccactgggaggaaactttagaatagccactggtattttgagatcataatcctgtatttatgtaacattaataagtaatccagagatctccaagtaacacatttgaatttagagagtgrtgcagttgtgaataaaatctgacaaattatgtttcgttttcttccattttgaaacagatcattttccaattccagttccaatttcatgagctgaaactatttctactttatttttgaagaaaaatcatgtatattttgacttcttataaaactataaaactgtttttctagcattccttaaaggtagctcattagtatcaccttctccataaccttttttttttttattttttgtattttttttttgagacagagtctcrctctgttgcccaggctggagtgcagtggcgcgatttctggctcactgcaagctccgcctcctgggttcacgccattctcctgcctcagcctcccgagtagctgggaytacaggctcccgccatcacgcctggctaatttttgtgtatttttagtagagacggggtttcaccatgwtagccaggatggtctcgatctcctcacctcgtgatcyaccctcctcagcctcccaaagtgctgggattacaggcgtgagygaccgcgcccggccctccataacccattttgatattgagtcaaagggagaaaatagtatcttctctccattattctcaattgttttgtatcttaaatcctagcagcccctaccctaattcctatctcagttttatacccctagaaattttcctttacatcccatataaaatagtaataatgttgagacttttttttttgagacggagtcttgctccgtcgccaggttggagtgcagtggcgcagtcttggctcactgcagtctctgctcactgcagtctccgcttcccgggttcaagcgattctcctgcttcagcctcctgagtaggtgggactacaggtgtccactaccacgcccagctattttttgtatttttagtagagatggggtttcaccatgttggccaggatggtcttgatctcttgacctcgtgattcacctgccatggcctcccaaagtgctgggagagaccgttcttaaaccttacacagtgctttaagactttcttttttcagactgggcacggtggctcacgcctgtaatcccagcactttgagaggctgacgtgggtggatcgcttgagcccaggagtttgagaccagcctgggcaacatggcaaaaccctgtctctacaaaaagttaaaaaaaaaaaaaaaattagctgggtgcagtggcacgtgcctataatcccagctacttgggaagctaaggtgggaggattgcttgaggtgggagggttgcttcagctgggctgtccaggctgcagtgagctgagatcatgccactgcactccagcctgggtgagagtgagaccctgtctgaaaaaaaaattttttttgtttttcatgttttaatttattctgcaggttccaagaaactacaaaactcagcatcagagatccagagcagggtttagaaggatctctagaacagcctgcaagccccaggaaagtactggaggagctgtctcatcagtcaccagaaaatctcgtatcacttgcttaatcactacacttaaaattactgcttttgaaaaatattaagcagctaacttgggtttgagtcaaggcagggaaaacttgggttttgagtcatggctactgttagaggatggacaaatgaagagtagcagattaacaggccaggcgcagtggctcacgcctgtaatcccaacactttgggaggctgaggcaggcagatcatctgaggtcaggagtttgagaccagtccagccaacacggcaaaactccacctctactaaaaatacaaaaattagctgggcgtgatgacacgtgcctgtaatcctagctacttgggaagctgaggcaggagaatcacttgaacccaagaggcagaggttgtaatgagctgagatcactccacagcactccagcctgggcagcagagcaaaactctgtctgagaaaaaaaaagagcagcagataacagagaatagttcaaggaaatcaaagtggggaggctcaggtggagggatggtagcctaaagttaagggttcctgctttgtgcctcacacttagagaattaggtacagaaaagagagcacaggcccaaatgcctataaggggctagtgcagaaacataaatgcgtccatggagtgggtgtagacagtaggagatagtagacactggaaagtatcaaatcctgctggaatataggctcagagttactacatcaactacattttcatcaagccagaaatttgtatgctatcaactaatttwaaaattacttagaaatattgtatgggcaaaataaaatacatctgcatatcagatctagcccatgggggatgaaaaacttacaacttctagtacaggatttcttatcctcagtgctattaatattttgggccacctaattctttgttgagggttggggaagggaactgtcctgtacattgtagaatgtttagtagcatccctggccactacctgctagatgccagtagtacccctctccccagctgtgacaaccaaaaatgtctccagatattgcatatccccagggggcaaaaatgtgcctggctgagaaccactgctctaatataaatggctgcatgaagcaaaaactggcattctaagaatacaagtaattgccatgaacacagtctatgtactatgtgattatgcatgtcattaacaaattaagaatttaaaacaattctctcccgttatctgtttagaatgtgcctgtgtgtttatgtgagcatgaggttcattttaagtaaacttaaaatttcccagacaaccaagattttctactagtaggtgaactttggaataattttcttctcaccaataataattggatattctggctcggtgcagtggttcatgcttgtaatcccagcactttgaggggccaaggcaggaggatcgcttgaagccaggcgttcaagaccagcctgggcaacacagacctcatttctaccaaaaaaaccacaaaaagttagctggactggtggtacatgcctatagtcctagctattcaggaggctgaggtgggaggatgccttgagcgtaggagttcaaggttacattgagctatgattacactactgcactccagcctgggtgacagagcaagaccccatctcaaatcataatgatgatgagtggatattttctcagtagctgtggagacaggatgattgatagcaagagtgcctgctctaactaaagcacctttctcaagcttttttaaaaaaactatctttgtggaaaaattcaaaagtatctgtttttattgccattttctcagatgcgtcttttttggtggtgacagagtaactatcacctgggcttaagaaatgaagatgttcttgttgtttcctaagactcctcggttcagttttactggtatggaatcctaagggtaaatcaatacactattttaaagggaaagattaaattcttaatctctaagaaaacaaattttgtataaaacaagagccaaagaactgactgggctgttttgtttatttaaaggaaaacctgaatctctgcatcatgtaatttttaactttaaaaaaacaaaaacatgaaatccctcttaacatgctactgtatgttccattaacgaagaaagcaaagtgaccaagtagaagtgtataggacaagatagtacctcagcctgggccaaggggagattcaagtaatttatttttttgcagcccagtggcagagagtctcttactcaggttgctaaagggagaatgtaacaagagaattgacatcactcccttcttcaaagcaacaaggcatcttgaaaactcaacttcctggtgaagctctgttgttggtagcaggaattatttcatccatgtgaaaagacagctgagtctgggatgaaaactcttcaaaggaaaacctcccctcaacagtcagaatgaagaacttcagccaacacataatcaaattcacttttggtctatcccagaaatttgcagtgggaagagaggtaggtacagtttcccagcccacagtcattgcttcattccttgtctgatcagatggtagttagaaaagaagctctcctacatccatcttctataccaggaaagaggaagagtggcaaaagcagagtcttgtgccttcaaagattcattctggttctgttgtgggctaaggcatcctgttcccagtatacgcattttgagatcagatagagttgctcttccaggagtcagcacccacgctcatgtccgtctttcagttaaatctccttggtttagtaactgtaaaagattgaaagcaaatctagaataggttacagttgaattatagaaaaaataattcatagtaaaaagtattaagagtggaggatggagaatgcactacaggggtgaatgaaggctatctacttccaaagcaaacacatgcacggactgatagatgtcactgtggccttgggacagcactttagccatgtcataaggctggcattttaactctggcaatcaaatattctgagtctataagccaaactattgtttgtgtagttacctactcatcagtcagtgacagaggaatctctaacttacagggaaaacagaaatggtggaaccaaaatcttatacgtgtcagccaaaggataggctgaaggctcaagtaggagaaggaaataggaagaggagctgttcctttataagtactatatgagagctgaaacccactcataaaagatctaggggttccttgggcttaaaagaatgataagcctaagggactcctgcataatggcaactaccactaacattctactctatacacaaggctctattcaaaggagttttgaaataatgaaattggcttccattttaatataaaaacaaaatgaggctgggtgcagtggctcacatctgtaatcccagcactttgggaggctgaggcaggagaactgcttgagaccagaaatttgagacccacttgggcaacacagtgaggccctgtctctacaagaaaattttaaaaattaagcatggtggtacatgcttgcagtcctagctacttgggaggctgagggaggaggatcacttgagcccaggagttcaagggtgcagtgagctatgatcatgccactgcactgcactccagcctgagtgacagactgagactgttttcagacacacaaaaatgagatgggaacaattcagtaaaattcagaacaaaaacaacttattaaaatctaatcaaataaattcttcagcttgagatgtatttacttggtgatcctaatttggatgaaggtaatttatacagtagaatttaatgattgggctgggcaccatggctcatgcctataaccccaccactttgggaggctgagggaggaggattgcttgaggccagaaatttgagatcagcctgggcaacatggtaagacactgtatccaccaaaaaaacttttttttaagagtttaattatatggaatttaaagacttttaaacaaaatctaaagaaaaaattaaaccttaaagaaaccacatattccatttgatgctgtgtggcaggaaagttaagaatagtgtgtttttaatggaggccaagatccagatctttgcagtcaaacttagcaaaggtactttatgagaaatattatagaatttgtaatttctatttttgccttgatttggaaagcattctaagaggtagtcaaaactagctgggaatctcttatactggttcttgagttcaagaatgtgaactcaatgtaaatatggagccccatttagaatgacctttagtaagtatgacagcccaaaagccctggggttcccagttgggcctgtgcaatgagtcctccatctaattctcagatgtggcacaataatgagggaaaatagagattgtccacctgaaccagagaggtgacttgtagtttctgatatttttcccatggtaatttttcttcttttttttttttaaagagtttggctctgtcacccagactggagtgtagtggcaagatcatggctcactacagcctcaacttcctgggcccaagtgatcctctcacctcagcctcccaagtagctaggaccagctaattttattttattttttgtagacatggggttttcctgtgttgcccaggctggtctcaaactcctaagctcaattgatcctcccaccccagcctcccaaagtgctagccaccgcacccagcctctcatgaaaatttctgataacagatttggttgttctctgatattcttgataagctatttttatttttagagcatatttacaggaagtacaagttcatcagtagactttgatccatactgcttggtgatctccaaaaaaggtgaaacggacatgtgttgcaaatagccttcaccttctctggcacctgaaagttcttaaggaatcaacattcctcactcactggagaaatagcaagttattacctagaccttggatgaggaagaggcctaagcctggaaccctgagggcctcacagcttgaaaaaaaactgaaggtattggaggacccaaactagtgaagaaagaaaaggaggggataagcagtggaaatgcctgtgatacgaggaggagaataatgctaaaagtgaagaaaacacaaaagaagtgaggctcagacagagggtatgtttgtaaatatacaaaaacccatgaggaaaaagtgacagtgcaggattttgagctacatccaggacagcactttcccttttgtgttgttaatatttttctaagtgttttgggcttccattatgaaactgggttttgtgccttcctggagtgaagaccatacttcctttttttgtttgatttttgggataggatctctcccaggctggagtgcagtgggacaatcatagttcactgcagcctcgaactcctgggctcaagttgatcctcctgcctcagcctctggagtagctgggactacaggtatgcaccactatgcctggataattttttaaaaaactttttgtagagacaggatcttgctctgttgtccaggcttgtctcgaacttctggcctcaagtgatcctcccaccttagcttccaaaagtgctgggattatagacatgatccaccacacccaggtctttcgttttttaggcagcctgtgttatgctgtctccctgaggctgtaagtgggcagcacctattatacatggatgctctgaggccaattccaagacttgtgcctaggttctagggaacaaatgtactattactggatattctgaatacacaaatctgatcacgtcataccctacttcaaaccatgcagtggttcttcagtgcccccaggataaaatcatgccttgtaagacctttcaagagactagcttatctttccagctctcaattttcctctccagcccatctcttcatcccatgtcccatcacactcaaccctatttacagttccacagaggccctctactcccttaccttctacctttgtacacactgctgtccttctgcctgttatattcttccaactcctacttctccatcaagatgatgtctattcatccctcccatctcaacttaaactctaaaacatattctctgacttctcccaagactggaacgtactacacttaaaaactgccagtttaggctgggcgcagtggctcatgcctgtaatcccagcactttgggaggccgaggcgggtggatcacctaaggtcaggagtttgagaccagcctggccaacatgatgaaaccccgtctctatcaaaaatacaaaaaattagctgggtgtggtggtggccgcctgtaatcccagctactcaggagtctgagacatgagaattgcttgaacccaggaggtagaggttgcagtgggccgagattgtgccactgcactccagcctgggcaacagagtgagactccgtctaaaaaattaaaaaaaaaaaaaaaaattgccggttgattaattggtcacttctcccatcctaacctcactgtacagtgcaactccagcaccatatatatagttatgaaggtcctaattctgcctataagctatttgaggcagagactatattttgtttactattgtataactagtaccctgcagaatgccccacacatactaggtatgtggtaactagccgctgaatgaattaaattttcatacatctggcatttatttgggtaacgtggagaattttaaagatatttaccaatacaggagagaaaagctctgaggtttcaaatataaaaaagaaaaggctaggtgctgtgggttggcttgctcgaataataatgtgtactaggtaaaagaaaaacgagatggttttcctgaaatgacgatttcagggcaaccctatggttgatgagagaagtatttcttgtataaaagaatcacaattaggccgggcgcagtggctcatgcctgtaatcccagcagtttgggaggctgaggcgggtggatcacctgaggtcaggagttcaagaccagcctagccaacatggtgaaaccccgtctctactaaaaatacagccgggcgtggtggcacctgcctgtggtcccagctactcaggaggctgaggcagaagaaccgcttgaattcgggaggtagaggttgcagtgagccgagatggtgccactgcactccagcctgggcaacatagcaagactccacctcaaaaaaaaaaaaaatcataataaacacagagggaacaa

SEQ ID NO: 97306 - DNA, 19785 bp, Homo sapiens
  misc_feature (1)...(19785): n = A,T,C or G
acaagtcatggccaagtaaagcttttgtgagggccaagagtttagtgcagagagcatggtttctgagccccctctccattctggaagcttatctgccagctggtggatctccccagagatgctggagggcctgggaggactccaaatcttggggagagactgtaacttgggtactttctccccagggcctgatttccaggggaataacctccctgaactgggcatcagcaggtgggagccctgtctggcagagagcggactccgggagagagttagcagcccagctctctccctccctttctgccatgagctctgcttgtagcaaaatcacccattttgatcactgggacacttctgggagccgagcagggcagcaatagtgtccccactttacagatgagagtactgaggcttgcaggtgcaggtccttctggtgtccaggacaggggtgggccccaagcctttgctgctgttctgtggcctctctaaatcctcctgacacctaagagccattggaaccttttagggtctggaagtcccagcctggtgggagatacttgggtggagccctgcctcagccatgcccatgaggggaagggtaaaaggagctgagaccgtcaccctccccacgtcagaggttgggcatctgtcggattcgcccccacttggcacaccctcattgcaggctggctcaccctcagctgggggagaagaacaagaggcaaggggccttgggcacacagtctgggggcccccgaagccccctcatctttattccagttcctcagatgtggcagttcccccagcttccctggaaacaagtatcagacaaaggtggtggcagacacaggacagggccctgggtggggcttgctggcgctaaaaggatttctcagcaggctcagggtctcccgccccgaatgacccttctggccacttcaagctactcctctgctgcccggcttccctctgcctctggttcccctggctgagcagggccttcctgggcttgaccctggcccccttcagcagttgtctcagactgttcccgaatgtccctggggctggctttgaccccagcatccccatctccctggcacccttgctcctcccctctgcttcttgcctctgactgcccactgccctcctcctctgtcacagccccctgggtctcaggccactctgcccggcggtagacgaggtagccagtggtgggcagcctgtgggccagggccccagggggcaggcggtggtagccctgctccttgtacaggaagaggccaaaagtgttgggctgggtcactcggaacttggtggcacagagctggttcagggtggcaatcgaggcctctgggggcacggccagggtcttggaggtgcagccactgctgggatcctgataggctactcggaggaggtgctatgcaggaggagaagcaaaaacaagtactcagccccggctggcatgcatctggctccaaagctgagacatcagctttctgggctgtgcagggacagggtgggtaggtggagatccagtgggagaaccaagcggcaaaagctctatgtgctccaggggtcggcttgtgggccacagccgcaggtgcaaggacagcccagtggggcactcacaagcctgagatgaagatttgatagtgagtaatttgtgccccaagcactctcctgcattaactcatttaatcttcacctcaaccccaggaggtaggtcctattaccccattttactgatgagaaaactgaggcacgaagtagttaagtaactcgcccaagtccccacaacccagtggcagagccaggattagaacccaggatctgtctacagagtctggactcttcaccaaggacaggaaggtgaaaggcggggatggcgtctggctctgaggacacggtggagggcctgttacctggaagcagtgggtggcaggcaggcggcgctgctcccagaggctgagggagcgccgtagctcctgcacggggctcagtgggagggtgtgggcctgacccaggccactcagcagggccaggctggcagagaggctggtcaggtagtagccacctgggacacagggtggaagaacacggctcaggctgggtgtggggcaccccatcccctctccccttccctgcttattcagggcccacccagacagggaggtgggtgggggtccctcaccctctccagtaagcaggctgggctccagcagctccgacatgtactcggcctccagcagcagctcaggaaggtcacagtgggccaagacgaggctcagcagaggcaggaactcgtcggcacccgcgccctcccctgtggggacatggtgagaggaagaagcttcaggtacagtccttgctttaggcagtgacccctccccatgccctagcaaccattgaggggcttcagaaaggatgcgctcctctctaggcctcagtttcgccatctgcaagaggggagggtgggctcattctctcctgcagggctgttctagggtcctggggacctgccgctggggggcccgcctctgactcaaaggggcagggcagggtgaggtggtggcagggacataccttcctgggtcctcagggccatgtagagcagcttgcaggcctgcaggagccgcttgacctgggcgctgggtgagtaggtgcggagcagctgcagcagcttctggcgcacttgctccaactctactggggagggcaggctcaggtgggacccgaaggctccggggccctgggcccgggccaggcggaggccctcagctaggcggcccagggagccgtctgcggcaagccggcgccgcaggcgggctgccaggatgggccggagaggcttgagcacagagcaatgcaatgacttctccaggacatgttctgccggagggacagggaggggtcaggggaagactgggggtatggggggcagaggcaaggggagaagggagcaggggtagaatcggggaggagaggcaaggaaagcaggaggaggtagcctgggtgagacggaagagttgggggagagaggggatggaactctctcgaacagtggtaagacaagatggatttgtaaagcagcagaacagaatcagacaggctggcgctgtggaggggagcagagggtcggatggggcagtgctggagctatggagagatggagcctcacccagcctcttaggcgacagcagcttctcagggcccagctccgcactcagcatggcccgggcccggctcagcgcctgacggatgccctgcagctcctggggctcgggcccagcccgcacctgggtcagtaggtcctgcaccagctggcccgcggctgtgtgtcggtcctgcatcagtgctgccgcagcccggcccacctgccgctccggtgccagtagggagcagaaggcggcgctcatggaccgaagcagaggtcgtcggcggcccaggtggggtgaggtcgctgggctcccccgggaccctggcaccccctcctcctcggagctgctgggggagccgcagtccacctcttggagggagggcataggcggaaggctagggccactgcctgctggcacgcggtaccccactgagctctccctccgtagcagctggcaagggggcagccgctctgtctggctggggactgcccctggcagcacggggacggggggaggtggcacggcaggtggagacagggggctggaggtctctgtggacacgcgcactttgaagcttctcttgaatttctcccgcttggtgggccctaggtcccccgggaacagggggttgaagaagcacaaggcggctccggtgccctggtccagctcttgaggggaccgggccttcagctggggcaacactgggcctccagccgggccccgctgagccttgatgttgagggaggagctccagaactctagggaacaagaaaccgactggggcctccgggactggttaggggaagtttcccaaccaaggcaaggcaggggcttcgggcggtgtgctgcgagccttgccttcccctcggcctcagcttgttcatctgtgcaatgggtggcaggaagcccttaccaatgcccagatgggagatggcctccagctctttgtgagtggctgcgtggtggatggctctggggagctgcagcgggaggagaaggatgtccctgaggccagagaggggagcagaagggagtgagggccgaagagggcgggaaggatgggctgtcccaaggagcagggtccgtggacaccaggcaccctgcgggcagactcaccgggtgtggcagtaggcacagatgagctggactaggtctgggaacatgagctccgagccctccaaggagacgcctgagagaggagggaagtgaggtgcttctctggggaacctccctgcttccagccccttcccgccaggccagcccctcaccgccagggctctccaggatgtagtggctggagacgaaggaggggccactggcttcaggcaaccgcatgcacagggcctggcactggcgggtgttagatttccgcacgaggaacgtctgcaagtggatagggctcaggcagctcaggaccttggcgtcccatccctctccctcccacccctggctggccagtccctggagtgtggggcaagactcacccccgggggctcggtcctcagcatgtgcagtgcggccgctgcgttggcttgcagctgcagccacacgggccgggtgagcagcaggcgctcccgcaggctcacaacgcgccccggccgctgcggcccgcctgcctgcccgccgctggcattgggcacgtcatacagtgggtcctgggctggcctgggggcaggcacccagatctgagcagggagccaggggctgggacccttgctctcctcttccccactcccgggtttcccactttctctatccccggataggccctcctctcgcagcccctccctgccccacctggctgccctgccaacttcactaacttttctctcgccaggtgcccagtagtgaagctggacgggctgggggctccaggagagcccgcgcctgactctccagggctttccatggctgggagctccttcgcttcaggaagagaatccagtcccaaggcaaggcacgcacatccccagtgagtaacacttcctgagggcggtccgcctgtcacacccgccagttaactcttgtgtgtccaccctgcctggccagtgcccgcctcctctgttctggaccctgctttgggggtcaggggacccctccatgctagccctgctctgagggccccagctgggggatgccacctccacacacggcctcctgcagcctcaccagctactcacattgcacacgtgggcgggaagtggttaagcggcctcagtccccacaggccccagccatgctctgggggcacctttggctctgtggtcagttgctcatctgcccctggcctcaggtcagccttgtgggagagcaccctctactgtccatagatgactcattcctgaacctgggttttaggattttaggttgccatggagaaaatatgccatgtctccatggaaaccaacctatttgcttaactgaggttctgggggtggttctgacactcagtgctaaccagggggagtctggctgtgaggtcgtcagcacatggcggtgctgccggctgcctcccacgcacgcaggctctgccagcctgccttgccaatctgccaggcaactgggacaggtgcagacatgacccaggctccaagcacacgcatccaccctccccgccgaggcactctcccggtgccatatgttgactctgcccagcgccaggcagcccagcgcccacctccccctccccagcctggccccacgcacagtgctctagcctctgctgggtagtgtgaggagtggcaatctgcaggcaccctagaagtcggcctggttcaggtgctccccacgggagccctgattctcttgcaaggtaaatcacacacacacacagggcacgccagagtcccaggaaaggttttaattccagtccttggaatctgaraagcagacaccaagaactgccctgagaacacctggggggcctggcatcttgcctccaratccagccagggtggacagacccccagataatcacgtctgactcaragttcccgcacagtggaaactggctccctggccctgaggcyggacagcctgcatccaacatcagcaagaggatgtggctttgacttcggctgtcttctctgtcaggggagccccaagagatggatcttcaggagtgggaggtggcaggcggctcagggatggagacagcagccttgcctggtcaggtcagctccacggccacagctgtgcaggcctcgaggagggcagaggaggagtccagrccagtgccagatggagtgggagggcccagcagcaccacaggagcctggctgggcagaccctgaggggcctgtgggtccgcctgtctgcaggaggaagacgagaatcctgggtgcagtgccagctgctctgagggtccccctggctgtgaacagcagggtcaaggtcctgtgcatatgtgggaagaagaaaactgtcaccagttaggaagctgaaaggaaggaggcagccacttactgagtggctttgggctggcccaraacaggcctcctgggcagctccacagccctccytgacccctyctgagtgggagctccatcaacccagagcttccccagccccatcctggttcctgctcctcaaactcccacaagcccctcaaatctagaccatcctaactttcttgagccactgattctgacacagtcacagcctttctctgggctccttcctggaagctgagctgaggaaaggtgatggcaagggggcagggaaggccatgcaacagccatggttcttaccatccgattttctcttctgaggggacacagctgccctagcctgggtgggtgagaagaaaagctcccctgagagcccacctccagcttggcaatccctgccccaycccccacctctgtggcttgtgggctgttgcctcagtgctgtgmccccaggaccgggagcataggccccacccaggcagagctcccatgctcctgactgctggccagctcagcggctctcccgcctccccgccaccctcccaccccatcaaaacctgccccagaacgggaaggggctgacacagactagaaatcccttttcccagggccgccttgagcaagaggacttgtgagccaactgcgatccagggactctgggctgaagatggggaagccttggtgagcagagaactcccaggcctgcagatggcagagctgctgccagggtggggggccctgaggtggggcaggtcacgtgggcagcagcggcccccacctttttgatggctgtccagtcctccaggatgtcgatctcttgaagcatgtacacgatgtatgggcctgtggtgggggtcaaggaagcctagtggaggtggcaggtgacgagggcagggccacccacctgacattcaggagtgggggtacagcggacagcatggagtgggagctgaggacctgggtccgaggtcaggttccacctcctacctcttaaccccctggttccaggggtcgtcctggaaccaagtctatggaggacaccaaatgttgttccctgtcccttgctcaccctcacctcgtcttaggtcagctggctgaggcccatcccatctcactctgcagcactggccctaacctggccccttccctgatccaaagacagacgcagggcttatcccttcagagacaactctccctcccccagtgctccctacttgatgtctccatgccttcaccttccattcactcaagtcatggccttccagattcctccctccctgcctgggcmtgctctccagcaccaggttgccayaatgactaagactggctgctgcaggaataccctcaggggtgcaggaggactcagctctgccaggacagatgaaagcacagcaggccctggactaagcttaagctagccctgcctaggaaggggtggaggcagccagtgccctctgggatgtgggtaccccatggtagggcacagaagcacacaggaaagtgaagccataggcaccagggtaagaccagaagaggcctcacagaggaggtaacgtttgagatgagccctggacagtcgggacaggcaggacttccaagaggagggtgggatatgagcaaaggctccccagggaaagctggggacccgctcggacaaccccgggagatggaaaggcctcaaaggccaaacctcactcaggctcaagtrcagtggcacsatcwcggctcactgcagccttgatctctcaggctcaagcaatcctcttacctcagcctycagagwagctgggactataggtgcacaccaccacgcctggctaatttttgttattttttctagagatgggtttcaccatgttgcccaagctggtctcgaaaagaactcctgggcccgagcaatctacccrccttggcctcccaaagtgctgggactgtagatgtgagccacggagcccagcccgtttctgttttcctagggttcacatagcccagagagacccaggaccccgtaagaaactgctgacagctggatttgcctggacatattcacatgacaccaagcaaccacgagtgcatctagtgtgactgtcctccatgtcccctccaaccccctmccctgggtctggagttgacccttacatcctgcccacttttaggccaccttgggtgaaaggataccagaaaccagaggtgccttcttcctcttgctgggcggcagggagtcccaagacctggagctgcctctggcgtgcagtttgtcrtcccaccattctgccccgagacccagagttagaattggggtgctggcccacaggatactcccttttctgtagcctctgcctccaccatgggccggcctggcctcatctcccctgtcccatcaccaccctgggcttggggtagaagccccttagggctgttcaggtcctgcctgcacagctgcacaaccctgggaagaggtcactgcacttctgtgagcctcatctgtttagtggagagtgggatgacracaattcctgccaccccaggactccacrtgaacacaggtactatgaacatggaggggactagagctattgcatgtgactgcatgtcacactgatacctgttttggaaagagcaggggcagaagaggcagggagacccactctgcttgagcccccattatgtgccaggccctttccaggcctggtctccttcagccctcacactgaccccaacaggcaggtcctctggctgtccccttgacttcaggacatctgaagcccaaagaggggtgggcgtggactgagcggggcccagttccggggtgcccaggctctcgcgcttaccagagctgaggtccaggctctggcggtcctcctccagcctctggatccgctcctgcagctccccctgcagcgtgtcatagagcagcagcttctcactctggaagagggggcaatagctcagcaggacggatggggtgaggccacttcaggctttgtgccctgcctcacccccagtgtgcccaatcaggcccacctccaggtgctgtttggctccctgcagctcacattcgtacttattcctgatcacatccagacagaagcccttgtagatccctgcagagaaagggaggagggtccctgcttggctggggagcccggtgcccacatagragggctgagagcaaagggcaaggccgggcaggaacgagagaggaaggggacagggtgccacgggttctgggaggggaagagggtayagaaccacccacagacctgccacctgaatgcgaatcttgaggctccgctgcagccccccaaggggctccgtgtattcaggggctctctcagcccccacttcctccagccgcaaccgcagctgactcagtcgttccctgaacaacctgcgtggtaaaaaggcagccgtgcacccatttgctcacccatcgctcttgggcaaacacatacccagcacccattccacagcaagcccsgtgttaggcgcgcacttcctgggcaccaaccacgcctgcccagtaccaggcccaccacctcctcatcccagatcctcgcagacccagcccaaggtgtccccacgctcacttctcctttagctccgagaactgcttctcyaggtccagcatctcactgacacactcgctgcggcgtcgctcatagtcctcatcatccatctctgggacaagaggccagtaagggctagctctggggaggagtggtgggtacccgcatgtgtgcatgtgcgtcctgcatgtgtgtgtgtgcatgcatgcctgtgtgtagggcctgtgtgtgtgtgcgcgtacatgcttgtgtgaaggggctgtgtgtgtgcgtgtgtgcttgtgtgtaggggctgtgtgtgcatatgcgtgcgtgcttgtgtgaaggggctgtgtgcacgtgtacttgtgtgaaggggctgtgtgtgtgcatacgtgcttgtgtgtaggggctgtgtgtgcgtgcttgtgtgtaggggctgtgtgtgcgtgtgtgcgcttgtgtgcagggtctgtgtatgtgcttgtgtgtaggcgctgtatgtgcatgtgcgtgcatgcttgtgtgtaggggctgtgtgtgtgcatgtgtgtgtgtaggggctcttgtgtgtgtgtgtgtgtgtgtgtstgtgtgtgtaggggctcaccggagctctcctcttctgactctgtctggctgccgctccgctcctcctcactctcttcctcctccccattcatctcagcagcagaatcaccctctgcttccatctcttctgtgtctttgcttggaggctggacaggcatctggactctgggagaaggaatggagctatcacttatggctgcccacagctcagagggggaaagaggcagcaggrwgctgaacacaactcgatcccagatggggaaagccagggaagtaactggcctggccacaccttgagcacaaactgggtgacaagggtgcaaatggccatctgcacctctcacagaaggctgggagctgtggaactgctcctgctcttggatgtcactggtgatcctaatcctagcaatactggccaaggctgtgatccacagaaaggaaaggcccagggggcactctccactgcctttgcaactggacctaaatttcttttcttcttattattttttgagacagagtctcgctctgttgacaagctggagtgcagtggcacgatctcagctcactgcaacctcctcctcctgggttcaagcgattctcctgcctcagcctcctgagtagtgagattacaggcgcccgcaccacacccaaactggacctaaatttctaactggggctttcaaggtctttcccagactggacttgacctaccggtccagctccttcatcccaacatataatggctagtgcttgcacttccactatccaccctctgcctcagctgttccttctgcctataatgtcctcggcttctcttccagataatgttacaatctccttgtctttcattgtgctctgggtcaaatcccatctccttctgcttcctcttggaccgcaggtcatcagtgctcccctctcttttctgtgtcttcagcttctaactcttagcaacctccttcccatgaaactttggatgtgcttgggtacttcctagcattaacaaaacacagaaacacaaaacctcacccattccacctaactgctccatttgccacttcacagttacacttttcaaggtctcatgaacactggctgttcctactttcacctcccacttgttcgatgtcctcaatctcagctgaaactgatcccgtagcattaaccaatgacttccttgtggctaatgccaatatttttcagtgcttattttaattgtctgctcggcaacatccaacactggtaagcattccttcttttactgactcatctaacatgtattgaacatctaacatatgctaggtaccgtcagacgctatggtatgcaggcgcccaagtgtgaatgtctttgacctcacggagtttacaagttcctgggagacaggggcaaaggagcacactataaccatgataggaggagagttaagaccaggggcataagggaggggtatataaccaggacctggagcccgatgcagcagggaggcttccagacaaagatggaccagctgggtgagctgcacttattgagggaacattccaggtagagtcagtagcaaagacccagaaataagagaaggaaagcagctgggggaacatgggtctaagtctcagtgagaaatctgagctgcagggatttggtcgtcagcatacagcaagttcttcatgccacaggagaaggtgcaaccagcaaggcacaatgtgtgygatcagaagacgcccagggtcaccaaaggggcagatgaggagacccctacaaaggaggaggcaaaacccgaagtggtggagaaagagagttttagaagaaagccaagtactgccaaggagtaattgcactgatagtgccaagtactgccaagagatcacctaagaagaagaaaacagtcctctcagcagataatctctcaacctcctgcaggcttctattttattgtgttcttccaacttctctggacactgctttgtagtcctttagaacagtgcagacaccactccctccaggaagctttgtttatatctatttgcctgttctcatatctgtccccgcaatcagtctatgagcctcactagggcaggggctgcacatgtaacttatttacctagcacagtgctggttcacttgatgactggaggatttgcaaatacaaatttaacaaaaaaattttttgtgagacagacattagtttttacttttcggtagtcccaggtccctgtaatggtagcaagctttccttgacaccagttcaagttgtgtatagtaagcctggcctaggtgagtgtttagtcatattcctcaacaatttcactaatgacctgcacctgacttgaaaggctcggttctctaaaccagcttcatcttcccgttatcaagcctcagttcccaacatttgcaatgcctcttcactgttagtatattcactttgtaagatgcagcttaagtctatctcttccagaagcctttctttcctccccctggttctgattatgagtgagttaagtcacaaccttcccaccttaccccgggtgcaaaaagcggataaccattcctgctctgagtgttgaggagctcacaggtggtaagggatggaaaagcacactgtaaagcgctgtacacaggcaatttatcttttcagaatggcagctcctccggggcaggcccctagggaaggcagaccctccccactctcgcagaggtcaatccagcttctccgcagcgcccagggggcctcccgctcccttctagatgcgccggagcgggccggaatatcactggctcgcccgcagcccagcacgcgtcaggccggttaaatctctgcttcggcctcggaggaggaggttgtgccggccctgctcgactaaccggagagggcgaaccaaaagccatgcatgacgatacgcaccgcggggactggagcctctggcctcacgacggagattccctgagagctgcccgtggttgccggtaccggmtgctgccgccggactcccgtaggcgctgcgcggctcccttttcttcgggaggcagagcctakcggtgcttccgtgtgcgtcatcaggaggcgaccgtcggggatgctcacagttggacagtttggtcccgaggcatgctgggataccgcgggccggtctccatagtaactggccgacattcgcgcaggccttcggcctgcagggaaggccctgatggttcagtgctttgcagacggtgcccttcgtccgcggccatctccccacggcgtgcaaggggagaagccggccccgatccccccacccccagctcaggagagtaacggagccagctgtgggtgtgaacacgcatttatttacacattgtcatcggtaggcacatacccagcccagcccgttgaagggacagatctcaggctgtcacccatggaacctgcagacccttccctcctccagaacccttgaaggcgaagccctgagagaaccaggaattttaggcttctgttcaagagctaagaactaaattttatgccttcatctgatttctttccaaaaagtccatttcattaagtattcagacttcttagctccatcccattcatactttttgctctcctactacccacccaagattgttaataataacaataataataacaacaataatactgcgataatattaatacttcacatttgtacgaagcttacagaatgttttcacatatagcatctcatctgagcctcccaacagttccgtgaggtaggtattctcacctccctttttacagacagggtaaccgaggctcagagaggtaacgggatttactcaaggccacacagctagttagtggtaaagctaggaatcgatcccagcaccccatatccaagtccagtgtttcaacaccacagctacctctgtaaagtggagcgacatttcttaccccagtcaggcctaaatggtggcctgaggagccaagaggctgacttctcagattaggggagggaagggctcagcagcgtcggggagagttggggtacttggccttcaactcctgtttgaactggcgatataggatcttattgtgctgattttcagcctccttttggggatggaacttcaacgcttctttgaagcccttatgaaccaagaaaccttcgttcaggacctcaaaatcaaaccccgccacatgcagctcgcaggcctgcaggaggaaagacaggttagcaaagtttgatgacattgacaggcctgagactgacttccctaaagccacagtccagcgtcctcacccctctggaagtatcctggatcttccacaccatccacccacctcctgaactatgatccctcctgcttcattgcctcctttccatccagggccactcctcataactccctgatcccaccacccctcctgccccattacccctgccctctcccttatgagcacctggctgattcggttgaagccgtactgccgaaagcgctcgtcgaaggtgggcaccttgcctcctgccacgtagaatggctcccaggggtcctgccaaggtaccacgtaggcgggccgcagcaagctctcttccggcaggttgacccagcgggaatagttggtgggtgcctggcagggggtgcacaacccataatagaagggccgcacctcgccaacctggtagagctgcaccagctcgtttttgttcatgggcatgcggcgggctcttcggatttcgaaggcaggcaccaccagcgcggtgcctccccactggttgctctgatccagcatttcccgcaggcctctccacagcccctcgctgggcaccatgtccacatcgatcaccagggcatagttggccccctcacgagccagattcctcagcaggttattggggtaggagacattggtgcccagcgcataattaatcccgggctgggccaccctggctagcttgtcaaagacctcctggcaggaccgcagcagggcaaactcccccggctcccgggggtcgggcacggctgcctcgtaacgcgaggggcacacgaggtgcatggcgaccctggcgcgcatgtcggggcagtggctgctcagcgcgtaggccagcaccgtggccagctgcgcctcctccttggtggccgcgaacaccgacacggacagcgggccctcccagcgctccagcagacccgacaggtgcagcaggttgtccacgctggcgtgcgtggccaggatcacatcgttggggtccatggtggtcttcagcaggcccctgtagacgcggtaatcgccgctagcgtccaggacgcctccagaggccagcgcggtgcggagctgcgccttgacctggtccacggaccgtggggacgggggaaagaactcaaaatattggtcttgctcctcctgcccgtgcagtccggacagcagcgacaggtagagcagctgcagcatcgccaccagcatgagcgcggccagcagcagctggtagaaggcgcaccggatggcgtaggacatctgcatggctctcggggctcggggcgcgcagcaacgaccacccggccacagactacgccagcggccgcaagcccggatttaccgcagcctgccgagcgcagccgaggcgagccgaggccagccgagccccgagcgccgccccgcccgccgcccgccgcccgccgcccgccaccgcccccagcccccggcgcgccggctcgccccctacgagggaggaggagccacggccccgccgctcggccgcgcgccgtgcagacgcccgcccgcccgggccccgccggcttcccgggacgcactcctctccctccccgccggcgcgcgcaccctggaccgggcgcgccctgaacgcgcggcgnnnnnnnnnnnnnnnnnnnnnnnnnnnnnnnnnnnnnnnnnnnnnnnnnnnnnnnnnnnnnnnnnnnnnnnnnnnnnnnnnnnnnnnnnnnnnnnnnnnnnnnnnnnnnnnnnnnnnnnnnnnnnnnnnnnnnnnnnnnnnnnnnnnnnnnnnnnnnnnnnnnnnnnnnnnnnnnnnnnnnnnnnnnnnnnnnnnnnnnnnnnnnnnnnnnnnnnnnnnnnnnnnnnnnnnnnnnnnnnnnnnnnnnnnnnnnnnnnnnnnnnnnnnnnnnnnnnnnnnnnnnnnnnnnnnnnnnnnnnnnnnnnnnnnnnnnnnnnnnnnnnnnnnnnnnnnnnnnnnnnnnnnnnnnnnnnnnnnnnnnnnnnnnnnnnnnnnnnnnnnnnnnnnnnnnnnnnnnnnnnnnnnnnnnnnnnnnnnnnnnnnnnnntctgcgttgcgacttacgtggtagtgcttggaaagtgcggagtagtatgagtagataagtgaatgtggacaaacctgtcacgtaggacgaggtggccgagtggttaaggcgatggactgctaatccattgtgctttgcacgcgtgggttcgaatcccatcctcgtcggccctgttttatagaggttgggggggaagcatctacattttcacatcctgcctatttggagcagcaagctggaggtgcgaggggtgaggcatctaaattttcacatcctgcctgtggagcagcaagctgaagaaaactgaactgggggtgagagtggaattcgatcccaagtctctctggtctttatccaccacgcatctcctgcctgctcctacttcaggtgtctgtagctctgggcagaggccaaaggtgttttctttccttctagaaagagggcccaggggttggtggcacggaaaagactagaaccgggattctggccagtgtgaagttgggggccaacgtatgatctgcaggaatcagggaagccccccattggaggcatcgccctccccgtccgaagtagtggtacttgtcctactctccagcacttctcctagggcggagaccttgtgtccacatgccctgctccccaacacacacaatctctttttttttttttttttttttttttgaggcggattctcgctctgtcgcccaggctggagcgcagtggcgcgatctcggctcactgcaacctctgccttccaggttcaagcgattctcctgcctcagccccgagtagctgggactactagcgcatgcagcacgcccggctaattttttgtatttttagcagagacggagtttcaccgtgttagccaggatggtctcggatctcctgacctcctgatccgcccacctcggcctcccaaagtgctgggattacaggtgtgagccaccgcgcccggccgcacacaaactcttaagcagaaggctttgaacattccaatatcaggccactatactcttaataagtatttgtggattaattcatctgtggactctttagaacaggagaggccgtgggaagggcagacactgccactgctaaatcaattaccgtatattactcaactttttaggctgagccagggaggcccctatagggcagagtgctctgaatcttgggatgtcaggacagactgggcagggcttcaaataaggataaagtgtttgtcccactattccacaggcagtagggtgccaaggttgttgagttgaagagtgatcagaaaacctttattttgcagcccagagcaaaaacacacactgagtacctggtctctgccaggaactgtgttaggcacgagggatgggccttggaggagacacaggtattgtccttgagagtttccactggtgaccttggctgtaaagaggagaaaagtaagtgcagatcctttcagcacaggccttatagactggaggctcagaagtcagacatgctgccatgtggattttctttgacctcctcagtgttttattttttatttattattattattattatttgagacagaattttgttcttcttgctcaggctggagtgcaatgacgcgatcttggctcactgcaaccttgcctcctaggttcaagtgattctcctgcctcagcctcctgagtagctgggattacaggagtgcaccaccatgcctggctaattttttgtattattttttagtagagatggggtttcatcatgttagccaggctggtctcgaactcctaacttcaggtgatccactcaccttggcctcccaaagtgttgggattacaggtgtgagccactgcgcccagccctattattattattattattttgagacagagtttcgctcttgttgcccaggctggagtgcaatggctcaatctcggctcactgcaacctctgcctcctgggttcaagtgattctcctgcctcagcctccggagtagctgggattacaggcatgtaccaccatgcccagctaattttgtatttttagtagactagggtttctccatgttagtcaggctggtctcgaactcccgacctcaggtgatctgcccacctcggcctcccaaagtgctgggattacaggagtgagctaccaagctcagccagtgtttgtattttcagtggacaagttttttacttcctgggttaattttttcctaggtattttattcttttgtatcctattgtaaatggagttgttttcttaatttccttttcacgttgttcattgttagtgtatagaaatataactgaatttttgttgttgttgttgttgttttgagatggagtttcgccctttcacccaggctcgagtgaagtggcgcgatctcggctgactgcaacgtctgccccccgggttcaagcaattctccagcttcaacctcccgagtagctgggactacaggtgcatgccaccacacccggctaatttttgtatttttagtagagacggggttttgccatgttggctaggctggtttcaaactcctgacctcaggtgatccacctgcctcagcgtcacaaagtggtaggattacaggcatgagccactgtgcccaaccagaattttgtgtgttaacttttttttttttttttgaggcagagtctcactctgtctcccaggctggagtgcagtggagtgatctcacctcattgcaacctccgcctcttaggttcaagtgattctcctgcctcagcctctctagtagctgggactacaggcgtgcgccaccacacccagt

SEQ ID NO: 97307 - DNA, 12087 bp, Homo sapiens
ttctgggccacattcccaggaggttaggtattcttaacctcaggatgaaataggtcagaagaactggtatcatgagatacaggtcatgaagaccctgctgataaaacaggatgtggtaaagaagctggccaaaacccaccaaatacaagatggtgaggaaggtgacccctggtcatcctcactgcttgttatatgctaactaggatgcattagcatgctaaaagacactcccaccagcacctcaactgttaataaatgccatggcaacatccagaagttaccctatatgtctaaaaagggggggaaccctcagttctgggaattgcctgctcctttttcagaaaactcatgaataatcaaccctttgtttagcatataatcaagaaataaccataaaaatagccaaccagcagccctcggggctgctctgcctttggagcagcccattctttttaaatttacttctctaataaacttgctttcactttcctctatggacttgttaccggtggcgaatccttatgtgtctgtagcaacctcaattcttgcctcctcagaggaaagaatttgactgaggggcataaatgcagaaggagggactgaggcaagttttagaacaggagtgaaagtttattaaaaagctttagagcagaaggctgggtgcagtggctcatgcctccgaaagtgcctgtaattgcagcactttgggaggccgaggtgggccgatcacttgaggtcaggagttcaagaccagcctggccgacactggtcacagccagtgccagggaaaggcagtctctcaatagatagaaaaaacctgaagccaatagatagatgaaactctgtctctactaaaaatacaaaaattagccagttgtgcacctgtagtcccggctgttcaggaggctgaggcaggaacattgcttaaacccgggaggtggagattgcggtgagctgagatcacgccactgcactgcagcctgggtgacagagtgagactccgtctcaaaaaagaaaacataaataaataaaactttagagcaggaatgaaaggaagtgaagtacacttggaagggggccaagagagtgacttgagaaatcaagtgcccggtttgacattttgacttggggttttataagttggcatgcttcgggattcttgccgtcttccctggttcttccctcggggtgggctgtctgcatgcatagcggcctgctagcacttgggagaggccgcatgctcagtgtgtttactggagttgtatgcatgctcacttgaggcattcttcccttaccaaatgctcctaggtcatataccggttaaaacgctgccattttgccttttagtgcgcatgcttgagcccacttgatcaactcctgagatcttactggggatctgctgataccagcttcaggtttttttaatctgctgggagactgcctttttctggcaccggctgtgagcaattattattttagagagagagcgttaacaactgcttggccatcacctgatggttgcctgacattcctggttggggggggccctctcctgctctgctcatgtttgcctagctgcctacagtgacagactcaccctgaattctttcttgcatgaggtccaagaaccctctattgatgcctgaattgggacccctttccagtaacaattttaggagatggcattgcagacaggctctcaaacagaagaaaaacaaaggataatgtttggtttattgaaaatgcctggaaaaaaaaaggttaatgttgggaatagtctatataccagtttttttagagtctggagggcagtcagttgaggtgtctagatattacagtcaaagcatctttggttaaagtggaagtaggcagtggcaatcggacagatttttctgttgtttgcatgtcacgaggttgtttacacaagcttcagcttgcagggcatcagggaaaaggtagttacaattttagtgaatttaagtcagaaaaatgaaggaaaaatttggaaatgttagtttggagacttgtagccaggaaagaattcagaattttgtccaaattgtagacaaataataaaatctcaaaaacaatggtagggctagaatctctctcttttttttttttttttgtgacagggtcccactctgttgcccaggctggagtgcagtggcatagtcatggctcactgcagcctccacctcctggggctcaggtgatcctcccacctcagtctgtcaagtagctgggaatacagatacatgctgccacacctggctaattaaaaaartacatatatttttgtagagatggggtttcaccatgttgcccaggctggtcttgaactcctgggtttaagtgatccacctgcctcggcctcccaaagtgctagaattacaggcatgaaccactgtgcccagcctaggactagaatctaatagcaggtgtactataattttcttctgaaacataactttttttctctccagtctttctttctaccaaagataaattatagtaagaccaatttacttgcaaaataacttttactcctattatacttggcctgattatttgcacaaaatgcagtaagaagagtgattggctatataggctctttaaagttggcttttgttgatgaaaagagttaaactctgtaaaatatttgaagagatttattctgagccaaatattagtgactatggctcatgacatagccccaggagatcctgaaagcatgtgtctaaggtagtcaggctacagcttggttgtatacattttttttttttagacggagtttcactcttgctgcccaggctggagtgcaagggcgcaatctcggctcaccgcaacctctgcctcccgggttcaagcaattctgcctcagcctcccgagtagctgggattacaggcatgcaccaccacacctggctaattttgtatttttagtagagatggggtttctccatgttggtcaggctggtctcgaactcccaaattcaggtgatccacccacctcagcctcccaaagtgctgggattacaggtgtgagccaccgtgcctggcctggttttatacattttagggacataaaacaccaatcagtacatctaagatgtacattggttcggtccagaaatatgggacaactcaaagcagggacttccaggtcataggtggattcaaaaagagtttatcagccgggtgctgggcagatcacgaggtcaggagattgagaccaccctggccaacatggtgaaaccccatctctactaaaaatacaaaaattagctgggtgtagtggcgtgcacctgtaatcccagatactcaggaggctgaggcaggagaatcgcttgaaaccaggaggcggagattgcagtgagccgagattgtgccactgtactccagcctggtgacagagcaagactccatctcaaaaaaacaaaaacaaacaaacgaacaaaaaacaaaaaacaaaaagagtttatctaaaaacctaaaatcaatagaagggagtttctgagttaagacaaggggttgtggagactaagtttaatagattgcaaaggttttttattagacataaaaagatgccagactcttcagtgaattctctactggctaaggaaaaagacatggaaagggaaggggattctctatagaatttagattttcctcacaagacagctttgcagggccatttcaaaatatgtcaaagaaatatattttagggtaaaatacttcaatttctttcagagcctaccatctcatgatggtatcttattgttataaagagtgttttggctgaatgtggtggctcacacctgtaatctgtgttactttgggaggccaagataggcagatacctgaggtcaggagtttgagaccagcctggccaacacggcaaaaccctgtctctgctaaaaaaaaaaaaaaatacaaaaattagcccggcttggtggtgcgtacctgtaataccagctactcaggaggctaaaccatgagaatcacttgaacccaggaggcagaggttgcagtgagctgaaatcacaccactgcactccagcctgggcaacagagcaagactctgattcagaaaaaaaagaatatctgttctgtcagtctttaaggtttctgttttaatgttaatgctgatcagctatgcctgaattctacagggaggagagtataataaggcatgtccaaatccccccttcctatttatggcctgaactagtttttctttttctttttctttcttttttttttttttttgagacagtgtcttgctctgtcacccagacaggagtacagtggtatgatctcagctcactgccacctctgtctcctgggttcaagtgattctcatggtttagcctcctgagtagctggtattacaggtacgcaccaccaagccgggctaatttttgtattttttagtagagacagggtttcaccattttggctaggctggtcttgaattcctggcctcaagtgatctgcccaccacgtcctcccaaagtgctgggattacaggtgtgagccactgtgcctggcctgaactagtttttcaggttaactttggaatgcccttggccaagaggaggttcattcagttagttgaggggcttagaattaaatatttggtttacattttgctggaaattttttttttttttgagacaatgtctcactttgttgcccaggctggagtgcagtggcatgataatagctcatggcagtctcaacgtcctgggctcaagcaatcctcccaactcagcctcacaagtagctgaaactacaggtgtgcaccaccacacatggctaattaaaaaaaaaaatttgtagagaccgagtctcccctctgttgcccaggatggtctcaaactcctgtgctcaagcaattcctcctgacttggcctcccaaagtgctgggattacaggcatgagccactgtattagttcattgtcacattgctataaagaaatattcaagagtgagtaacttataagaaaagaggtttaattggctcacaattctactggctgtaaggaagcatggcacatctgtttctggggaggcctcaggaagcttacaatcatgacagaaggtgaaggaggagccagtactatacatgggtgacgcaggaggaagagagagatgggggaggtgccacacacttttaaacaaccagatgtcatgagaactcactcactatcacgagaacagcaccaatggggaaatctgcactcatgatccaatcacctcccaccagtccccacctccaatattggggactacaatttgacatgagattcagggaaggacacaaatccaaactgtatcagccaccttgcccagcctgctggaagtttttaataaagaatctcagattagacttttaaaggctgggaagccaagctaaagattggccactagaatgggcctgtaatacctacatgaattcagtgaatttctctcttcttgaggttccccaaatatcttgagtttcttgggcctgtcagaaagtaacactctttacttactataaaatcaggaaccctgcaagggaacagtgtagacaaggtactaggccaatcttttcccagatctactggctttaacatcaaccttgattcctcaaagcaatctggtcacatctgaaaatacgacattccagtcaaagccttggtaaaataaccagtgtctctgattgtgtcctgtcacagaagaaaacacattcttattaaacttatgtaaataactacattgccaacttgtatgaatagtttttgaattctgatgaaatcagatacagaaaaaggtaaatgttttaattttgctcacaaaagtatactttacctaattgctgtaagctacaaacagcttaagataaaaaaagtttactgacaatggaaaacaaaacataagaatcagcagtgcttgagtgggacatccaacttctgagtagaaacctttgtggcaccagtgaaaaaaaatagaattaaatacgggtgatgtttagaaaggcaagaagatttttgttcagaagtgtgcccagtgcaacaccatggaaaagggaggcaaacctgtaatctcagcactttgggaggctgagacaggagaattgcgtaagcccgggagatcaagaccagcctggggagcatagtggggccttatctctacacaaaacaataaaatatagctggccatggtggtgcatgcctgtgagaggctgcggtgggagaattgcttgagcccaagagttagaggctgcagtgagctgtgttcataccactgcactccagcctgggtgacagagtgagaccatgtctcaaataaataaataaatgaaagaaccagcaatatttcaagcagaaaagttatagaaaaattatttcagctgggtgcagtggcttatgcctataatcacagcactttgggaggctgaggcaggaggattgcttgagcccaggagtttgagaccagcctgggcaacatagcgagaccttgcctgtactaaaaataaaaaattagccagtcatggtggtacatgcctgtggtcccagctgctctagaagctgaggtgggaggatcacttgagcccaggaggtcgaagctgcagtgagccgatcatgccactgtactccagcctgggtgacagagtgagaccctgtctaaaaaacagtaataacaacaatttcagtcctttattactttagtctcatgtaattaattcttgctctgcttgatattggttagcaattttatgagtccccttttttcactgaagtttttgaaattcttatgcagtccaattgtgtgatctcaaaattatcagcagaggtgtgtatttaagagtacctgtgacagtctccatttttttccatcaatcttcttgaagacacaacactctaggatttacaaacagaatgtagagaaaaagcgttagaataatgcaatttgccaagatataccagatttttaggaatctcatgcaatttttgaacacatgttaacacatttatacaaatataactcaaagttaagcatcatttcattctttttttttccccaaggaattacaaagctacttttaatactttggggtgagccccacaggaataaaaaacactgggaaggggcaactgtgactcccatggcccggggcagagaggctacctgaggggaaggaagcacgaaagggacctgctgcagatgcagggacactggtgaatggcaggagggttgcgcatgaagccacaaagctacttgggtttctccttctcatttgcctttttctgcttttgctgcatgatctctgagtccctctacttgcaggtggcatcagaaagctggtcatcttggtgctttctcttaaatgagttgctctgcttttccatattttctgctgggtgagctcaagctggtcaccatgggtcatggcattgactgacaccctgggaggccaaggtgggagaatcacttgagtctacaagtttcagaccagcctgggcaacatggtgagaccctgtctttaacaaaagtaaaaaaagattagctgggcatggtggcgcatgctcatagtcctagctactcaggagactgagatgggaggattgaacccaggggtttgaggttacagggagttgtgattgtgccattacacttcagcctgggagaaggagtaagagcctgtctcttaataaataaataaataagaaatgataattaaaatattaaaaaatctgctctttgatagagaggagactcagtttttcaaacaatctgaaaactaggaaagacattataatgcaaattcctctatctcttttttttttaacaatttactcaaaaggtgaacaactcttttactatttcttgttaacactacaggaaaatattattcataagaaagctgcacaacaagaattcctgaggacaaaaagaaaaaagagaaaaccaaattctatctttgtatcaatgtattactaatgctaaaggatattttggataaaaccttataaacagattaatccaatctcaatcagctttgaccacacaagatttccatagccttttatttatttaaaaaaaaaaaatagaaactaggtcttgctgtgttgatcagggtggtctcgaactcctggcctcaagcaatcttcttgccttggcctcccaaagtgctaagattacaggtgtgagccggcgcacctggtcccataaacgtttcataacctcttacaaatctttttcactcttttttccccaactttctgtacccattcagttttatctttttttcttttcttcccttattttttcaccaatctttgtttttattactttaatttaaaagaacctttaaataaccactaaactacacaaaattacttttccttgaacaaaaaaacacatcttcacgtttttaaaataactttccttaccaaaaacacttgctacttttcttacgtactttgtatacagaattatttctcttacatgtagtagttttaatgacgtatattaactacaactttcttagtaatgctaatttccagtgaaaaacctagtaagtaaacattttttttttgagacagatcactctgttgcccaggctcactgcaacctccgcctcctgggttcaagcgattcttgtgcctgggccacccgagtagctgggattacagatgtgcgtcactatgcctggttaatttttgtattttcagtagagacgaggtttcgccatgtgggctaggctggtcttgaacttccggcctcaagtgatttgcccaccttggccttccaaagtattgggattgcgggtgtgagccactgcacttggccaagcaattttgattgtttggtatcaggtgcagagcctggcacagaggatagagcagtcaagacaatgcctggaggatttgactctttctagcatggccaggagatacagctgggtcagggaggacatactggacttggctctaccctgtagttggtggcctaagtgctgtggatatgcatatgtcttcaggcctcatcatcgccacctgtttaggccacagaatctaacaactcaaaaccaaagatgtaagcttatagctagatcaagaaaatatcaaaagtatcacagaagccacagttttattaccttcagacatctagcagagacagcatacatttgtctgaccagtatactcaagcaaaaatgtctaaaattctgaagatatttctattttattttaccagcaatttaaaacctagctttctttaatagagatgactaaagtcatgtgaacttgaaaagcatttgggctagttatttactttataagtgctcatttatttgtaggtcaatttggtaccctgcagacaatatgcaaacagacatgtttatacatgtatacataaaaatacagacaaacagccaggtgtggtggtgtgtccctgtggtcccagctacttaggaggctgaggtggcagttcagcctgggcaatatagtgtgaccttgtctttaagaaaagttaaaaataaaaaaaatttttacttaaaatacagacactcaggtgtggtgggtcacaccttgtaatctcagccctttgggaggctgaggcaggaggatcacttgagtccaggagttcaagactagcctgagcaccatagcaagatcccatttatacaaaaagtattagccaggtgtggtgttgtgtgcctgtggtcctagctactcaggaagctgaggcaggaggatcacttgagcccaggtagtcaaggcttcagtgagctataatcacaccactgcactccagcctgggcaacaaagtgagacattgtctcaaaaattaataaattgctgggcatgttggctcatgcctgtaatcccagcactttgggaggccgaggcaggtggatcatttgaggaccagagtttgagatcagcctggccaacatggtgaaatcccatctctactaaaaatacaaaaattagctgggcctggtggtatatgcctgtagttccagctactctggaggctgaggcgtaagaattgcttaagcccaagtggtggaggttgcagtgagttgagatcatgccactgcactccagcctgggcaacagagtgagactctgtctcaaaaaaaaaaaaaaaaaaattaataaatttaaaaaaaaaacagacaaacatacagacttaacagcttcaatttttaaaattttagcaattagatatttaaaactcactattttatttatttttttatttgagatatggttttactatgttgagcatgctaaccttaaacttctgagctcaagcaacccgtctgcctcagcctccaggtagctgggaccaaaggcacatgctactgtgcccagcttaaaacccactagttaacaaaaggacaattaaattaagtcatggctctgtaaatggaacaagttaaagtttatctgtcttacatggccaaagcctttccctagttttagaggaaacaagatagcaaatttacatctcaatgtaaagagaaagaatgtaagggttttcaagaaggagtttggttgtgttagaggaagattaaacatggacaccaaagtcaaagtcatgggaatttactatagattttacaaggaaacatacagataagcctagaaaaaaattcaaaaaccttttccaaataatcaactgaatgctagaaagccatattttggacaccaatcttgttagatatgtggttttaaaatttagtttctgtttcttaactggatcactgagctcagggtggaccccattaaaaaataaggccaaaaaagcatttgcaatttctagggcctaatactagtatatgtgaaaagcaggtgcagttggaaggagagcatctagaaccccaggaatccaggatcccatttttacactgaatcccaggtccttaaaaagagggaaacactaagccgggcacggtggctcatgcctgtaatcccagcactttgggaggctaaggtggatggatcgcctgaggtcaggagtttgagaccagcctggccaacacaatgaaacaccatctctactaaaaatgcaaaaagttagctgggcgtggtggtgggcacctgtaatcccagctactagggaggctgagacaggtgattcgcttgaacctgggagcagaggttgtggtgagccgcgatcgcgccattgcactccagcctaagcaacaagagcaaaactctgtcacaaacaaacaaacaaacaaacaaaaaagggaaacactatgggatcaggctgtgcaatgtttccactctgcaccttgttgcaaggatattcccccagggctggtgggtgacccaacatcagtttgcctactctgtgatcaaaccatcccccatgggaatcttatcactttgtggtgagtgttcctacagcctccaggtgtccaaaccacacctctttttatctaaacgcatgaagaaataagtagcttcctgcagtaataaccatttgtgataaccactgtcagccacctccaaaactgcagcccttgccagtgacccaccagtcttcacacacagaaaggtcaggtttctctcacagtacaaagtaatccctggtaccccccaaagccagagagatcaggaaactcagtgcaaaagagagtagaactttagacatgacagtaacctgcccatgactctttaggctccaggaggaaaagagaagaccctaaaaaggggatgtatggcacattttcctgtgttcctcagggggtctcagtggcaaaaaaagcctgggtacagtggctcatgtctgtaatcccagcactttgggaggctaaggcaggaggattgcttgagcccaagagtttgagaccagcctggttaacatagtgggaccccattgctacaaaaaatgaaaacattagccaggcctggtagtatacacctgaggtcctagctatttgggaggctgaagtgggaggatcccttgggaggtcaaggccgcagtgagccgtgattgtgccactggactccagcctggtgggcaacagagtgaaacctcgttttaaaaaaaaaaaaaaaagaaagaaagaaaag

SEQ ID NO: 97308 - DNA, 203987 bp, Homo sapiens
gcactttgggaggctgaggtggacggatcacctgaggtcaggagttcaagaccagcctgaccaacatggtaaaaccccatctctattaaaaatacaaaaattaggccaggcgtggtggctaacgcctgtaatcccaacactttgggaggcgggggagggtggatgacctgaggtcaggagttcaagacccagcctggctaacatggtgaaaccccgtctttactaaaaatgcaaaaattaggtgggcatggtgttgcatgcctgtaatcccagctactccggaggctgaggcaggagaattgcttgaacccaggaggtggaggttgcagtgagctgagattgcaccattgtactccagcctgggcaacaagaccaaaactccatctcagaaaaataaaacaacaacaacaacaacaaaaaataaaaccccaaaattagccaggcgtggtagcacacacctgttatcccagctactagggaggctgaggcaggaaaatttcttgaacccgagaggttgaggttgcagtgagccgagatcgtgccacagtaccccagcctgtctcaaaaaaaaaaaaaaaaaaaaaaaaaaaaagagagcaaggagctcccatcctggagtggggtttgcctcctctcccaccaagcaagcagagggatttctggtagcgggggtagaactgggcattgcagcattggccagagggctcagatgaggagcgccagtgccagcacttctgaaaagcatctatgtgttgggggtgtgcatggtgtgatgtcctcatggcttaagtgagggtgagtggcaccctgagctgcagcaaggggagggtgtgagtacctagttacttggggggcacaggaatggatagggattggtgatacaggaagtgagtcacagcaatgcaggcaaaggaacagagaaggaagaagcagcaagtaatggaaagagatgagtgtcaccaaagataaaaaaagctgctgtgcacggtggctcatgcctgtaaatcttagcacttttagagaccaaggcgagtggatcctctgagctcaggagtttgacaccagcctgggcaacatggtgaaacctcgtctctactaaaacacaaaaaattagccgggcatggtggtgtacacctgtaatcccagctactcaggaagctgaggcacgagaattgcttgaacctgggaggtagaggttgcagtgaactgagattgcaccactgcactccagcctgggtgacagagagagagactgtgtccaaaaacaatcaaacaaaacaaacaaacaaacaaaaccaaaaaaacctaaaaaagcatacaagtgaaaagttctaaaagtaggtgcaggtgttatgacagtgtatggaaaccctagaaccctgatatctatcctagagcatactggacttaaaatagtcgccaacattgtgacagaaaagaagtaaatcatatgactaggcaaagagtaatatatcatatcaatgtacctttgaccttcctatttatttgaacaggaaagttttgccattcaccagtttttgtggtgctgtgatttccagagcagtgcctaaatcgatagtttgtgcataatgtatctgctacgtttctgttttgaaatgtagcaaaaacttcagtaatttggaattaggtgggctagagggagaagtcttgtcgcagttaatgaaaatttgttttatttaattaattagtttatttatttattgagatggagtctcactctgttgcccaggctggagtgcagtggtgtgatctctgcaatcttggctcactgcaacctctgcctctcgggttcaagcaattctcctgtcttagcctcctgagtagctgggactataggcgcacaccaccacgcctggctgatttttgtacttttagtagaggtggggtttcaccatattggtcaggctagtcttgaattcctgacctcaggggatccaactacctcggcctcccaaagggctgggattacaggcgtgagccactgtgctcagcctatttttattttaaaaacatttttagatttctattttgttttcaaatctcagagctgtgtgagataaaatttaagtttttcaaagaaacaatttttacttgtaccagattctcaaagcagttgaatctagactgatagaagttgtcacttgaagatctggcagcccattttcatgaatggttaggatagaataactgttgtaagtatattttgctttaaatggaaggagtgggaagtactgctaaagtatttccaaaaatgtttggaagcggtttaacatttttaagttggtcaagcaagcatataccatacacaattttcttttccctcatctagaagttgatagaacaggcacataactatttgatctctttagagcagtagtgggaagccctttcttccctctaggataacactctgtaattcttcctcctgtctaaaacatctctatcgggctttgttgctttgtattccagagttttaacattctgtatctctttgaaaataattccactgggattaacccttggcacttagtgcaaaattgctagtgaaatagaaaaaatgggattttttttagggaagaagaaaaaaaggtccttttggagcagaagcccttccctggtgaggcagagctgggtaggtgcttaaaatggtagttctgagtagccagaggctgcaacatttgggcacccacctggcccccatttcttaacattgtttagcaaatccctttattatagataacacaaaactcacatgcgtggtatctgagttacaatcaatttcaaattaatagttctcacaaaaaccccaggagcatatgcaaatctccccccttcccaaaataccaaagacttcttccgtaacactgcaaaaagataatttttatatttcagtccaaaatctgtatacagtcagtttggttgacttggtccagtcagttcagaaccaactagttagttccagataaaaatagtcacactagctgtttatagacatctttttaatgttttactttaaaacaaataatcccagtaaaagagagcaaaggaaattacactttaatgatagcttgaaatggatatggtgttcccgatttatttgttttcaggaaacagacaattgcattgtcatacatgacttagaactgcttacttaaatgcacattattagattagattaagtttctcttacaaaaacacaaccatgtcatttaaggcgaaaaatctcagcttctagggagacaagttaatatttatgatatttcctctatctgatttagtgaaatgatccattaatttagttagccaggtttcatcatccttacagttttgctttgcaaatggcatgagaattggtcaatttgtgcctgatttcctcctctctagtagacttattttacttgcaaattaagaacttcagaatcactgaatcaatgggaggtgagaaaggcaccttagaacagatcaggacttaaaaactcaataaagttattttaaacaaaacttgcaatctacaaatattaatttagttgaacaaaatgcaaacatgtagatcagacatagcaaaatttttttagttaacctcatacaagggatatttgcaattaagtattagcttgatcaaccctacatgttgaagaaggcagacacacttgtactcagaaagcatatggctactcagtgctcagctaaattgtgcttcaagacatcattaaaattgaccaatggaaatttgcttagtgtaaatgggagacccctctcatttccacagagagtaacacgacagacagaaccttatagcttccacacaactatcttttaacatcccccaatttttgtgctagagtaagatagacacaaaatggtcatggcttcaatgtataaaagtttttcacaacatggtttatcacattttgctatgattaagacctcagtgctgtgtgtaggttttgtttctgaatcttcagtcgtcagcaatgctgggtgagctgtactgtgtttgagacttaacgaggcctaaggaggggtccccaatacattcagaattcctgctgccagtggggtttgacccaggacagagtatgtccaagaatcagtgctacctgaaagttgctgcctccctcctcttcctctgttaataatgggagagagcctgcccagtcacggcaggtgtctggctttaggtcagtggaggggtgtgtgtgtgtgtgtgtgtgtgtgtgtgtgtgtgtgtgtgtgtgtgtgtgtgtgtgtgtgtatgcaacattcttgcaagggggaatcacaacttcaggttgaatgaagatgaaaaattgattttcataatttactaacattctgtattttgaaaatgaaaacaattgcttaaaaggattgacaatgtcttaactgaagtgtaaaatttagcctctatcttctatacatttccagcagccaaaaagattctaaatgattctaattgtcttagaatccaagtgggatgcgaagaggaagctttaaaaatttccatgtttatcaaaagggacaaggttctaaaaggttgagaagcacattttaggtaaagcggagaactggttgacctggggatggaggctggttaaggcctggtgaagttcagaagcaaaatactggcagggaatgaataaggagttaatgaagaagaaaagcaggggagagtcaatgatggagaaagcctgttggggagggctggggaggattggtggagttcagggcctccttcttcctttgaacatccacttgataaccctgctcattctgcttggctgctggagaagtacttctggaggcagcatttatgtctgccaaggaaacaacttcctttcttgagtcctcctgtggctagggtttaattgaattgaaatgctatctcttatgtcctttttttttgaatgtcattacgttggctgaagttctggtgacctaagatagctagatgggtttctaacaagcagtcagcattgcttgctttctgataaatacatttgtcattttgtttcccttggtctttttgctgccatgatatatttaagtgttctgatttgcagactctgccagtactatctagcttctaattgtaaatgtttatatcaggaaattgaaccagtaatttcagatttgggacaacattcttgggaagaatagaaaattttcactacagtataaaaagtaaaggaagtttcgttttagactttcatatgcaaaatgtacacataatagcaaaagacattcagggcatattaaaaaataaataccttgcaaaaattctctgcttatatataagaataagggaagattaggtagttgaattccctagcaatactcattttctaaaaagtctagttcttctattttggtttgtttctctccctctcattgccctttgagggggaagtcattttcttttactttgccaacttcctggtggtgtttctgggttcttttcaagcctttcctatctcagtcccactcaaatgtcccatcccccatagtcctacctgtatgtcagcgaaatgagaatagcttctcacacttgccctttacataggcagtattggcaagcctggggttggcgccattgcagagaaaccagtccaatcacaatggctgttctactgaccagtatttcatacgcttgtgtagaagttgaccacttataaagttgattctgccatcaggcaatatgttttcataaagtcaaatatgtcagatagtctatttgcctcactggccctgaatttcattatttgcacattttctaattgaagaacattcttgtcataaagaacaacatgaaaatgatgtgcaaaattgcttgccacagcgctaaatcaccaaaagcacacaaattgacattcaaattacattaataataaaatgactgaataggaatgggttggcaaatatatcttgaaataagcagccatttctattattccccaattctgctttagttgataccttattagcagctgttgatagccattgtgtttaaatatacattatggcctaatcttgaaaatgtagtttgtatttagtcacaaagcagaaatgcctgaaatttgaaggtgtttactcccataatttcaaaatacagtgtcaaatcttctaaatgacctaaacttgacatattcatacaccccatagcattagctgtgtttggtttctcaggctttttaactcaaggtacattactaaatgagtgggttaatgtcgatgcaccttggaattttagccatccctaaacatgcattttcatgcaattaaaaggtaacgggcttataaactgcctttcatgttcttcccgattcttgcaatttcaactttttagaagggctttcgaaatagttcatgcaatgatatgtatggctaaagaactgctatgcctggaaagaaaatgaagaacttatttcagtttgacatgaggcaagctgagggcatctgtactttctcctgccttacaaatgctctgagatgatcgtgaccttccagtccttagagagtctgatgcaaaggcagcttccctggcaggctgcggtgcggcatcaaaagtgtctgtctctgtctcttcgggacccacctcttcatcagttataaacaatttggattccctccatttggggtaaaaatcttggctgcctctggagccacttgactcactccctgaaagttgtatattcagttcctcggtcgacctgatcaggttttgcacagacaaagatttgcccaagtccttcggcaccatgggacagacagacaacagagtttctcctcccatgtcaaagcttttcctcatagaacggtccttggtgagatttgactgtgcaacctgaacattttccttggaggcaacaaggcaggtggtgacgtcagaaatgctttcctgtaagcctgcagggttagggtgcagagtttctggcctgggcagatgyttgatggctgggagaggaggtgggatctgtaaagttgttggggctgctggcttgrgtgccgtatttatttggtttgcaatggtgttggtggctgccactgctgagccatcgctttgactaattggcacctgtgttgcttgactgtgcatagtagggctaagcgcgtagaaagtctgggcactgaactcatttggcgtcagaatgaactgcaggcctctcgagatgttggcactagttgatctggataagcagccactgttttgtgcggaacccgaaagatctttgctatccacagggctttgatagtcagatgtctgttcacattcaaaaggtgggatctggaatgaagccaaagcgagggctgaggcagagcctttccgaaggacctgttgatagatgtctagtaggcagtccagcttggaytctatggactgtacctagaagtgaggaaaatggttacacatgagtataatctgttattaagaatggacttcattttttaattttraaaaatgaagtcaaggtgtgccaacacatttaaagaaatattgaatataaagtacgatgcagtcttgacccttagtgaatgtaacatttagcaatgatggggccagaggaggacttaggaagagagggacactttggcttctatacagtctttattagcatctctcccccaccacttctttaaatagtgcctcttaaaagtcatataagcactataaaaatgcaactttaagactttccattccaggctgggtgcagtggctcatgcctgtaatgccagcactttgggaaactgaggcaggagaattgagcccaggagtttgagaccagcctgggcaacatggtgagacctcgtctctaccaaaaataatacaaaaatcagccaggtgtggtggtgcatgcccatagtcccagctgctaggaaggctgagttgggaggattgactgagcccaggaggtagaggctgcagtgagccatgattgtgccactgcacttcagcctgggtgacagagaagtccctgtctgaaaaaaaaaaaaaaaaaaagacttcccattcctgtcagattgtctttcctaagtctcctctatgaagacattctgaaactctacagaaatctagtaaggaacttattctataatgaaaccaataccttaagcatcaatctaggtgattctgaatttaaagttacataaaaaaataaaggtacaaaatgctccggaattaatatatgaagtattttttattaaattgggggagccatttgatttctggaaaattgtctttgtatatgaagatgcaacagacttgaggttaacaaacattcaatgtgtcatcagaattataataaagttttatttttatttattttatattttattttattttattttattttattttattttattttatttttagtagagacagggtttcaccatgttggtcaggttggtcttgaactcctgaccttgtgatctgcccgcctcggcctccaaaagtgttaggactacaggcatgagccaccacacccggccttgttttacttttaaaaggagtgacctgcagagtgctatggctcacgcctgtaatctcagcactttgggaggccaaggcaagcggatcacttgaggtcaggagtttgagacaagcctggccaacatggtgaaacctgtctctactaaaaatacaaaaattcgcyggtcttggtggcgcatgcctgtaatcccatctacttgggaggctgaggcacgagaatcacttgaacccaggaggcggaggttgcagtgagctgggagcatgccactacactccagcctgggcaatagagtgagactctgtctcaaaaaaaaaaaaaaaaaaattaatgacctaaaaaagaaacaataaaaacaactgaaacacaaatgaagaatagatctttgttatttttaaacgattttcaactattggaaatctatagttgtttccaattaactattaattgatgagatgagattttctattccttaaagggaaatccagagtgtttcagagagcactgtctacacacaaagaaaatttaattttattcactctttttgtgattttatttattttaaaataatcactggaatacatacaattgcctataataaattttgattaaaaaaattctggctaaaaagatacccagcgtagttgagttgtacctgtttttcaaccttgaccacccgaccgagcatactgagatcgtctgtggtctcatgttctgctgttattttctctcggctcttcttatctgatgtgatttgcccttttccaagaatttgatcaacactatcagagaaagaggagatctgattatgagggctgaaggtggagattgccctaggtcagaatgaagagttttggaaaaaaaaattaaatacagttatcttcaatttatgtaagatgaaataagaaagaacttgttccagtygatatgcttatttgaacatgagatyacacatgaaattaattttctcattattctggtccaagatgaaatcacttatgggtgatcttctggaagtaaaagtgtcctaaactacaaagtaatatgtttctacctctgatcaggcagttcctgaatttaaccatttcaaaatatgacaaaaatcataactatagagatcttacattaatagaacagattattctatgagcatctattgtacatgtgtgaaagataagcagataagaaagccatgrtctttttctttcggagttcaagttggagaagatacatgagctagaaacccaagattggttctataaattctgtagcagttcaactttataaaaccttgggagctgtagacagttttattaaagaacttagaaggccatggccatctaggcagagattgcaatatgaccacaatctctggtcatgttacagatgttacagaatgaattaaagcaatttccaagagaacttgaccagcctaaatgagaatcactttcttctttttttgtatgtgtttagaattgaattatcaagagtatagacaactttccagtttactttgtctgaagagaaacataggcagtactcacttcctgccatgacatctaatttactaaactgcaaactctacaaggtctgggtcattattttatcaatctctggatgtccacaggtcctggcacacatgatgggctcaataattacctgctaaatgaattaacaaattgttatttctataacaattgatgaacaggtattttactaagggcccattatatgcctcacactgggctaagtgtgctggggggcataaaaaaaagttcaagtctcagtccttgcattttgggcactatacaatcacaaatgctggtaatttgtgctggtaataaagcaaggctcttaaaaaactgaatttactgaatattttggctttgagataatcacaatcaaccatatgtggttggaattaacatgtggaattcatttcttttaatcactcaataagatgctactaggaggatagtatatttgtagaaccgtacaggacatgaatgaaggacctcagtcttagtccagagcaaggtgaacacacttgcaaccaggaaacaacacaagggccaagtctcaactttggcccagcacaccgagattctgagtgctcttgtgctctgcagtagactctgctactgtataaaggtcagagaaaggcccgtcttcacaggttggatggttggatgaaacttaatgaaggagaaatagtacgttattcccaaaggatgattagaatttagataataaatggaatttagataatttaggatcagcagcagtaataattcaaacatcagcaacaaccattgatgtttattagacacagtaccaggcctgttacatgttatgaattacatgcattaacttgttcaatcctcatgacaacyctataaggcaagaactaactttcttcccatttttacagataaggaaaatgagacagttggatgctttgaatgcctgagttatatctatgttaaaagcaaaataaaatcaatgttwaaagcaaattccatttgcccactaaaaatgaatgaaaaatatggagttcagaggtttactctactaaagagaagttcttcctagataggttctatgcccattcctttacaaggaatgacatttccattgcttaccgtgtttgaaggcttttaattctacacaacatgtccagatgaccagcagaatattgttcaatgacatcttttacatcatatggacgtaaygtttccttaaacttccgttttgcaacatgaaatttcataattctgtatgagaacatattacatattaatctttataactctgttaatataagttaccaaaatagtttaccagtaaatataataagaaactctggggggaaaagtcatgcatcaaattatttttggcttctgcagatgtgtaatataaaagcctgagattacagtggacawtttaagaacatctcatgtgagacaacaccttaagaayagaaaaacacactaaaaaagaggctgaacactaagtgttttgcctttttaatgtccgttgaaaccctgaatgtaagttaaagtcaaaatgcaattctaacttttccatgcaatctccagaagtccaagatacaacatctagtaatagcatcccttaaaaaatataaaggctgttaaaatggtcttttatggaactacatgcatttttgagatacaaatgtgtttgcaaaacactctattctctctagagaaatgtacattaatatggaaatttgtgtttttttttcccataaattattcctgcagaatactgctggattagctagccaagttctttttgttttaaacataatacactttttttttttttttgagatgaggtctcactgtgttgcccaggctctaactcttgggctcaagcaatcctcctgcctcagcctcccyaagtgctgggactacaggcatgagccactgggtcctgccataacacatttcttaactaagcttgggagcctaagcttttcagaaccagggacctcttataacaatgcctcctgcaacatgggccccatcttttacaatgatatttcatcaacaaattccatgatgccatcaatagctaatctgcctaagataactagttcctgcaataacttgatgcaatttctgatgaaagcagagaaacataacatttgaattagtttgtgtagccttattgcaggtaaatttaaatcygttggtgtttttcagctactaaatggcccatagacttccattatcacacttgtagattccaggctgggaatcagtcactaagagacaaaatttgttgtcacttggtggaaagtgggaagattaggaacaaatgtaaagttgaaaaagaaaacatccattgtctatcttaggtgacagctgatttcaaggaatccaaattgttttataggttaaaaagcctaaaccctaccttgcaattgtattattaactttcaattaattatatcctaattattcctgaatcatttatctgtaatattcttactccctttctctaaccacatatttttcaccaatctcttctttattcagtataggttttgtatttccccccaaaaccatttaagcaaaattattcagcagaaagtaaagaaaattagtgttttaatttaacctcttagtattgagctttggttccaarttggtttaccagcatttaggtttcatagagtcttagtgtcctgtatcaaaaaaactgagaaaaataacaaaatatgttacatgtgaaatttctggtcctgagcaattatgtaaatatctgtttccatataccagactgtcaattaggtaaaggcagacatagatgtctttttttttttttttttttttttgagacagagtctcgccctttcacccaggctggagtgcaatggcaygatctcagctcgtagtaatttctgcctcccaggttcaagcgattctcctgcctcagcctcccgagtagctgggattacaggcacgtgccaccatacctgctaattttttgtatctttagtagagatggggtttcaccatattggccaggctggtctcgaacttctgaccttgtgatctgcccacctcagcctcccaaaatgctgggattacaggcgtgagccaccgcgcccggcctagatgtcttttgttcaacagtcagtgcttaataaaagttagctattgttgttaccacttctactatgacattgtgtgcttagagcttcgcacagtttctgacacagtaawaaatatttgttgaataagaggaggaaggaaagaaagagataaagagaagatctctaacctgagtcatattaagaataaaaccagaagagytaatctaacagcctagaacccttctttgctgtcttcaaagtagctaatgatgmctgggtgggcaggaaaaaaggaaaatcatcttcatayatcccaaggtggttttgctgttgttgtgtggttgtttgtgttttcataacatctgtctaccacttgttatgtgaagtactttgtatgtcttcaatagcacttgataagatattcctttctcctatttatattttgggaaactgaggttcaaagaacttaagtaacttgccccccaaaacaagcaactggtattaggcaaaatcaggattccacccagatctgtctggtttccactgccacattacctcctggttttcccatggcatcaattctggagaattgagaagtctgagtgggatctttggcagttctttctttcctatggtggtagaagaggcrcaagctacagcatamgtcagtgtgttctctctggctgtagctcacacatttgtggtttgggacgcatctgcccagatgtgaacctacatacttccaactgccttttttgccctaatggggatctgccattttttcttggtgggatgttatgtgagctctttcagataattcatcaaaagttgcttgttgcttttctctcttcctttcagagatgttttaacagaaagtacattttgaaggcatttgatagataatattgcactctagcactcacgcagtcatagtttatgcaaaccttaaataatttcatttttacttacataatttgctatttatgagctagctagctaaagttaaaattaaaatccatggtttataattgtgatcaatactaaaaatgaaactgattatcttttatgttatttcaatatactcacataatgataagtatgcaaaacagagtagattttaaaactcttaataggtttatcatttatttttatacatcataccactcytcaggtggtattgccttttttccagtgctttacttacagattttcctactttatgtatgagaattaaatagtgaaaattggattaataaatatcatttcaattatttagaaaagaggagtatgtgcagtggtgcctggagcaaccttgcattgactcccaagcactgactacttttaagaattttggtggttattaggccgggcgtggtggctcacgcctgtaatcctagcactttgggaggccgaggcgggtggatcacgaggtcaggaaatcgagaccatcctggctaacacggtgaaaccccatctctactaaaaatacaaaaaattagctgggygtggtgacgggcacctgtagtcccagctacttgggaggctgaggcaggagaatggcatgaacccgggaggcagagcttgcagtgagccaaggtcacgccactgcactccagcctgggcgacagagcaagactccgtctcaaaaaaaaaaaaaaaagaattttggtggttattaaacaccacatattctcactcataggtgggaattgaacaatgagaacacttgggcacagggcggggaacatcacttcccagggcctgtcatggggtagggagcagggggagggatagcattaggagaaatacctaatgtaaatgacgagttaatgggtgcagcacaccaacacggcacatgtatacctatgtaacaaaactgtacattgtgcacatgtaccctagaacttaaagtattttaaaaaaagaattttggtggttattaaatacagctgttactaaaaattaaattacatagacttacaatcaagtacattatattaaaaataaaggtaatatgtactcaaacctcaccatttcctaattattttactgtatgttactctctaggctcttgagttgttcacatctattgcgtctgtaccatggaaattctatctaataatgtaatattgctcgtcttctcaattcctgctcagtgatgtcacattggtagtttgaaaacagctatgacaggagtatttacactacagaaattggcaaacaatacaaatcaggatttccttctgaagagctggttgttcagcatttaccagtgcattactgatgctaaaaaaaatcttacttattaaggattaagtttttgaagatggagatcaaatagattttctcaactggctgtgttgtgggttgaaaacaaaaacattaaagagattcaaagtgagatatgaaagttctaaatcaggttctatggtttataagtgtggagggaatgtttaaaagcatagactgtctttctttttctcttttttttttttgagacaaggtctcactctgtcacgccaggtggagtgcagtggcacaatcatggctcattgcagccttgacctcccagatctgccaatcctcccatctcagcctcccaagtagctgggcctacaaggagatacccccacaccggttaatttttatattttttgcagagatagggggggtctccctatgttgcccaggctggtctcaaactcctgagctcaagtgatccatctgccttggccttccaaagggctgggattacaggcatgaaccactgcacttggcccatagatatttttgaaatcaatgatttatataaagaatgatgaccctgtcattatactttcgttaaaagaagactaggcatgtcctaatagctctcaaagctgtcccctcatttgcatctccactgctataggcttagaaagaacaaacctttcaaaatgcaagtaagggcatattacctccctcctaaagtccttcactggttttccctggcctataggataaacatcaaactcctagaagcacatcctatatggctgtttataaactggcctctatctctcttgcctcatcaccttccacttcgtccttggaactttaggttccagcaacaataaagtatgtgtaggtccacaaaaaccctagccaatcaattatatacttcaattacttccatttgctatttctttttcctgaaatcctgctgtgttttcaaaactctgttttaaagtcacttcttttggccaggtgtggtggcttacacatgtaatcacagcactttggggggctgaggagggaggattgcttgagcctaggagtttgagaccagcctgggcaacatagtgagacccctgtctctacaaagaataaaaaattaaccatgcatgatggcacatgcctatgctcccagctacttgggaggctgaggtgggaggatcacttaagcccaggaggtcgaggctacagtgagccttgacagtcttgccactgcactccagcctgggtaacagagtgggaccttgtctcaaaaaaagctcacttctttcatagaaatttttatgattccaacaaaacagttaatcacttctctgttaacctctagcttagtacctaacacaccacactgtaattatttactcatattctagcttcctccaccagactgtgtgagaaccttgaatgcagggattatgtcttctactcttcatatcccaaaacttggcccagagtttaatgaacatgggaggtttatttgtttagaagctctactgtggagacttcgggcaactctagaaggaagagggtagtgaatggtgagaattccccccttctctctccaaatactcatctctagtcattcctctgcatgctgcctgctctccagcccatctggattttcctgtcaccaaagtgctcattcatcaggattctgtctctttgcactctacctaaaatgctaattgttccagattcagctcaagcaccaagtgctctaggaaatctttcctaaccaccctcactggggtagatggtctttctctgtgctttcaaatgcactgtgaggtagctaaatctgtggcagtgtgtctcacccactggaatttattcatgccaggaactgtgctctttacttcagcatctgcataatccctggcaagtattagggggttcattaaatgcyagctgaagaaataaatgaggatttgctattccatagttcaaagatgtttgtgttctgtgacaaggcagactcttgtacagatcttctaaaaagaatgccttagaatagattgaagttcttcaggcacatttcagaaagagcataagcctctgagtttcctccatgaataaaaaaactttctaaagtaaaagaaatgttcactcattcaatagttaggaccatgtggggttcagaaaagtcatttaaatagaactgctactgaaaatcatgaaaacataattttctttttccttagattgctaacgtaattaggatcacacaaagcaacagcattgcaagcaacaacatatcattttgaggaaataaggagaaaggcaagaacagtggaagtcaagaaatatgtaatactacaacatgataagcagcaaaagtaaagaaagacctaatagcaaaacaaaactgtccagggaaaagagagggaagagcctgttgggatggaattatattggttgaatgaaatttacagtattataagaccatcaagaaaacagtggaaaacatgtggctagagtctaaaaagaatacaayctcagtttttcattcctaggagattgctatcagtgcttccaaaaatcacgtgtgcctgtcttgctctaagcaggaccaggtgtgagggatgctctctggggctcctgttttagccatcatactctgtgaatgaagatgccaggtcagtggggtcacataacttgacatgtttacattattcaattatctcagcctccctctttccacccaatcccctctcacttctttcaggacagtacacgattttcatgatcaaaatagaaggtagagagaggaaaatttgtgtccaagctaagtttgagaaagcatctctgagtatttagtattgtcctccttgccccctgcagcattttcttatttctctggtcatcattggaatgcctggaactgcctctgtctctatgatgcaatgaacttaacctgggcacccactatccatctgctggacacagagctggatggcggggatacaaaggtgarcaagacatagatcttgctctcttcaacttaatgttgagtgggtctccaagagttgtgcttggctggatggctggtgcagtgctaagtactttacctgcattctgtcaacttaaaactctaagaattttccacctttgacatttgggtcaagtaaagctcaggaggttgagttacctgttcaaggtcacagaactagtaagaacaaggttactgcagatgccaaggctcacatttttaccattccactcacagtgctgcaacacagagtgaatcccaggcaggcaaccttgtaaacattaaggagaatgtttaggctgtctatggatctgacctcctactctgccttgtatgctctgacattctcacacaaatgaatccaaggccacattagtcatttattcatctctgtccttgtctttccagaggggatcccatacttggaaaacatctgcctttcaacctggccacctgcattctctcataaggtcccttctgggaatcagtccatggctaatatgggttacctacctccagtaattgtaatgttttcccttttatcacaaattttaggggctgtctgcttactttacctcatttgtaggatatatacatcagtctcattggagtctgttagttttgctttacagggtatattttccagcaaatatatgtaatatattcccaacgtatatcatgagcaaaaagctacccaattagcctttgataagaggagagagtaggccattatcttgttacttgcagggagcaaggaagctcagagttcaataattctagacaccaggaaaaaatatgtgggtgctgaaaattgaggaaaatgtcccaaagtaggtatcaactacgaattcaaaaggtctttcaattcttcaattttttttctaagacttgcatttcatatactaagggctttaactacaggatgagggggtggaggggagaccagaggagtaggggagtccttgttggcaggtagaagagtgaaacctggtttcatgcttagttctcacataggctagcccagaccttctgtgtcttactctctaaacacagctgggagcaagcccagagcgactcagagtctagacaagggccagaaagcttcttctataaagggccaggtagtaaatatcttatgctttgtgggttgtatggtctttgctgaaactactcaagtcagccactgtagcatgcgagcagccataggacaataaataaatgaatgagtgtaactacatttcaataaaactttatttataaaaacaagccccttgggttagattttgatcccctggctatagtttgctgacccctggtttagataagaagagctaagagaaaatgccctgaagccaagaataaatgaaagcccatgaactggcctggggaagaagcagaagaccttggtggcctcttacatgcttacaaaagaagtttgatatgacttgtgtatttcctactagaaaggaatttctgggcaaatcattctagagttaaattaggacctttaagatacatttaatgattaaaatgataatattagatagcactttatagtataatcctatgataagggtactattgccatccctgttttgcagataaagaaactgaggcacagagaggttaagtaacttgcctgatgttaaacatccagtaattgtggaattaggacgtgaaccagtttggctccagctttgagctcttaatcataaggttcctctattgtcttaacattaagatcttcatactttaacacaaaataacaacaatgaaaaagacactttgatatgatatgattgtttttactcacatgtgcctggcacatagtaagtgttcaatacacttttgctaagtgaatgtcctgtttttactatgtctctccttctttgagagaggtctaaagtttcatgcaagaagtagttaagaagttctactaatttttcaaaggattaccttagaagagaaagggagtgctgaagtgactgattcatcctttctttcrtgaatattcattaagtacctatgacgagccctttggaggaccagcaaaaggctgaggaataagttacatactcatctgcttcttttcttcatgagggtagattgcatcactgggaytaatacagcagcaaagagcaaaagacctctaaggttagtctcctttgatgctgttggttatgaagagactaggagtctaataaaccyattgcacaaaactgayatgccccagcagtaccactagagggtgtaaaagattcatcacaaacctaaactrgtacctcctcttgaaactgaagtctgctcatacaattttctgagcatgaagaaataactaaagcaaagtgaaactctgggtagacgacatctatatatacacacgaacacatgtgcacttataaggaaatgtaggtgcatttgttgtgctgccatgagttctaaaatcttacaaaagtcttattccaatcctctaaattagggtaaaaatattgcatatgaatatgcagagataagaacgatgagaaaacagaagcagcagtgactgctgccaccrccaaacagatggacggacccagccagcagccaaaccatgtgcaagggcggagagggctcagccaactgtgaactgaagaggcagtttgattgactgtcaagacagcagtacttcccaagcttggctgctctttggaatcacctagggagctttaaaaaatgcctgggtcctacctccagaaattctgttttaattgttccagggcatggtccaaagattttataaaacttttcaggtgatgctaatgtgtggccaaggttgagagccactggagtagagacaggattggggtgatggtggcatgtggtggtggagtgtgttgggggtggaacaatccctgctctcatgcaaagaagtgatcatgattcatgccagcttgcaaaatcttctaagtcgcacatgtcagacccattgacatggcattagtgtgccttggtgtcagacctctaatcagaactgaaatgcttccccgtccttgagtgaggtctgaagtttcatgcaagaagtagttaagaagttccattaatttttcaaaggattaccttggaagggaaaggaagtgctaaagtgactgattcattcattctttcaatgaatattcattgagtacctatgacgttgtgctgagtattgtgttaggctctgaactgttaactgctgggcgctggcagagttaaagaagcctcctacgtgatgacaatgatcatttggtccttggtctcttcctctctacaagcatggtgcaagacaatggttgctgcgactgtgagctctgataggatttgagagtttcatttgtccagagcttggagctctctagataagctccaygtggctgcctcccctagtgatgcctgatgagtgggactcgagaatttgtccattcattcattcattcattcattcatcaaacatttattgagtgcctattatatgccagcttctgtgctagatgccagggatacagcaatgaagaaacaaatcctattgcttgggcactttcagtctagtagggcagacagacaagtaggcagacagttaaaattcactttgtgatgtgcaaggtggtgggaagcccaggttgatatgggaatgcagaagaggggtgtttaacccagactggtagaggtgatcagaaatgatttctggaggagatgacagtgctttacctactctgcaccctcatttatggggatattattaagtttctgaaggttgctgaatggcccccttgtgattgcagatcttatgtttgtggggtggatgtgggtttctcccccttaacccctcactttatgttggttatttgggttaatttacactaccgacatgcattccacatccctctgttatggtttgaatgccccctccgaaattcatgttgaaattttatgcctaatgtggcagtattgaggggtggaacttttaagaggtgattagatcatgaggactctggctgtatgaataaattatggattaatgggttaatggattaatgagttatcatgagagaggaactggtggttttataagaagtggaagagagacctaagttagcacttagcatgctcactctgcttgctatgtgatgccctgtgctgcctcagggtgccacagagagtccccaccaacaagaaggccctcaccagatacacctgcccaccttggacctcccagcctccataactgtaagaaataaattcatccttataaattactcagtttcagatattgttataaacatcagaaaacagactgaaatactccctcttccagtttggaaaattctatcttctgatttctgactctccatgagaaatacagcatttatctgtcttaaaagcacggaccccaaggctcatccttcaggtgacccagagccttttgatcacagaatttcccctgaggcagccctcactcgaaattgatcacgggacaaatccagcagacaactagggctgcagagcttgataatttgggtcactattgaaggcatatgtgttagttatttagaatactttttaatgttgttttcttgttaatacataaacataattcaacaatatagatttgtatttgtgtttacagtatttaaactctgacagttttataatctgcaaagcaagttataaaattatatatctaagattcctctactcttctttcatcttagatcrggttactagacaagaccaaggaaccccaggagtccctggatgcactgatctgtctcattttcttggttttaactcttgatagagaaatgtaaattagctccacgtgtgtacagtctgtctgatattctcactgtaggggcaagcagatattccatttggctcacttaggacattcagacattctgtggccacactgtttccaccactgagagtagacttgttctcctaatgcttgccattattgtcctttatatgcaggatctagtaggctctcctgcagagtttttgtttttttttaatgtttrtagagatgggtcttgctatgtttcccaggctggtttcaaactcctgggctcaagccatcctcccagctcagcctcccaaagtgttgaaattataggcatgagccactgcacctggcccctcctgtagatttttgttggattttcttttaagggtataagagtagtaaaacccaagcaagaacttccagatccgaagaagtctttcctgccaggaatttgtaagcattgatatggcgactaaatttggggattttgtgttcctaggagtgtaaaatcttgcataaattttaaagtgtaaaaaaaaaaaccaaataataaagtgtgaaatgaataagtaaataaataaattgactatacatgttgactactttaaaatatttttaacayggaataggagattctatatttttagcaaataatagaaaactcagtttaaattatagccaaagaaaaggtttaatatctcacatgctacaaagtaagtgcatcttcagtgaaaacactactttaacacagcctcggagcaaatgtagccacaastaattaccttcaaaacaaaaacaagcaaaaacaacattccagggagtatattagctgattttaaagatatgtgctaaatgatccataaaatgttctttagcagcgtcctttactgtaacatgtcatagattggctgtcaagaatgtcttaatagtgacttgcaaacaaagactcatcacctctgctaaaatagcagagatgccatcagcaaaattaagaactggtgatgattaaacagcttgtagatttaacaaaacccgcaatggcaaacacgtgcctcttctttacttgcggagtattcttgcctgaaatatgaagtgagatgcaagaaggattcacagctgagattgcattttagggatggtcaagataatggtcccatacatgcctttcagaacaggaataacacaggggcaagaaaactgaaaaactttatcacccaacccagggtaacagtgaggcctgatttgcatatccacctcaggaactctgaaatgtcattagtggttcttcagttcactgatcagatctgagctattttagaagagttgatgagcctttgctagttacaaagaaattcttgacacttcatctatgttcatattagagtgaragattctggtaatttaaaaaagtgttctatttaccatctggcttcaaacccttttccttctactgaatttttctccgaagtcacagatgacctccttgttgccactttcaaaggaccttctcactctttatcttctttgacctcttagcagcatttaacagcgttgacatctgcctcctacttgaaacactttcttcctctggcttctcttctgtcacgctctcctggttttccatctgtctggctgtttgaatctatctccttcagagcattcttacttttgcagctcctgtttgtgagccttagacttctgtgttgaccatcttctctttttactccctggggtgagacttccacaaaccatttatctctgtgctgacagctaccaaatttgtccatattccagactgctctcctgggtgtcagatccagagatccacctacctgctgagccctactgtgactgcttgaactcaacactcacaataatgcaccatctcccctcaagccagcctgtctcaccatcctccagatatgccatccttgattcctcctgttctttccctccatcctctccaatcagtaaatatccaaatcctatctgaaatccatccttgactattctccatcatgactgcccagctcaggccccagcagatccaggtattgtaataatagttctctcttyccaatacattccttacattgcaatcagagtcatctttccaagttttcaaatgaagcactgcgttagtccattcttgcactgctgtaaagaaatacccgagactgaaaaatttataaataaaagaggtttcattggctcatggttctgcaggctgtgcaggaagcacgactggggaggcatcagggaacttaaaatcatggcggacggcaaaagggaagcaggcttcttatgtggccggagcagcaggaagaaagagagaagcgggagggaggtgctacacacttttaaaccaccaatctcatgagaactcacttgctattatgagaacagcaagggggaaatccgcccccatgatccaatcacctcccaccaggctcctcctctgacattggggattacagtttgacatgagatttgggcaaggacacagatccaaaccatatcatgcactgatctgataaattcatttctgtacttagaatcccccacattcctgctcattcttatggttcctgctcttctcttcagccttactctcctcatccttgtcctccaccttcaaccatcacccgtgctttctaatgccaccttcacttctgcttctttgcaattgcagttctctctgcccagcctctatatcctccttagtaacctggctagttcctacatatctaccagatttcttcttttctttcttttagagtcttcccaaatgccaccttccccaaaagtgccgatataggttggcccaaaccgtcctgtcactgtagtaatatgctgctctgcattgtaattgactctacttttctggtagttcctcacaactctaagcagggatccatcttttttgttaacgtttatctctgtgcctggtgcacagttgaagctcaagacctatttttcaaatgcatgcactgaacgctgggaagagttttaaagagtctatagtcaggcttcgacaagggtcagggagggagagggaagagctaacttctccctttcattatcctgttgcttcttcagagggtgcctgggaaggcagcaagctcaccctgaggagaaaagaggtgagatttacttggaacattggctcatgattgctcttcatggttgaaaaaattgctcttctagaccaggcgcagtgactcatgtctgtaatcccagcacttwgggaagccaaggggggggcagatcacctgaggtcgagagttcgagaccagcctgaccaacatggagaaaacctgtctctactaaaaatacaaaattagccagtcatggtcgtgcatgtctgtaatcccagctactcaggaggcggaggcaggagaatcgcttgaacctgggaggtggaggttgcagtgagccaagatcgcgccgttgcactccagcctgggcaacaagagtgaaactctgtttcaaaaaaaaaaaactgctcttccaactctgagtaatttctcagtccaggtagtgggaaggtaacttcaaggggaaaatggcaagtgcttccaggtgaaggagatgcaagcaggtgaggctgtgtatgttttggaagatgggagcaccctgattcaaagacagaacaaagtgctcttctcatgtgactcatcatggaagcgggtggagctcagaaaggaaaagactgacccagagcagaggacgggcagtggaggcagcatgctggaaggcataaggagtccagacaactcaagggtaataatattagcatttacatagtgctgaccgtgtataccgttctaagtgctttgcaaatgtttattcatttattcattccttactacaaccctatgaggtcaataccattaccatccccagtttgccagtgaggaaacagaggcttgaagagggaatatgagttgctcaaggatgtacagaggctgtcctgtttcttggactacctctccctagcagcttcagggagggtgggaggaggggatagaattagccaatggtaccagtgtaaagtcgtttgtcagcttcaactaaagacttctttgagttttcaccctggaccttattcatgtattcatttgattctctaaaaggctagtctggcctgggaaagaaaaggtttcataaagtgaaacatagcaggcatgaccattattgcacggagatagtaagagacggtaagagcaaggcacaatcgatagcgtcttggtcatttctcttcagaataatgaataatctgcatcagtggttttgttgatattcacaaaaagaacaggtttcacagtattttgattcagttcttgacaactgacataaaacatggttgtataaaacaaacggacaggaaaacaactgtcactgaggatcttattaagagtggccttaaaagtgtgatctgaggaccagagctgcttcaccaactcttgggtaccaatccatgaagagattagtgcttagaaacttttaatagcaatttgacaggataattttatatctgttgaaatagttttaaaaattgaaaaaaaaaaaaaagagtagccttgatcctasatgtagtaattcattgaaaacaatacyggtaagaagcaggtaagctttgcattgcactgttttaacaaagctctttccccaaatggtgaatcctttacacagtacttatacgttgcattggtgtgcatatctgataaattacctgcctgttcagtacataaatacaatttctgttatatttaaaaaagttattattctggggctcttccataaatatgcagttgtatatgactttcaaatatttgttattttagtgtcattcttttttttttttccctttagagacagggtttcaccatgttgcccaggctggtcttgaattcctgagctaaagtgatctgcccaactcagcctcccaaactgctgggtttacaggtataagccaccatgcctgccctgttattttaaatttaaacagcatatattaatttttgtgtaaaactttgcccaagattcatgtatatatatgtaatgactacaaagccaagtactagcatgaaaagtaatagtctgttaccttcagatagtcccaattagccagatacttgayattttgaaggaacatatctaggtaatttatgggctatatttttaagacagtgatagaaaaatgggtgatctactacgaaataggtatatgtgagtgtgtagaatcctctagagtctatccatttgtttgtttactttcctgctaattttatctttccatttaggaactaatttctatgagtggataaaaagaaacttaacattgtttgaactgaatcactaaaatatggggcttttgttaaaaataagtacaatcttcactcytaaaggtgagtttgaaaacacatttccagcacatttttgcatttccctgaaataatattttgagaaaaatctatgataattctggaagaaatatacaaaactaagttttcttctgagtaaaagacatattttggaaatagtctaagaatagtaattctttactatgtaccatgaacagtgacattatttattttttaaaaagtgtcagagtgcatttggataatagaatccagacaaattcagagagtgtccttagtcatctctagaaaatggcagatgtttaaaaaatattgataactgaaaataagaactcttactttgctctttgtgaaggtagtaatattattttccatactgtcatccttgcagtagaatacatattttttgttacacattttaatttggctgctaggaaaaactactattgcaagagttactgaaatacaaaaggcatatttaaatattcgtattaaatattctaacaattaaaaaataccaagaaaaatgcccaaagttactattttgagatgaataatagatgtttcacacctgcaatctgtaatatacatatacatactgcttcaggggagctgcaagaggtgggcatgttctggcaaaaaccctccggcaactgatgttgaacttacgaacataattaaacaccttaggaaaagaacccttctgcataagatttaggacttatacctgcaaacttctttttagagctgctaattgtattagttggtttttaaattatgtatctttagaaattaagtacaccatgagtaaaatattttcaattaggttattaagctattgagtgtatctattaggtttttacagaatctgttaatttaattgtattctctttatttttatttttatttttgagacagagtcttgttctgttgcccagggtgaagtgcagtggcacaatcttggctcaccgcagcatctgcctcctgggttcaagcgacacaatctgttaatttgaaatggaatttagaagtgatgaaaaaccactaggcagaatcaggatatggaggagaaaaacatccccctcaggtaccacaatgcagcaagcagaaaatgtcaagaatccacaaaaagatagacatgtaaatagtaaagttccattaaaaataagaaccaagaaagaattctgaaaagcaagggaattctgcaaagacttcacaaaaatcagtcaagtttcaagaagaataacaaagtaaatcttaagctgttgctgaagtgcttagctagcagaataaacctatttcattttctttcttgcagctcacaatcctttttataggttgtaaagcaaaagcagaaagcttcagaaggtcttgggaaatgacataaactgggttaagtatgacttttaggaagcctaatctgctctcactagataagattttccatacttgttgcaagtcagattaattcgtggactgaattgtcccacctttactttagggtcttttatggatatactcaacatgtgaaaaatttcaaggtgacttctagaccagtaatrttcaataaaattttctgtgacatgggaaatctttcgtttctttgtctaatgaagtagccactggccacctgtggctatcgaacagttgaaatatgaatggtgcgactgatcmactaaattttaaaatgtatttcattttaattaattcaaatttaaatagcctcagtagcctcaagtagccagtggttatcatattggacagtgcagttctaaatcctctatccctttaactgaaggcttcagacatcatttcactacatattctgggttatctgggcttatacatcacccaagacttctaggttcactagagatagggtgaccatataattgattgtccaaactgggatactttgagaaagatgggagcattattaacacttatgatgagactagaggcataatctggactgtccaggccagataggaaggtataatctctccacccatagggtttgtgacttgagggttccattgagaagtaactgaacttttgtttttttttaggctgctgctacagatagtgtttaaacatcttctggagtttcatcacaccatgattttctttgcccccacaaacatttatgaaaatctttagaactcatttctgctttcccagtgactctcagctatagggcaaatcaatgtctaacatgatgccaaatgaccaactaaaaacagaagtaagtaatcaatcatgctaacattcaagattagaccaaacatgtgaatagctaaattggtttggatattttattttattttattttattttttggaggcagaatctcattctgttgcccaggctggagtgcagtggcatgatttcagctcactgcaacctccatctcccgggctcaagagagtctcctgcctcagcctcccaagtatctgggattacaggtgcccgccaccacacccagctaatttttgtatttttagtagagacagggtttcgtcaagttggccaggcttatcttgaactcctgacctcaagtgatctgcccccctcagcctccgaaagtgctgggattacaggcatgaggcactgcacctggcctggtttggatatttttaactttcttctagtttttcaccaacaggcagaggtatttcttttcttttcttttcttttttttttttttgcaatatagttactcagcattccttgacaaatacaaattctcccaaaagggttaaactgggccagctgagcatgcagcarttcatctagtccagatcttgattgcgtgtgtgtgtgtgtgtgtgtgtgtgtgtgtgtgtgtgtgtggtgggaaaggtcayggaaaaggtaaatttaagttgctaggtatactctcttagctctctgccatcagtagaggaagcaaattaagatcagcctttaacaattacatttcagataataagactaagtcactgcaaaatactttaggtttcccattttcagaactcaacccattttgaaataacctacaaggccttttctttgatatacaattctgtacagaatacagattggagcaagtcataaaaataattaaaaaatccaattgcatcaataaactaaatgtccttaaagtagcaaatacacaygacaagccaagactcgtgtaatctctctaatatgacctggcttttcaaatcccacccacgttttataactctttgtgttgaacacagcagaattttgtattaagaaacaaatatttcacaattcaataggcatatggatgaataggaaagggaaagtkgttattccaggatatttacctgcagaaaaagaacttagcaacatagtaattcaattaatcataagtatgtctctgaatcacgttgttcaagattttcaccaacctgatagctcgaatgacagttttaagtggtggggtgaggtcttccactgatacatcacactggcatcctttttcatcatatacatcatcagtgccaagggctgtgtcagctgcaagagaatattgccagttaaataacaccaccatccgcaatttgaaacatgttgctgaatttttctcacgtggaaatggcgggatactcacagagtaagctgataaaccaagatatgtataaggtcagccaattgtcttgccaatattattctttcttctttttctacagcctccccagttttaaatatgaatacttttctgaactgttttctacgggcaagatgaagctatcgacacattatctttccagtactggtgatggatttgtgttgatccacctatgctcttttgcccagttccttggaaactaacagccagcttttaagtgacagctgtctggagttacagaaatagtttttggacttgtaactaactggcctgtatatatcaagctcatatcccatgacactgaccccattagccttatgtcctgaacaagtaagctaagtagccggagccaagaatgctgactacttattagttactggatacaggcagccaggaaagagcttgcttcagatcatacagccaaagctgagggcagattttcagactggataaaaaatcagtttttcgtaaaccaaggaaatttacttttgggttaattgcaaatgtttggggaaggcagcagggttataataaatgccaaattattatgaatttgtaaagcaaataaggaataagctcatttcattgcatttctgttttcagtaacaaaatattagaatgaagttaaaattcctgtgatggaggataggtcaaatgaatattggtaggtttatayaatggaatattagacaactttaaaaaatgatgttgaagactaatgactgggaaagtgtcacagtatattgttaaagaaaaaaactctctgcatatctgaaattaagaatgattttattgtttttgcttgcctgtattttctaacatttctccaatgaacatgtattactttggcaatacaaagtaaagtaataaaaatgctctcatgaaagaggagttatgtggcctccaaatacctttttttttttgagaaaaagtcttgttttgtcgctcaggctggagtgcagtggtgcgatctggctcactgtaaccctgtaaccaccacccctattgggttcaagcaattctcatgcctcagccccgcaagtagctgggattacaggaccgcaccaccacactcagccaatttttgtatttttagtagagacggggtttcaccatgttggccaggctggtctcaaactactggcctcaagtgacccgtctgccttggcctccctaagtgctgggattacaggggtgagccattgctcctggcctccaaataccatttttatatggtccaagcctctctaaatgttgacatacactagaggactaatactactttgtgttgcctttgctctgtgcagtgttcatttgctaagtcatgaaaggaaaagactttgccatgggctgtcctggttgggctccaaattttgaaaggctattggaggttcattcattgaggcagtgcttatatttgtaatgcagtttgtgtgtcatttacatcaatgaatatttactgtgtgtttatgcagtttacttttgtgctgtaatgcaggcggtggtgcgggaagagatgatgagatacatgtagacacatggatcttcacagctcttcttcgaggtccctttggctttcttgcctttaagcctagtaggagagagatgaaactactacctcacaataatgataataatagtgttattttttgaaatttgtcttcctgtattcatatgttgaaacttaatcaccagtgtgatagtattaagatgtgggaactttagaaggtgattcatttatgagggtggagccctcatgaatgggattagcgaccttatagaagggctggagtgaactaggtaggccctcctaccctctggtctttctaccatgtgaggacatagcatttgtctcttctgggagactcagtagcaaggtgccatcttgaacttccaaccttcagaaccgtgagaaataaatttctagtctttaytggttatccagtctcaggcrttttttatagtagtgcaaatagactaagacaaatagcaactgctcattgaaatttacaccaggtacttaggtgcagcttctgcatatattaattttcatactyagagcaactttacaagttgttagtggtattatgaccaattttcagatgcagaaattaaggcttggagagggtaagtacctcatctgaggccatgaaggtggcaagcggagctagtaagttgcagaggctgacattagaatccagttccctgaggctccaaagcccatgccctttgcattgcattacgcagtatcagaacgagtttggggttaaattgtgactacaatatgtcaggagagacagggcaaagagctcactacacgtgtgtgttgcctgatgtgtacagcctgctcctgtcagatacatgttttctccagagaaatttgccccagttggaatgagagtacattgattaactctgtgtttgacagttggttctgactcagtgatgaccttcagggtagccagtttgctggattgaccacccacacaacacagtctttttagcccataaacatcgtgcccatggtttgatgacattctttccaggaattgttcatggtttctctgattttattgtaacctgctcttagttgctgtagtaggatgaatagagtcaccccaagatttatgtccacgtggaacatcggaatatgaccttagttggaataaaggtcttgcagatgtaattatgtaaggttcaaaatgagatcacactggattaggcggggaccctaaatgcagcaaaaatgtctttatgaaacagaaaaggcaaagayatagggacacagagaagatggaagcagagactggagtaatgcatctacaagctaaggaacaccagggattgttggcccccaccaatcgttaggagagaggcaggggatggtttctcccacagagcttccagaaggaagcaaccataatgagcccatgatttcagacttctggactcccgtactgtgagataatacacttctgtgctttcaagccacctgatttgtggtaatttgggatggcagcccaagaaatgaatacagctgggaaaactttccctgatggcttccaattctttactccaggacaataatgatgattgatagtaataagagtttttttttttttttagagaaatctaattatgtgccaagaactttaattaattgtatcaaaaccccatgaagcrgttttttttttttattttgagacagagtctcactctgtcacccaggctcaagtgcagtggcatgatctcggctcactgcaagctctgcctcccaggttcacgccattctcctgcctcagcctcccaagtagctgggactacaggtgcccgccaccaygcccagctactttttttgtattttttttagtagtgtcggggtttcaccatgttagccaggatggtctcgatctcctgacctcgtgatcyacctgccttggcctcccaaagtgctgggattacaggcgtgagccaccacgcccggcctgagtgtgttttaccattacctcttgttttatagattatgaaagtgaggracagaaggctaagaaacttgccgagcgacacctggagaataaatgacagaatgagaactttaaccccagcagttgggttctggagctgtctgaccctgagcctcacctctgaccacttccagatttgcccttcttgtatttctctctctttttttttcttttttttgagacggagtcacccaggctcaagtgtagtagcacaatctcggctcactgcaacctccgcctcccgggttcaagcaattctcctgccccagcctcccgagtagctgggattataggtgcccaccaccacacmcggctaatttttaaatatttagtagagacggggtttcaccatgttggccaggctggtctcgaactcctgacctcaggtgatctgcccacctcagcctcccaaagtgctgggattacaggcgtgaaccaccacatggggctgcccttcttgtatctcttattggtatctgggttcccatctcctgcattacatttttcttcacagggctggtgcacttggcayggtgtggaccccatatcaaatccagaggagatttgattttgagcaatgyggtcaccatggccatgtgctgggccaggccacacccaaaggagccttggaaatatacagaccctggaaattcaagggggttgtgtaagggatgtggaaaggtcaggtggaatagaggactcatatacaggctgggtggctgacaaaactgaagccaccagccatcattatagagccctgggagatgcccagatgttagctccccaaaggaaatattgaataacaaactttatcaggagtcccagtacagctgggcatggtggttcattcctttaatccygcactttgggaggctggggcaggaggattgcttaaggccaggagtttgatatgagcctgggcaaccctgtctctacaaataataatattaataaaaataaaaaaagccaggcatggtagtgtgtatgcctgtagtcattcaagctactcaggaggctgaagagggagaatagcttcagcccaggagttcaacggtacagttagctatgattgtactrcttcactccagcctgggcaacagagtgagacccactctcttaaaaaaaaaaaagattcccagtacagaattcacaagagtgttttatgctgtccttcaaaacagaggcatatgactgctttccctcatctgaaactgaatgagaggtacttctatcttagtctyttctcatatctcagaaagttggggaacactggagtggttacaagacagatcctgcaagcctatattaataatttctgtatttgaaaacactgtataaccagccataatatgataatgcaggtccaaataatgaaatagcataaaatatagagtcctttaattttgaggttaatggaaaactttctttcagcagatgtttactgtcacaataagcacaaaagtaaagatagtgaaactatattgttcacacataaatgaacctgcgaacatcccagatgattacaagacattacctcccagcctaatgttgcactccccatcaacatcctgtaccccaataagagactcatcctgtttaggaacagggctggacagaggatgagagtcggtcatcaattacattatactcaaatgcatctgattgtgcagttttatacagcactttataacttgattgtttaagccataaattaaacactcaattctgcttttttttgggtaggtgtagttagagcaaatgaataggaaatatatctttgctggcatgtgttgaggcaggagtgaattagggaatttttttttcttgcttcaaagctacaaaaatgagcaagatgctgtctttctgcttcataagtacaccaagtcctcacttaatgtcttcggtaggttcttggaaattgtgactttaagtgaaatcacatataatgaaaatgattttaccatagctatttgatctaaagaagagttaaagtcctatggcatatttctggtcacaaaaacgtcaccaaatttctacataaagacacaaaacacaatattaaacactgaaacaaatgtgagctacatatacatttaagaaagattaataaaaacaagtaagataattatttacctaatttttggttaatcagtgagtgacagtggtcataatggcgggaggttaaatcaaagaataaatgattgcatagcgaaaattagaaggggcacctcctaccactatacagttaaaaaaacgagcaaatattggtgggcttgctgagtgctttcctactgcatcaattgttgtgtatttgtatgattattgtatgctattttttatttacttatttatttattttatttttgagacagagtcttgctctttagcccaggctggagtgaagtggcgcgatcttggctcactgcaacctccgccccccgggttcaagcgattcttctgcctcagcttcccaagtagctgggattacgggtgcctgccaccatgcccagctaattttttgtatttttagtagagacggggtttcgccatgttggccaggctggccttgaactcctgacctcaggtgatccaccggcctcgacctcccaaagtgttaggattacaggtgtgagccaccatgcctggcctatttagttatttttaaccaaactcattttactaccagatgtatggttattgattattatatatttcttgagacagcgtctccctctgctgcctaggctagagtgcagtggtgtgatcataggtaactgcaacttcactcctgggctcaagttatccttcctccttagcatccctagtagctaggactacaggcacaggtcaccatgtctggctagtttttattttttaattctttgcagagatggagaggtcttgttatgttgcccaggctggtcttgaactcctgatctcaaatgatcctcccacttaggcctcccaaattgtggaattacaggtgtgagccactgagtctggtctgacacattttgattttacaataatttgtattcattcattcattcatttattttccaacccacttatttcagtccagggttgagggtggctggagcccatcctggcagcagagggcacaaggcagctaacagccatggacagggcacatctcagagcagagcatgctcacacacacccccacactcactcagatgaggatcatttagacacgtcaatgaacttcagtgcacagctttgggatatgggaggaaaccagagaacctgcagaaaatccatgcaggcctgaggaggatgtgccaactccacacagacagtggtccagccaagaaccaatttttttttcctcatccatctaacaaaacgatgatgaaggaaacaattttatttgtggacctgctatatcttgagttgtcaattttatttccagtgaagttagtaacacattaaatgtctttcttattactcctaggggcttaaacccctctgaatgctaaggtacttaggaggggctatatttccagctgaggctggccctctgttctccaactacacatttgcctctctgtcctggtattttgggagatgtaggttatgggaccgtgaactcatgtgagcacctagtcaaaacctactcagaaaagggcaaaatgccaatggaataaggtcctccccaaagtcctgctctctgtgagggatcctcttgggatcctccctggcagatctagccccatgaatggtccatgcttggcattagggagaaaaataaatataaaatacaactgtttatcttccccaagcctttcctgtttcctattgattagcagtgttaaggattkgctttcaagtactctgttccctgacatttaaaaagagctaagctggctgggtgcggcagctcacgcctgtaatcccagcactttcagaggctgaggcaggtggatcacctgagatcaggagttcgagactagcctggccaacatggtgaaaacccacctctactaaaaatacaaaaaaaaaaaaaaattagctgggcatggtggtaggcacctgtgatcccagctacttgggaggctgaggcaggagaattgcttgaacgtgggagaaggaggttgcagtgagccaagatcgcacsattgcactctagtctgggtgacaagagtgaaactccatctctaaataaataaataaataaaaataaaataaaaagatctaagccaaattttgaattttgaaaaactgctaattgctactttctatactgtttggaaagggccacttggacttgagatgatgaagagagaggatggtaaagaagaccattttggaaacttctgctgtgtccaaaaaccatatttctatttccactatgaaattttaccatcaaattgaaggtatttatggaagaaggacaggtagtttctagttctttttcttagtcaccttcttttacggattagattctttctgcatttctttttaaaaataattctatttttcattgatacatagatgtacatttttttggagtacatgtgataatttattacattcataaaacttgtaaagatcaagtcagtgtacttgggctatccatcatcttaaatatctgtcttttctttatgctagaaacatttgaattattcttttctagctatttgagctatttgaaatatacaacagattactgtaaactatagtcaccctactgacctatcaaacgctaggactgatttcttctatcagactgtagccattaattaacctctcttcattcccattcttccaatttccaacttctcttcccagcctctggaaaccaccagtctaagctctgtcttcatgagatccacttttttcggtcccacatatgaatgagcacatatgatctatttctttctgtgcctggcccatttcacttaacataatggcctccagtcctatccatgttgctgcaaatgacaggatttcattctttttaatggatgaataatatttcattgtgtatctataccacattttctttattcattcactgacgggcacttaggttaagtccatattttggatattgtgaatagtgttgcaataaacatgggagtacagatatctcttcaatatattgacttcttttcttttggatatcttctttgcatttcttgatgaaatgattacagtgggtttcaaccttggctgcacattaaaatcatttggggagtgttaaaaaaaaaatcccaataatgaggatgctctcaagaccaataacattagaaaccaaaggctaggacccaggcgttggagttcccagctctctggaagaatgcgatgtatagccaagggcaaagaccactggttgtaggtagaaaaatgacatctcctggtctccctcagccagagctgagcagtgtttggctaatccgccatcctgtgttccttggtgctgctgatatattttgcagaggagcaatttgagacaacatacgtgcctcacaagacagcagtaaatgactacatcataaaaaacagaaaaacaatttaaaaatcctttgataaattggtgatacaggaacaaggttttgtcctatcacaacattctagtcatctttaattgagcttgaaggcctcagcctgctgaattccagtcattgtcttctactcgcagccatcaaaaaaccccctcttctcaggctttggccctctttctcttttaaagaaatcactactgcttttaaacacaagcagcttacacagtcacagacaaaaataaaacccaattgtcaaaaacatagcggaaggccgggcgcggtggctcacgcctgtaatcccagcactttgggggcccgaggcgggtggatcacgacgtcaggagatcgagaccatcctggctaacacggtgaaaccccgtctctactaaaaatacaaaaaaaaaacagccgggcgtcgtggtgggtgcctgtagtcccagctacttgggaggctgaggcaggagaatggcgtgaacccgggaggcggagcttgcagtgagccgagatcgcgccagtgcactccagcctgggcgacagagcgagactctgtctcaaaaaacaaacaaacaaacaaacaaacaaacaaaaamaaccatagcggaaacacttgttttgtctgtggaggaataataacgtcctcacatttggggcaatagaagaaattataaaggagagagctggcagctttgatcatgaagacagaacatggtgctacccacaataactaaattacaatgccaaaaattcttcattagggaagaattccaaaatataaaaaaggcttaatatccacaatgtataaggaacttatctgaatgaatcacaatycaaaatatatatgtacaaataagtcagtcaggaaagactagcaaaaaatgactgaaaattattcagccttactagaaattttaaaattgtaaattaaaagcatgaacttgtaccgatttaatttgcaaaagaataataactaataaaaattgacatgaatttggtacactttgacattgctggtgacaatataaattggattaatttttatgacaataaaatacttaatgtataatcagcaatctttttatttttatttttgatttttaaacttttaagttcaggggtacatgagaaggtttattatatcggtaaactcaggtttgttgtacagattatttaatcacccaggaactatccaacagttactttttctgatcctctctctcctcccaccatccaccctcaagtaggcctcagtgtgtgtttttcccctctttgtgtccatgtgttctcctcatttagctcccacttaaaagtgagaacatgtggtatttggttttttgttcctgtgttagtttggtgaggataatggcctccagctccatttgtgttcctgcaaaggacatgatctcattctgttttatgactgcatagtatccatggtgtgtatgtaacacattttctttatcaaatctgtcactratgggcacttagattgagtctatgtctttgctatataatcagcaatcttacaattttatacaaggtaagtttcctttgtaaaataagttcaaaaagaatagaaatgtagcttaatgcaataatgtttatcacctactatagaaaaatagttatataagtttcaatgccctaaagtagaaaactgcaaattatagtaaattatagcatttgatcatgcaggtgtactacacagctctgaaaaaggcaattatgaatagtatgtaataacatgaaaatatttaaaaatgtgcaatgaaattaaaatatgaaactacttatgttgattataactatgtacaatagtatgtgaaaagaaaagtagctagaagagaatatgtaaaaataaaattagctgtactagtgcatgagattataaattatttatacttcatttaaagtttcctaaggaatttaagaatttttccatcacaaaaataatgtatactttttgatatgaagtatttgaaaaataggaaaacagaatgaagaaaaaaaatcttccaggmcgggtgcggtggctcatgtctgtaatcttagcactttgggaggctgaggcgcgcggatccctgaggtcaggagttcgagaccagcctggccaacgtggtgaaaccccgtctctactaaaaagacaaaaattagccaggcgtggtggtgggcgcctgtagtcccagctactcgggaggccgaggcaggagaatcgttcgaacccgggaggcggaggttgcgtgagccgagatcgcgccattgcaccccagcctggcgacagagggagactccgtctccacaaaaaaaaaaaaaacaaaaaaaaaaaaaatcttccaaaattccaggacttaaaggcaaccatgcccacacaacgctggggccggcgccgccgccgtgctcgcccggacgttcccttcccgccgccccgccccctcccccgcaccaggagcaacctgtagcgggagggcgagcgcggcggcagcacctgtactggctccagcgcgggttccggcggcgtcctggaagaggaggtccggacactatcagcggcctccccatggacattaaacccagagaaccctacttgatcttccggccgttcaaggggtatgaagagtccctactcaagctcaccgcgagacagcctgttttgtgatctttgacagcggggcaggagcagaagcggccaaaaatgcgctgaacgatattcgcttagatcccgaaaacccacagatcatgaggctagagtttgccaaagccaacaccaagatggccaagagcaagctaatggcaactccaaatcccaccaacatgcaccccacctaggagcacacttacttcatcgctcgggacccctatgacctgatgggggctgctctgatgcctgcatgcccagaggcctgggcccttatcctttgtacaccacagagctgacmccagccatcacccatgctgcgttcacctacccagctgccactaccgttgccgccgccctccatgccaggtgcgctggttcccttcctctgacaccacccagcaaggatggaagtatcgtcagttctgttagttcttcagtctggtcaccggggagttggttctgggaatctgtggtggtgccgggacaggcgccctgagctcccaccgcccccgcccccgggcggcctgtgcagagctgccgctgccccccagaaattgtgaatcctaagcctgacacagtggactccttcctgtttccccttcctcctcttcctcagccyttttctgcacactcaagcctttctccaacgcctcccaggaggatttggggaccttctcgctgaggcgctcagatccagctcggaggatcacttggaccctgcaaggcctgacctcccacccaactttgcttcggtagctcccgctcgaggaaacgaggcgtttaattttgcatgtttcctggcacgaatgaagacgcttacgcttgtgtatatgtgagtgtacagtttgttttcacgctgtcaccatagcaacaggtcctggcccccggtggttcatcctgcctggcctctctctgctcgcctcgcccctgcacccaccacgcttcagggaggcccgagcccccagcyccgtggccccacacgcttccagactcagcgcctgcctccacccaacagatagatggcatttgccttttcctttcaaattgggcttctctgctcctatctcctcggatgcgccaacagtcataggaatgccctctctgccgtactgttcacctctccacagtcactctgcctgccgctgctcctcattctttccaaaccttgaatcaaccaaaacgtgaaaagtatttttgtactctgtaacaaaatatttatgcatcgcataaaaaaggcaaccattattgtgatatgttacttacagtgaaagtgtgagggctagaagttcataattcatttttgtttttgttttcgttttttttgaatggagtctcattctgttgcccagctggagtgcaatggtgtgatctcggctcacgccaacctctgcctcccgggttcaagctattctcctgcctcagcctccagagtagctgggactacaggtgcgcaccaccacgcctggctatttttagtagagatggggtttcaccatgttggccagactgatctcgatctcctgacctcaggtgatctgcgtgccttagcctcccacagtgctgggattacaggcatgagtcactgcgcccaacctcacaattyatttttattttaggaatttaaataaagtatgtgatgattctatttcattatgctatggggaacacatattaaaatggctactattaatggtggtgataactaatttattacatcccgtaatgaattataatttactttccaagggttccttctttctgctgctggttgtatttaaattactcaccccctgccaccctctgctatcatttctcaaaaccttaaatatcatcctagatttagagttaccattttagacatgtgctagtccaaagacaattcctttaatccaactagagtttagagtaacygcttgggccctgatgcagtagcacaatttcatttcactaagtccttggctagggacttttcttcctgttccatgttagatgctgctaagtaaccaagagacaaactaggtcctcaaggcatgaataaggaacccagaaaaatactctggataatgtattttttactctagatgtttttcctttcaaatagtttttattttcactttgcttttctctcattataatagtaatacatgtgcattgtagaaaccttgaaaatttgaattttaaattaaatcacaaagaaagaaaaaaaattcacctgtggttttaacactctaagacaaatcctatcaagttttggtatattcccttccaatctcttcctgtacatcaattgatgtttaatgtcaaagtcgatttctcagcatagatggaaacttaaacatctctggttgccttgggaaggaagttggttctgatggcccagaagctcccattcagcctcatcttataatggcctttccatcccattctccagccacaccaaattccaactgctttcctaggtgctgttcaagcgtcatcatcattggacattctcccaaggggtatcgtctacacaccctcatccatcctcgttgcttttcttatttgtttggctggtaatttctaggtgctgaatttgtggtgggcagattataatatgcatggggcactaacaatagcaagggacactcacaatgtggagaacatcagaataattagaacacaccattttaatttcagcctacatgtaacttttgtggcactttgaaaaccataactttattttgtagtctagcaatttcttttattttgagaggtcctaagcacagaggatgaagtgtgcagggtggcgtgatggagtttagagcctcaggcttagctctggaatgacaagcctttcaagagtctaccacctctgaaggaagactgatgcagtccttcctttactatgtatgcctatgtcttctcagttattacactgtattatatttcattgtttacaagcccctttccttgttagacagtgagctccatgagggcaggaccgtgccttgtcattcatgggattttggccttattattttctgttgtactatggttaatttttttgttttgtttttgtgatcattcgtgactaggtatacttcaaaatcctactgtgaaaaaaacccaaaatttccacataatgtttactttttataaacattttaaatagaatcttcccctattagcccaygaaaatatttaagaggcaaaagaagtttaaagtaaaagaatgagtaacttttatagtagaacttgggaaatatttgttgaataaatatagtatgctgcgtgtttatttttaggtggaaatgcaatctgtaagcccactttaaattcttggatctatatatttataattagtaaataatagaagaatgttcacattggtacaaaaggaagagggatctctctctctctctcactgtatcatccatattaatataaaaaagaaggcaatccagacttagtttttctcttcaggaacaatgtaacactaatggaaatctaaatactttacagcaagatagcattacttcacatgtcacttttggatatttcacacctatcaccttttccaaactgacatttatcccaatactttatattgctggtactgtagcaacaaattgtaaaatctcaatcatgtgaccattgtttactcaattctgaatcttaggagatttggagtaatagcttacaagtgagttttttaaaattaagagttagaaaaatcatctcactgagttcccatagaaataaaagataatgctataataacaattttgatgcatctgtgaacacactctcactacattttttytaggctgtagaaatgatacaatatttgaaaaaaattctgaaaattagtttttattgaaaaaaaagcctctaggtatccatatctgcagcacatattggtttcaaagttaaatatccttttgagcttttaaagcaatattctaaagagctaattttaatattttgaacaggtaattgcattttccatgcatttttgccaaagtagatgcaatttggagagcaaacttttttttttttttagtggaattgaagattacagattgatacagattgcataacttagcactgggattacttgttatttttattattttttattttacttatttagtattatgacattcttgacataaaaatttgggacctagaataaataatcttagtactcaaaacagaaatgaaggacacattcaaatgcagtattagaggaagtgtagcttaccttttttttttctaaagagatagacttagagcttcctatgaataccacattctgaaaaaatgtcctcatatgtcttcaaaactctctcagctctatgggaggctttcatagcaaagagaaaatatgactagcctttgactgaacttgattactttttgttggcctggactaactgacttttttggctttcatccacaataaggattatagtttatgctgtgattcagcacacacacatacaaagatgcacacatacacatataattaagacagaagttcctttctgggttaagatggtagattgaacatatacagctaatcttgctcattttgaaaaacccactaaaactatagtgatgaaatactttaaaaaaagacataaacccataaaagaagagaaaaggaaaggagatgacaacaacataattttggaagtgggaaagcagatggacaagttaggtaactgactagctgacaccagagagaaaaccctatgccaacactgagaaaagctaagaacaacaagatttacactttggaaaactcaaaaggctcaggaattggcaacrttaggtacttcttgatccaagcataaagaggggataactaagataaggaaggttgcgtgcaatctctcccagactcctgggcatatggtcctctcctattccagcagaagatagaaatctttagatgagagttcaccccttcatccaaagatacatccaacacagtcaaaggacaggtattaaaccaaaagctggggtattaagtgatcatacacagattgaatgttgaggatccaccacaacctgctcgttatcgtaataatggtagtaagaccttttccctctaggagtttgagtagctactctctggggaatctgatcagtgcaagaaaaaagagctaaagatactgttgccaggaattcccccaaaagtggttgactcaggtcaacctatggtgaagatcaaagttaatcagctctaatacactcagaaactccagtcacccttctagtctccaacattttattatgagaaaacattcaatttactatgtatctaaggaaatcttccagtacaaaaatggagctcaaaagcaactagaaggtaacagaaactaaggaaatgaaaatttcaaaacattgtcattaatatcttcacagatataaggcaaaatactctatccatgcaacaaaaataggatactaaaataaaagaacccttagtcaaaaacaacaaaaacaaaggaccttagaaatgatagcagaaatgaaaatcttagtaagaggtttggatgataatattagctaaaactcctagaaagtaggacaaaaagacaaagaggtagaaaatgaaagaggaaggataaraaaatcggggccagtatgcaagtccaactttcaaataacagattttcatatctttattatgagaaatatcttcatattttctctcttctttcagagaaaatgaagggagaaaaaaaaaacccaataagatattctagaatggatacgaactatttccagacatacaagctcttaaaaattttgccttccagacactcttctcaggaatgtatgataggatgtacttcatcaaaatggcaaagtaaacgaagagagtgggagacacagccacagaacagggtgacacagagagacgcaacaggagtcagcagggtgacagggaaggaaaattcccgtgtgaaagcagtgtgtcaggtggagagggaaattggtccagataggactagtgtgaattgagggacagacacattgacagctgtcatcatcatgccttctgtcatcatgtcatctttttatgtaaaaaaaattggatttttactgtctgaaataatggagtgaatcaagaaagacaaaaacacragatcctgaaagctgagaatccaatctagaagaaaataaaagggaattcaaaagataatggctgtgcagtaggcttagagagcagccagctcaggtaaaaggagaatggaggtttccagaatgtgttctcaaagaaaagtcacaatgggactgattggttacctgacgcaatttaccttgtggaaaatattactgagagattattgaagatgtgggaagaattatgaaaacagcaacaatgaacaaggtatttatttactacaggaaaagcaaaaggtaagaaacaaccatagtgcagtgtaatatgtatacataatgtagatgctgaattttgacttctcaaaaaactatagtgacttacattgaaaggttgggagggtctgcagaaggaagagtgaaaaaagagtgaaatcttcatttaccagaatagaaagtaaacagtattcaaaatgaattaatcagaagttagcagtacactcatattattggaaaaatatggagatatgtaaatatcaagaggaataactaaaataaatagaaaatggctgctcctggaaaggtggtctagggatagagtgggagagttgaggaagaaaatcattatattctgtaacaaagggcttatatcatttgacttttattattttaaattgaactttcaattttgaggtaattgtagattcacatgtaatttgtaagacataatacagagattctgtgtaccctctattcagtttcctacaatggtaacatcttgcaaaagtatagtgcaatatcactgccagaatattaacactgatccagtcaagatatagacatttccgtcaccacaaggagtcctcatgttgtccttttagagccacacctcctccctcccagctcccaccatgattactggcaaccactaatatgatatgcatttctataatttcaagaatgttacataaatggathymcacacacacacacacacacayatatatatayacacttcccacactacattaatgtatacagtaatacttaataattaatgatatgtgatcttttgggattggtatattttcacttaacataattctcacaagattcagctgcattgttgtgtgtatcaatacttcactcatctttactgctgagtagtattccatagcatgtatgtgccacgatatgtttaaccttttgcctattggttaaacttttcaatagacaaaaggttaaacaaattgtggcacatacatgctacggaatattattcagctgtattttaaatatatatagtacatatataatatatgcaatatattaatatattatatgtaatataataatatatgtaatatataataaaatatatattatatatattaatattactctgggttgtttccagttttgggtcattacaaagaaagctactacgaccatgcatatataggatttatgggaacataacaatttctctgggctaaatacccgagaataaaattacttggtcagatagtaactaactgaatagttttaagaaactactaaactgttttcccaccagcaatgtgtaagtgatccggcttctttgcatctcccccagcattttgtgtcatccctagttttttttgtttcagccattctggcaggtgtgtagtgatatctcctgtagttttaactggactttccccatggggctaatgatattaaacatcttttcttgcacttgtttgccatgtttatatgctctttggtgaaatgttcttcacgttttctgcctattttcttattcaactggtgtttttttttttttcccctgtggtgttttgagggttctttatatattctaatcagatatgtcatttgtacatattttctctcagtttgcagcttgttttttcatccccttagtctcatttgcagagcaaaggtwtttaattcaatgagatccattctatcagcttgccttccttccttccttccttcctccctccctcyctctctctctctctctttttttttttttttcggagtctcccactgtcgcccatgctggagtacagcggcccaatctcggctcactgcagcctccgcctgccaggttcaaacgattcttccgcctcagcctcctgagtagcggggattacaggcaactgccacatcgcccagctaattttttgtatttttagtagagacagggtttcaccatgttggccaggctggtcttgaactcctgacctcgtgatttgcctgcctcagcatcccaaagtgctgggattacaggcgtgagccaccacacccagcctatcagttttctttttatgggtagtgcctttgttgtcaagcctaagaacattctgctgagttctggatcccaaagatcttctcttactttttttctaaaagctttatgctttatatttaaatctgtgattcattttgtgttaatctttattacttgacctttaaaaccaggtatacatataccactttggtaaaaccaaaaatctttgagtaaaacctaaaaggctcaagaaatgacactggctcttattacttgtgatgcattctataatatgtatttcctattctgtcctatcctatcccattttacaacagatatgcccatctcattccataacttctcatcccatcttgtttcatttcactaaaagaatgctgatcataacccattcatttgatttcatgacactctaccatagcttgaaaagcatggtagatacagtattttctacctggttcacatccctcaattttacttttcagtatgtcttctttcctaacttttctttatcaccagttctatctcagatgtttaaaaccatcacccactgctctttgacacaaaaaacaaaaaactatttttcctgaggtttattacttgctcccttctcagtgcttccctaggaggtgaccagaactgcacacagtctgcatttctacgtaacatgagtcctaagagagcaagggcaggctcaacagccagttgaaataaattctgggaaaatgagaggcactgttgttgttttctcacttaagttctatgcctttttacagtcacatcagaaatagaacatcatctccttatctcasaaaactatattctcagtgactttctgaaatactttttgatctcaacagtcattacaaacttttagtatatggttgattatacctatggcaggtaaaacatactgtgcacagggcctgcaaccacaataaactaggttgctgggagattcaatcaaaataattatcgacccatgtttaccaaatatgctaaccagtactttttttgtgatttggtaaacttgatttttcattgtgtttgttcccaggcttgctaattagcaacattcagaaacactaattcacactaatgagggaatctattctgtaagataccactgcacttgagtatttctcttcacaatcaaagaccccatttacactgagtaggtaattcatgcatcctcagcatcttaaattacattaattatgatatgaatgtctctaagattctctcttaaagattgtcaattaaccttacttactggctagcagaaatgctggcaaaatttcttggaatacttcctgacatttaattaaaaggaatttctctgttttgagtgacggtgtgaagcactagagagttttcaaaaacaattaataaggtctctactgctaaaattgctgatcatacatctagtaactgcccataaggtgaaaagaaaaacacattaaaatttgttttctttcttctttttaattgcatatgttatatatactatctttattcaaatggaaacactagaatatgtttttatatgttccttaaaaattattgcaactgtaaaacagtggaggagtttcattatcttcttagagtcactcaaatactcacttatttgaatgcctcaaacacttgcttattgctgaactgtgattcagcaataacgattttaataatgtcataccstttgcctctgtgatgcctctcatttgtgtgtgggctttttaaaacccccaaacaatttttattaataaagcttaattgattcctgaataattaaatagtaaaccatttatttgttcacaatgtgttcattattcattcattcaaaataaatattttccaaacttctattatttgccatgcactgtgctgtcatatagtaaacaaatgtctctctctctcagagtaactgaagtatttctgacaaaggcagtatttccactgcctttatctttaataaaggaagcggtccctgatacatagtattatttctgtgattacatgaattattcaacatgaggactcttaaaactcactccaaggaataaaggactaaagtttgtataagcatataacttttaacgttccatttaccacaggtagaaattgccatcaagtactggaagaagggaagacaaatacatgcaaattaagcaagyccaggatttcaattagtcaaaattaatgcagaaatcakcattaattaattaataaataataacaatatatttaatatattgagcacctattctgtgctgggcattgtacaagaattttacacacattatatcttattattactcacrtaaccctattaggtaggtatcatttctaccaccctaaagagagagagagaacaaattaaagtggcagtgaggttaagtcgtttgtctcatctcacccaacctagwgggggaactaggatttaaaacaagttctgttttactccaaaaccatgcactgtgtcggattaattcaattttcataagaatttccttgagaacatactatagtcrtagcactattagtatcccaatagaaaacaaagacataaaactcacagcctggtgaaaacaattttttaaaactcacatacaaaaaccaatttttatggatttttatagtttcaatagtatatcactgaagtgtttgtagcaaaagggaggtaaactcatagactagaatgactgcctttattagaaccaaacagtgagataatcctggtgaagccaagtggtcaatcacattcagatcactgggatagtcactgctccacacctgacatcatctcagatagccttctcacatgtataattgaactagtcaaactagatgagatcaatgaattgctttttttttttttttttttttttttttgagacagggacttgttctgttgcccaggatggagtgcagtgatgcgatcatggctcactgcagcctcaacctcctgggctcaaaagatcctcccatttctcagcctcccaagtggctggggctataggcctgtgccaccatgcccagctaatttttacattttttgtagagatggggttttgccatgttgcctaggctagtctctaactcctgggctcaagtgatccacaggcctgggcctcccaaagtgtggggatcacaggtgtgagccactgtgcctggtgatgaattgctgttaccattctaagctaaaacagtacttcatcttagggagaaacattctgaatcaatggcaaaatgactgagagggagttatgtaatcctatctccacaagaacgagatctgtttcctttgaaccatattcagagatatctgattgcaatcaaggcagccatgttttataatgaccctacaaattgcagaatcacaaatctatattgttaatcaaatctgctggagaattctaaatagatcttgatatggtttcgctctgtatccccacccaaatctcatgttgagttgttattcccaatgttgggggagggactgggtgggaggtgaatggatcatgggggtggattatggtttaaaagtgtggcacttcccccttcactctcactttctcattctctctgtctctttctcttctgctaccacgtaaagacacgcttccttccctttcgctcttctgacatgactgtaagtttcttgaggcatcccaggcgtgcttcctgtacaggttgtggaactgtgagtcaattaaacttttctttataaatcacccagtctcaggtagttctttatagcagtgtgcgaaaaaactaatacagatctggtaaatttttccccaactttcaactcttattcagctagcagtaatagtgccaggaaatgccaacatgttaaccccaaaatcatctggactaacttgtctagagatggtaacataagcattgtttaaaaaaaatggaaattactgttgcataccttaattgacatgtgaaggtatagggagagaatatttgtagtgtatgcaatgataaagggaataaattgagcagacttgccatatttactgaaaaagaagacaataaatcatttcactagcagttaacatacagctggtttatactgtttcattagcagcatgaattatatgaaagaaaacatgctaagcagcawgcatggtagaacataaaaagctttgaacttagacctaagtgcaacttcaaaccccagttttggcatttagactgaattatgtgggcaagttatttacattttctgagtctcaatttccttatctgcaaaatggctatgtgtgtattaaatgagccaattcatagaaaatgtctagccaatgcctcgatacatgaggtgctaacaatgctattttccttttctttcttaggctctttgagtgaaggatactacagggagaaataaaaaagtcaattagacactgacactgtcttcatagaaccaacaggatgttgaaaatactaaaagcaaataagctttaaatggctgggatggtagattgcaatactggccacgacacttgcagcttctcacatgaagaggtggaatctctttctctgtctcttgcatgtgggctgtccttgccatttgctttgaccaacaggacatagtggacattatactgtgataggttgagcctgaacttcaagaggccttcagatatcaatgtactgctcttgggaacccaccaccaccatgtgaaccagcccagcctgctggaggatgagagaccacatgagcaaagagcrgtaatyctaactgagaccaccttagtccagtcagcaccagccaacacagcagctgaacacagagcatgagtcagttcacttaagaccagaagaactgcctaacagaattgtgggctaaacaaatggttgctgttttaagccactaaatctgagggagagggttagctatgcaacagataacatgaagagatatagggtcatgacatttttcaatcaaaacacaaaattatgggaacaatagtttcaaaagagttttgggaatgattagtcatcaattccaatagaacgatgtggtataacaattgctactgcattagattaatgaaagacgcaaatctcagggtttcatgtgcaaatgattctcttggtagctggaggtagagagattaatttttcccaggtaatgttattctgaggtttctatgcttttggagttcagaaattgttgttatgcattatacatggcaaaagaagaaaaagatggcaagggaagaaaagccgaacaaattagatgttgaaaataaaatacctgtaaaagcaatttgggacaatgtcagggagttttatactgcaggtagcaaaaagcaaagcctgggtaactcatctctttcccatgtcagtcatccattgcagaaaaaggatcctggcctttacttaaccttgtttccccccttctttaccaagtagagcacaccatgaaagcgattaaatataattttaaaattgtgtcatattggtttctgtttatgcagcagacaactaagtgtgactttgaaggaaataatttgagatatatgaaggaaaaatcaccatgcagctgaaaagtgcttctcttaaatatgggctaaattctgtgatttgtgtaatggttaattttgtgcttattttgtgcgaattttggacgtcacccacaggttatttctgaaaactatgaagtctgaagaatgaggaaggtgccttttgttcccctcagtgccaatcaatactgtaactgaggtgggctggggtggtaaaacttacagacaaacagtaagttctttggggtgacagttgtcacgcctcctccctgccttctaaatgcccagaaacatgctagctctgagtagcagccctcaaataccttctgatatgaattgaaatccagtggagggcttattcaagttctaagaatgagccgctatggagcacacacataaacctcacaatggtgggtgggacacacctgatacacttcttaggacagaaaggactatggctgacagtgaaagtggaaaagaaacagtgggaggaatgagaggcaagaagcagcgggtagcacttttctcggtatcaaagagacgtgaaactagggtaaggacagaaaactcactcctggcattcctcagccaatccttgctttcctcttctatttcttagtatagaattgctagtgaggatacgagttaatggctaaggaagatactttgcattggtccagaagagcagattataaaaactcagatttggaagaaaatttcttagaggttttctggtttgatctccttaagcttccagaaattcctgactgttgatcatccaactttgatttgaatgcttccaattatggaatccactcaattgctgtggagtctctaagtgctaagctgccattatattgaactaaatattggtatcacacaccttttagttctgcttctgccctttgaagcaaccaagaacatatcttcaacctcttgaaaagctgaagaggggccatacattgtacaagaaagagagctgcgttagaagttatgacactttggttttgcaactgactagttcatgtcctgctccctcaatttatttatttatttattttcgagatggagtcttgctcttgtcgcccaggctggagtgcaagggtgcaatctcagctcactgcaacctcctcttcctggattcaagtgattctcctgcctcagcctcctgagtagctgggattacaggtgcccgccaccacgcctggctaatttttgtatttttagtagagacagggtttcaccatgttgaccaggctggtctcgaactcctgacctcaggtgatccatccccctcagcctcccaaagtgctgggattacaggcatgaaccatcgcacctggcctcctcattttatttaacttgttgctgcagtaatcacatactcaatattttgttaatattccttttgagagtctgcactaagagtggaatataattgcgtagctataggttgaggccaggatttttttttttttttgagatataatacaaaggatactggacataaaatggttagaccagaagttataaacccatgtcgttaaaggcaggtaggtaacggagaggtcgaaaggaatggggaattggtggtttgggttcctggaaagacaatagggactggttgaaatctgcaatttaaaagacataatctatctgaaggcatttgtggtagcctgactctaacatggtccccagtggccctcatctcctggtattacccccctgtatagtccctgcctacactgtacagggttggtctttgtgaccacttacacatgaaagaagcgatggcataacacttctgagcttatgtcataaaagactgcagcttctctstgcgtactctctcagctctctctgggggaagccagctgcatgtcatatggacattcaggcaacctagggtgtgaataatgtggcaaggaaataaaaggcctgctagcaaatgctcagttgagcttggtaatgggtcctctcccagcatctccagccaagagcttgactgcaacctcatatgagattttgagccataaccattcagctaaactgcttctggatacctgaccatagwaactgtgagattataagtatgtgttatttcaaaccactaaattgagggtaatttgctatgtaacaatagataactaatacagcattcagattcattttaaagtatcaatgtggacatgcacacacactttgctgatgaaacaaaatatagggctccagtttataaccctgggtttctcaatgaaacctggatctacagaagccaaaaggtatggttaaggcagcactcgaaggtcatttggcagctcagtttctgctggaagggaggagatgaaatccattcagagctcaagcaggaagctattttatccaccaacagaaacagaatataattttccttatcactgtagagtaacaacaaaccatgggacagaacctagagaaatmtgacagaaatcctgttctataatacaaagagcacttggattagagtagaaagccaggtggaacttcagtcttatcaaaatagaaaagcatttccccgtcactaaaaactaagaacaagcatttcacaaaaagtaatggaagaagcaacctgttatggtctgaatgtttgtgtccccccagaatttatatgttaaatccctaaccctcaaagtgatagtattaagaggtgggggctctgggagatggttaggctatgagggcagagycctaataaatgggattagtgccctcataaagagacccaagaggaacctcgccctttccatcacgtggaagtgggccctctccagacacagaatctkccagcaccatgatcttggacttccagcytccagaactgtgagaagtaaatatttgttgtttataggctgcctagtttatggtatgttttttatagcagtccaaacaaactaagacacaactcttctcagaaatccaagaaataacgtagtcacttggggtctgaaaccagagattgagaggtcactctccacccaataggagaagcagatcttagggggacaagagtacatatgaaacacagcagaggagtaggatatgtctttgaatgaagatgcctgagggactgaataaagaacctggacaactaaagaaaaaagacacctatggatcagaattgagacaatttcttcaggtaatggtttttaccaataagttaaggaagtactgaaagtgcgttttagaatcctactgaataccctttgtagggttttgcatagaattactccaacaattacgctgaatatagagttaaatatgaagaataaatttctagagtttagatccagtcattctcaataaatccttttgttcttaacattaaagaaaaccctcagrttttgttacaaatagaggatgacaggaatgggtgccctactcagtcagaatcccaggccagaaatctgcacaaacaggttaagtggaagccctaataggatactgctttaacaagaattatttctgtcaacacaatgcagagtcattatcaggcaatttcagaaagtgccaggaagcatcatgtggaaaattataatcaaggcctggctgaagttgggccatcattatggaaagtcaggaaaaatgctatgtgcagcgtggtgcttggcattttgtggaaacaccaaaaatgtcaactggggagactgagaaaaacatgagggaggaagatgccattggaaaataagcataaaagaggattagtgtaagatgaaagctcgtgtgcataaattagtcaaatagaaaatactgatagtctgtgatttatactgcttggargaaaataggccattatggatacaagagactgttagttcaggatagttgtcaaaaccattgcattaaaatgctgcctttttgtcactgttttcagtgatcttgatattttcaaacaagggttgtggtagactggtgggcctagaacctaggtagaagttaagagaagagaggaaggggatgaactatctttaagaagacttgagggttctggcaccccacatggtgtatttctacttttttgctatttttaggtgagactgggttagttattaacttcagaaggaagaaggagtcaccaagagaaacagcttgaggagcgaggtgtcaggaagctgctgaggaggtggagaggaagggaactgtaccagttttcccttagtggtggtggtgatagaacatttatgggctgactgtatgtgaggaaggattatatgattgaaatactaatttatttatttttgctagttgttcctttacccactttgcctttcatttgaaattcaaggagacagtctagtctatgcttgttgtttcatggaaatgatgtgatgagagaaaagtgaaaaaaattataaatctggcttttatgtttttaaaagcccggacatttagaggaacagaaatgacatatagacagaatatttgagagaaagcaccatgtttaaggacatgctgactccttaccctcaccccaaagtggaagaggtttcttggctatatcaaatattatactatggaaagttgctttccccaaatgcaatccccaaacctaaatccttaaatttatccagctacttccccccacacttgatcatgtgctttaggggagtctggccgagatccagctgctgggtcctgactggtgacagccaatgatggcggtcccatcctccatgctggtgattgttttaggcatgaggattctgcaaaataagatgtgaatggacagttctcctcacttttaagaagagatacaaacataagatggcctctttctgcctctgaaagtgttgcatctatagaagatattgcaactgctgtagccattttgcttccagcctgaggaggaggcaggcagacagatggaaaaagtcaaaagaagactcagagaatcagagaaatgaagccagagccctgaggctctgtggagagctgtcttatctctgagcctctttctatgtggtattataaattgcattatagtttaaggtagttgaatctgcttcttttgtgacctgctgctaaatgcatcctaattggtacactggctgagaggagaaaggaacatgaagggtagtgaagagagaggaattaccatcagtgcctggaacaaaggcactagccttgagggacycccrcaatcggaagatattctgcatcttcatctcacccagatcccaccctggtgaaccctaaacatctcctgaacccaggctgtgccagtttttcccataaacacctgatgaggatgtaccttccatggcagctaacatgagcactgaggattgctcagcaggaatggtaatttctccttaagcagaaacaatgttagacttgttaaaacatgcatggttatacatgtatgtgagacagattttcagatctattgccacttctggaacgaacatgctaattactacagaacgttgggtttagctaatatcaagcactgtaaggtggagctccctaaagctacgtccttctccttcactgtccaggttattgtactctttgattgcaattctgtaaggcactcccaaatgcagtggggttcagtaagtgtaggactccttcgtagcaaactagtcaccagaaatccgaagattttctcctagctctaccttagtatcattcttgtggattttggctgcttgctccatttctcgcttgcaatctgccaccttccacttgcttgtctgttggcaacacctgtgcatcttctgacactatcttttgcatcttgaaacaggcctcagatgaccctaccattggcctccctccagggaaaatagacacagaccagtatggctgttatcctgagtctcttcccagatacttgatcaaaacagagaacggtcattgaaaggccatttccccaatttgcctaatcttctagctctggctgccttgagatgatgtagttgagaggtttggcagctgaggctgggagaaagatgggatagtggcatggtcatggtcaagtggcttatatgggaaggggaatctgaccgattgaagttggaagagcagcggcaagaagagggtggtgggggttgggggaggggaagaaatgaaagattcttaaagggaaattgatataatatctaggagaacatcttagaatacgtttgtaggaggaccgtgaaattcaattgcctgcatgtgcatggtggctcctttacttatacctgctagaccttgggcaagttacttagattcaactcttagtttcctcatccataaaatggggataatacctcagctactccataggggtattgacagaattaaataaaataatagaggtaaagaatttagaacaacacatgccaatgggaagaattcaatacatgttcgttttatcattattattactcatatacttgacaaaaatatttctatattacctaatttctaaaattatgtgaagagggttacatactgtcaatgaatagagtatttctatcttttattatagaatttatcagytaaaaatatgattcatatcatagcrgtcaaaataaatttggtatgataacaccacatcagtcctttagagtttactttctttcgtttgtcatttgtggcttcagcatctgcctgctactttctacttttctggtacacacaagtatggaatattgagagacaactgcgtcctttttaagtgtaacatattaatcttattaaaaattatagcaagagaaaaatgccatggatatttaataaccttcttaaagagtcattaaattatgaaaacactactgtctgtagtaaagagtatcagatttgtcaggaattattaaaatttacagattaaccctgaatattttttktttctctattatactatctttcaattgcaagtctattattttccaaatataacttttwgttattaacttaaaggttgatctgagtttccattattctttcttttatttgtctattctcctgagcatgttaatgggcawtggaatgctgaaaatatgtgaggagagcagaggagaagaaaacagccccagaagtgaatgggcaaatagacctggaataattgaaaactggctataagtgttatatattattttctatggtagtaagtagatgattttagaaatacttaaaacctaaagaggyactataagtaaagatgtataactgaagtctacatttatttgacagctacttaattttttttcttgtaaaaaaagaacttccagtttcccaagacgcaacattgaattcaatcagaggtaaagattctggactattggattaaatgaggaggcaggagctactatctcttgcaggtgggtagccaacaaagtaatttcaacagaacagcaattggtcctctggtcacttgggaaactcagaattaattgaatgggcatcaacaagggagaagcaattcttytgtaaacaaacaaaactgtactcgtatgaaatgacctagaaaatagatgacaggagacctctccaatttgtgatttggtagagaataggacttctgtttctgtacctctgagacatctttgcagatactgaaaatattgtgatagatagtggtgactctagatactgtgaaaaattcttttcctctggccaaacagtacaagtagaatttgttttccaaattaaaaatccagattctatgaattttwtatttaaatatgctcagccaacagtaaggaccttacactacaaagttgaatgctttttgaagcacatgttagaagaatatggatccattgcaatatgtaatgtatgatttctaatgcagtgtgaaaycagggccggggatgaagatatggacacatctcagctttccagggatgctgtgatgtgggtgagcatgagctttgtctatgggctgaattgcatccctccaaaattcatatgttatggtcctaacccctagtacctccgaatgcgactgtttggagatagggtctttagagatgttattaaattaaaatgaggttattagagtggctcctaatccaatatgattggtatccttataagtagaggaaatttgcacatggctgggtacagagaaaagtctatgtaaagactcagggagaagaccatctaaagccaagaagaaagccttcagaaggaaccaaccctgctgacaccttaaacttggccttctagcctctagactgtgagaaaataaatttttgttgtttaaggcatctagtactttgttatagcagcttgagcaaactaatacaagttccatttgtagtagaagctattaaacatcattacatagtctatgtctgcactcaacaaagactggttcccaccattaagacaagctgctccttctaccacttgggaggaaatcagcttaaggaaaggtgttaggtgagtaacagtcagggcaagggcccctagagtaggggcaggggagagggcagtgtgtgaaaggaagggctaattttttttcttgaagggctagttttttttttctttttttccccctaacattttgtttttctaaactgagggcttttttttttttaaaaaagaaaatcctttattgccttcttattacaagagctttacctgttcattgtagaaatattaggaaatacagattaaaaaatgaagaaacaaaatataactgtgatctcaccactcaaaggtaactgttcacacattcttgtaaatctttccagacttgttcctatagatacatgaatttatataatatatataaatggaatgatttttttgttatcatctttctgtgtcaataatttttaatttagagcatcatttctaatgcctgacattgtttcattgtatctattatatcctagaaatagaattggtaggtgggatgtgtctaggcttagacatatgtaaagacttttaatatattttgccaaattgccctccagaaaggatgtacccatttatattcagcaagcctattttgagtgcaacataaagccctgtcactggtaactcttgactcagctgctcaagggctttcagccaaaatcctaggaggagagtgaggaaactagaggacactgaaaagctgtgccacaagtgactcagatcctgcaagtggctcgatggaggagtgtcccgtgttggtggcggaggtttttccttccttagcacaggacaggctgcggggaagcatggcaggatcagccgtcttgcgcccatatgggacctgcaagctccgccaggaggagccacgtcagtgcagccactaggggtcgccctgaagagcatggcacccacaggggtgtggagtgaggcgtgaagaggtgacttgtgttgctcacttgagcgtggaagagatatccctgaggacctttgagtaagctgagagggacccgtggactgcggttccagggacttcactgcagggatcctcagatcattgtgattatgacccctggttgttaaytttattcctcgagctttsagggcctgggaaaatacacgttatttaggaaaagrgaacagaaggactgatagcctttgtagtttttatgcattaatgggaaatgctatttgattttggttccttgcccagtataagagatcccagggggcctagttaaaaggaaagccaagcttatcttaaatgaaaaataaaatattttattttataaacatgaaaattatgtggcactcaataaaatgtgttggcaagtgaatgtctgctacataatatgataaataaaataggttaattcctcttgggagaagaacttgaattttacttatcattggaagacttcgaaataactttcaacaggaacctctctaaggaagataagcagtggtctctgatttgctggtagatggagtgtgtgagagagggaaagagcaccttcattgttgaccagaaatgatcatcctccttactgtgtttcaagatattcacagagcaagcacctggttgtccctgggtcttggacctttgctggtcagacgtcacaaatacatcagaatgacagtcccattgatcttaatgtggcccttgtctgagaaataaatttgtagatacaagtgaagaattaacaacattttgtcagcttctttggaatgtaaatttagctgccaaagtggtttccaaaagtaaacttatgttctgtacatttgcccaaggcaatgaataaacttccaataaaacaaacaaacaattctttctctggggttgttttcttctttcttcaagtggcactatggagaattaattacttcataatctcactcactatagcctatccaattaaaaatggttatggaaaaacagggcttaccatctatcactggttttggctgagaacttttgaggcgcagcgagggccggaagcgggttcggtcgttgaagctccagctcttctgcactttggtgggactgccctcggctgtgatgtcggtgcttggggacctcctgtcacctactgaggcttgtcggctcttaatactctggcccctggggctagccatgcgcactcgctccttaaaacttagcttctgactgtggagaacagaggcatgattattccatttcaagcaatttcttccactttgcttgggtaagtaatttgatgaagctcatgtggtcatatatttcaatagacaagatgttttcagcacgtaggagcatagcaattatttttcccttatttaaaatttgagctttatctaatctctatatttgcattcgagatcaatctcattctacaggtacatacatccttcttggattcattgtagaaaagactgaggtcatacagcattttgtacacaattacactgtagataactaagaactgttttggaattcacttgaaaaacagttgggtaattttagctttaacctcaacttttgagatttaaaaaattattttttgtttgggagcatatctctttgtaatttctagacatttctacaggtaaacagggatgacagttacatatatacctacatttggcatgcattttatattccaggcaagattatgttatccataaattcatgcaatctcatagcagttggtagcaccacatacataatattaaacacacaacacttaacattagatttcttttatgcttacattcattcttgtgagatgaaaaccacacaagatagaacagccccaacagataatgaatgtgatgactgatgaagagaatgagatgttatgttcactaacacaatttcctgctagtaaacaggttattgatttgctgtggcagctactggtaaattatatttgttcaggcattcagttctctgatgccggctaagatcaaattgttgtgggctgataaaagaagcattaacaacaatcataaaatccaaagtgcatcttcacactttcctaatcaagagatatgctatgatgtgctaggaagggcaggttgggattagacacacgggggctagggttctcatctctaacttggagataaacatagcaacacagctaagggattcttgtgggaatcaaatgaactgtaagaagctttgtgtacccattctgtttttttttcttgtttcctttatagtgaaattatgccattcattagaaggtgatactgtcatcaatgtgagaggcccaggactctgcagggcctgaagaaatcctgggcaatgagtctgagggaagtctctcagagcagctactctgagagagtaaagccgcagcctttgtggggtatgaaagcagcgttctcatggataaggcttatttgagacgaagtggaggccttgttttgtccacttaccgcaatgtccactgtccccaactgcagcatgccaacagcaaatgtgtttagtggatatgtgctttgtagctaacaagaaacagtaacatttatttttccatgcctagttgcttaacaaacgatattctaaaagggcaccacgttttatgtgtgtttacatgaaaacaaatcaaatcatgaactggtggtcagggagttctggaaacaataaacaagttgaccatgcaactgacagctcccctctgaaatgcagacacagctaagtccagcatgactcgctgaaggcacatgcaaagaacaggcggggcagtttggtgatgaggtcaggtgggttcaagagttctttacaacaatcccaacagtggaagagtttatctgtgcttgacacatgtgtgattaaatgatagattacattaaacaagagcaacaataacatcataaacctgcatcttttaattctcaggctaggttttccatgtcatcccaaagccttcaattatttaaacaaatctgtcaaagggatggtgcccaaaaatatctacttttctcaagcttttttttttttaaattgtaaaagtttcaaatctctttttagtttcaacacatctgttccataatttaaatttacaatgatctagttcaggaagcatatgctcacttctgcacctttattcagattaatgaatagctcaagttgacatagatatcattacaattggtcctcactatatttgattttatctattaccttttctggaactaacagatgctaattactataaaaggttggttttagttaatatcaaattattttctccaactttcaagatatatctcttttctatgtcaactaaatacataagaaatggataaaccatcataaaaacacttaatatgaaaaattaaaaaaattcaattactaaaaaagtaaaaacatccaaaatgaaagtattagcattcaatccaccatagtttgtttataataaaagtattttaaaaatcatacctataaaaatatttttaaaaattgcctctatgaaccattttgacattaccttatgaataaattggaaaatgtgagtaatattctctaaatcttagtatcatttaaagcacttaaagttgacaaaaataaattctaagtaacatttcccttttgtccttctcaactacatggatatttgctaatgtctattattttaaagattcccaagaattattttaaaataaactcggcatattacatgttaaattagaaaaaatgtaatgttttcactttctcttttgacataattatatgaaagttaagaataagattctaatcaagaactttttaaccaggcaaaattttcttttccaaggcaaagatctgttcttgtgtcctcttacaaaaagctcactttattatttttctactttgtttccctttgaaaatcaacacagcgtcttgattagatgactattaagctgatcaggtgactgttactgaaaacacacattgaattgattaaaaatatagactcttcactgaaacactgaagtcttcattattttcctgccttttttttggtgacatctacgaatatgatttttgaagatttatgtaacagtatttttaggaagaatgccaaggattatccccaagagaccaacaaggaggtcttgctttgcagaaagtaaaaaaaaaattgctgtggtcattgatcggagcatctctcttagggtacagtcccacagttacagctgaggaccacgctcagcagagcctgcactgtcaccctgcaagagagaattctctcatctctaggaaccagatgtacaggttattcaaatggcctagcatgcagtctactaccggctgttctctgccaggcaactgtgtggcatcatcataaccccacagtaatcctctgggacttagaatgctgtagttattgttatacttaattagggttttagcccttcatgggataagcattctacaaattctcgcctcaggcacaatatggcaactgagccataacaatccagtgcgtgcagcagctcagcagttgtccaaccacaaggaggcgccaaagggctgactgccagttctacgcgggacgccgactatttgtcccagcggtggagagtatcaaagcaggcaacaggcaacaaggaaaatttcaagcgggttgaaaacctcattcaagaagtccctagaaagagtgagtctctgaacagggctcaggtggggtggcggtgtaacctggtcatgcacctgaggttagttggcattctcaaatctcatgtcaatagcccggatgctgggtacctctgcttccgtgaggtgtacattctgaagagcttctgcttattactacagaacttactaggagtgagggaaatagagcagcacattactaagcatttcacgaataggaaagtgctcagggattcttttataaaaacaaagccatttggctttattgtttttaatatagaagtacacagactatttaagcagagagtactatgttgtttaattgtgctgcttgaaagatatccagtgatcttaacggctaggttgaaaaattggatttgaactaggcattacatacaaatgatgatagtctctgtgttagcatgtaagaataaatactttagaatatagctacccctgtaataaatatcaataacacatagtataaatgattaataacgtactttagaacttcaaagaataactacagaaatcaataaattcatgacattaattgttgaaatttgaaaacgtaagttcttggtttgtgtgaaacatctgcatttatagttgatataggtaaccaattgtcagatagaatatatgttcaacaaaacagaagaaaagattctagattgctggtttgtaagaaacgaaagaaaagtacgtttcttattttaagtcctatgatgtgttgttagaagactaaatccgtttcctctatcaataaatgtgaacagaaggagagaccattttggaaagattgtttttgaaacaatggaacattttgccaataaggacacaagttgactatgttggaaaaaaaccaaaatctagtcttattgagtttagtttaacaacacatgcagatcattcattgcacacagaagaaagaaaattgaaataacagaaaataaatgcagaaaaaatataagagcacacagtcttccaccagggttctagagttctctccaagagccacacacagcttcagaactcccccttcccccaaaagccaaccacacaggagtggttcagaaaaagcactcggtggctcacagcacaagagtgtaatgtaatataaaaatatcatttttgccttaacgtttaagacatgcatctttacaacagtctcacaggtacctggtaaagcaactttagtctactcagaaatctgaaagggttctagcaaagcttttaaaattgccattaaggaagcttaagtatcaagcaggcatatagccaaccattgttgattaagaagacagagtaactagaggcagcaagatgtatagataatctcaaaacctcagataatataatctgtttttgtagcaataaaacttaggtagatagaaggaaaagccttcttgtatcaatgtgatgactgactactatttgataatctggtcaaggaggaagggagaaccacataaaacctcaaggtgagaatattggcttattctggacagatggattcacaggtaaattcagttctctgaaaatgacaatttatatcaaaacagaaaaaaacttgtcccattttaaaaatgacttttccaactaattttttaatagaatgaaatcaataaacacatttaccaccacatatatgagattagtactgttttagtgggaattcagaggaaaagaaatgagtgattaaatgatgctaaagaagtattttatgattggagtagaggaaaaaacagcaggctcagttgagactaacagtaatttgtacctgaatgtaccaaaaagaactgatgaaacagtattttcactattgctcagttgagctatatttaaaaagctcttcttcagattgatggcttgtattttwttttattttttattttttgagatggagtcttgctctgtcrtccaggctggagtgcagtggtgtgatctcagctcactgcaacctctgcttcccaggttcaagtgattctcctgcctcagcttcccaggtagctgggactacaggcatgcagcaccacgcccaactaatttttgtatttttaaaatagagggggtttcacaatatgttggccaggctggtctcgaactcctgacctcaggtgatccactctctttggcctcccaaagtgctgggattataggcatgaggcactgcacttggccattgtatttttaaagaaaagttttggatctgtcataaataatgtgacatttttccttagcccaagacatcgtaggcaaattttgtttaaacataccctagcctcagtgtagaaagacaaaatccctttttaacaagaacattccaaagccgggaatgtagttaactaagggttctataaatgtgttcgacatcttaatcaatgttgcagaaagaaaagcctctctgtgtatgacccactctacagtcatggctccgtcctttggtgagagtgccaggcacccagaggcggatgttggctgctgtgttgagttcatctacacttgggtttctctcagtttgtaacacaaagaaaaaccatgaagaaggacttaggagattccaagctctgggctaaaaggtgaaaatgttggctcctgcttgggctgaagcttgtctcctctgcctttctgactcaccatcaataactcagtggtcccaaaggcagtaaattactctgcagttgggtggtgttaattagttcctttgaaatggggtcaagcattaattaacaatactctggacccagatctactcttctgtaaggaagaactctcattataaatgcattttactttgtgatattttgcttgggtaaggacaactttgttactttctaagatggtactgttgctattgttattacaatagcctttctgcattcattatgcaggattataaattctgtgtatggagcacaacaaggtgaaagcttacataatattaaatgggagcttcagcttactttccttagattattgcaatgtttttaattttttatttctctttttatatttctcctctcttcccattttttgttggtgttttatctcttcccacaaactacttgaggtcagggccattttattactctatccaagaattatttattgagcacattctgtaatagctttacccagggtgatgtgacagctagttggaagataggacacctaagtgtatgaaatataagatattaaataatgaatctaggctaagtaatagtgcaggacttatttcaaggtggtttttgccaaatgttcaatgaccacagagaagcaagaaatttccatgtgtgattctctaagtcatcaacccacttcagtggttttgtacatatttaaacctatgggtgagttatctttgacaacctcagtctgctgcatgcagagaggtaaatgtcgtagatatatgcgaacatcataaatgtggaaaatttggttggtagtttttttgaatagtgataactgaataggaagcttgtttttggactagtgagcagaagctcaacagtgacactttaattttgtctttgttttctgctgtgctaacatttaaaaacagtacaatatcattgtgccagcccaaggtgtcccctccttcaggattgccatagagtttacacttattcaagcacctccatgtcatttacaaacttctcttttaggtgttaacagctccgttttggaggatgaaactaagatgggtgatcgcactstcaggtagctctggaatttgtgccaaagatggtctctgtcctttggatttggaggcagatcaccctttgagataattagtaaatggaaagctcctgagacaatgaaagcttttaaaatatcaccaaagcaactataagctaccttaaaatggctatgatttattttgtgtaacttttttcaagtaaaattgtcacaacagaaggatggtgagctctgtatggaatctagaaaatggactaaaagtctagaattggtcagcttgtctcttccagtgtctaggcaaagactattccgaatctaatgactagaacctctctttggtcaaaaacgtttcttaggtggggaagaatgacttttttctggaaatatctccaaggaatatccaatgcccttggctctaactctatgctaccaaataagagaaagaactttaatgccatcccttgggtaggttacctacgcagaagatgtgcctgatgttgtatatcctatcgtgcctatctcccatcatagacgaatgcatttatgttttcatttgtttatctttacatataaacataatgcaaaaatggataatccagagccttaatacaccaagtgaactttcaaaactggcttcagtattgcataaatatattattattaatataattattataatagtactaagctaaaagaacaatccctgggcccacactggcctccacttagggaccaactctgggtaggtggatgccttcatttctttatggaaacacagtgacaatgataggaaaaaaaatgtatctcttcttcctttccaggcacctgggattctccttgctggttctgcctctgccactcttcacatcattaatactgggttccacctggctctgtttttcagggctttgctctcaaatctaggcacttcctggtactcattaacacagatcaagaaatttttctttcacctcgtattccctctaggtttaattctctgctgtaatctgacgacgcattccatctaagtcatgggaagctgataataaattatttggggaatttttgggagggttgtcttcttcctaaaagatggggatggggctctttgagtcacttgagtagacctcagcactcagtgggctggagatctggagatgtcacagagaggtggtttcatcttgccaaaaaaaaagattatatgtataggtatatatacatatacatataatgtatgtatgtgtatatgtatatgatatatatatgtgtgtrtatatatatatatatatatatatatatatatatatatatatatatcactccaaaagaaggaccctagtgaaggggagtgtatcctagactgctgcctggactttttacattcagaaaaaaaatttctttctttcattctctagattaccatatttgaatactttgataagacttctgtctgggaaaacaacagcaaggactaatccaagatcagttcccctcctcccccacctccaaatgttccatgccctgcagattttgaaaaagcagggagtgagttagggaaagacactttgatactaaggggcgaaatatcaataaaatagcaatctttgcaggcaatcttgtgaaaggtcacttttaatcatcttgtatttgttgatcgattttactcacatgagacacatttaaaacacctggtaggtatcagatttataaacaaacatgtagcaagagagaaatcacaaacctgcttgatgcttccccttgttctttccttcaggtgcgtgcaggcagaagagaaatgatgataaaccagtgaatatatttatagcacttgataatggccaaattggagattggggaatcaaataccttaagtaactcttttcatgcaagatccacaaaagcagtgttctttataataaatgtactcaacttgctaacatatattctttgtgatacagaccagagatagcacaacatttacttggcaaagccaagactgcccacatagaataaaaaacaatagacttttcattagccaaagctatccatggctaagaaaaagtggttctgatctaaccagaattagcaagggctcttagaatgttgctagttacaacataactgttctctgtgcatctggcagactttggtttctaaacctggattcattaatgaattgtatctcagtcacttgctgaggcagatttttttttgtatcgtataaaatctaaatttccttggagtaaataaggtacatagaatatttaccaaaactcttttagcctatactgttgggtggcatttgtaataactcattttagcaaatgtaggtctaagcaccatggtgtagggtctgtactctttgcaaacgagctgtgtgcctttgggcaggcaccttatttgcttgcaggttttggttttcttatgagtaaatcaaaggctttaggttagataatctccaaatccccacttcttaaggtaccacaaggtgtttttggagcttgataattccccatagcctcataaaatttctgactcattccctaaatagcatatttacctgtgttttgccctttgcagcttcactctctttgaggagaaaatcaagaaaagtacttgcttctatacatccttctgttattaaaataaaactttgaaatagaattgctaagacctctagagtgtatgtaagagacaaaccagacctgaaaagagagagtaaggaactgctggttgtatccctggcaggtttgagtgtccctcctcccatttctctctgccctgcacagctgtttcttagacctctctttcatcctgtttagtggaatcaaagcatcccactatgtctttaaaactggggaacaagagcatggggctggtgttttttaatgataacagtaacattgatgatgatgatgatgatattgttgataaattgatcttccccctggccacctatttgaaattatagcctctgatgctccctaaattccttctttaytttacttttctccttagcacttaatgccatctaacatatcctatatttatttatttatattgtctatcccaacatcccttgaatacatacttcccaaggccagagattctaactttttttttttttttactccaactgcttcattctcagtgcctagaactatgccttgcacatcataggtgctcaatgagtaattgttgaatgcatacatgactgaataaatgatctttcccatcagaagttcttaggctgaatgctaaaggaaaatacacaatgtaaataaaatagtaattgtagtctgtttcttactacaacactctccattcggtaagccacttaaatgtaaaaagatccctctaagtcactgaaaattattgtcacttgattaaagcaagtttgctttgtaaaacaaaagtttgaacttggcttcagggactctgtgaatacattaaaattgtaggcaaagtattgattttctcgtgcattgattatctttcttgggaaagaccccataatttccatcacattctcaatggtttaacaaaaaacatcaacaaggattaagaacctctgcattttgaagcaatgaagcatcactggaaggggagagatgttaggacatctagtttcccatgaactttaccagtgactgctgtgtcattctggacaaataactgttcttcattcaatggagctgagccccatggttcatgagtttgcaggaaaaggaaagtgagggaaaggcacagtaggacatgaggaacacaggtgtttgcataaatcctcctccacctccacccccacttaagacagggaaaatatcagaggagtagaaagaacttatgtgaataaaataatagttgatttactgggggaatttgactcattattaaacagtttttccaggcttttaatgacttttaatccaaaaactgcagtaagtgggaagccaaataatcacatatgataatagaccactctcctctgtcacttgagaattctctatcagttttcctactcagattccctttttacatttacctagcaaacttcatgaagacaagaaatacaatttctatataatttttatttttggttcatactcccaaggaataaatggcacaggagttaggttctattttcggttttttgatatcaaaatgttgaaagggtcttaaactccataaaaagttcaactaaacttcaagatctaaatgaaaagaggattttaatccaaacatgcattcaacagcatccatgcttctatccatgctaaggttccatcctctctgaaatccctggagtgctatgaatatctctgtcctaggtgctgacaagaattttagataccacccaccaggaggcatttcccattagagcttaggaatcatcttgcccaactcttgtccttctctttgtgggtgggaaaactgaggccaagggcagaacagggaagtaatgtagttaatgatggatctggtgcttcccaatggtatgcattctgctgcatcacaaacctccattaagacggtactgccagggaatgtcatggaggtttcctcagctgatatctcccaagatcagtamgaacaggtggttttttgtgagtcacagtagttaggtgtccygaatcccatgaagccactaggattaaggttttgttgggctatgaagaaaagcagctggtgctctcaaatgtcggatgagcaatttaataacttttgaacaacctgaggaactgactacgctaatcaagctgggtgactcacagaaagcctttctcatgacttactgcttcggtatttcaatgaggacttctttaattaggtggtgaatatgatttaacattttctgtgatagttgaactggagtccaggtttccaagactccaagactaagcccttttttttttttttaattacagatctctgtggtaatcattaggactgtccataatgtccttggttcttgcctgcttctaggcacatggtaaaaggtaaaattgtacttccccattttctttgartttaggcatggctgagtgatttactttggccaatgaaatgtgaagaaaagtagtcttactttaaaattgtgaatgcaaattccaaattttaatccgctgggtcccattgcctcattgtaaactataatcctattaggactcctatttttctctttttttgccactgatgtgagtttgatctgcaagtaaaagcttgaggaccatccagagaggatccagatgagaaatggctttgagagatctaaacgtacaaagatggattactctctaagcactcatctcttggggtcaggcgatgggtgcaaaataaataatccttgtttttcaagaactgtggtgcttacctttaggatgctggtgggctttacgaaatgagacattagaaagtaagcatgaaatagtaaaaataaatctctataaaatttacattattttaatctttaaccccagtctgtggattgtgaggaatgatactgattccatttagttttgtgccagaactgctactaaataggtttgaatctctytaggagcaacagagaataagagaagccaaacattaacacctttttttgtgtgtgtgggtatggtttgtttaacagacttgaaaagactcaactacagtggcagctgtcacactgatacctacttggtagggctgcaggtgtgcaaggccttcaagtgtggcttccaggttgcaatggaaacagatttctcatcagctgcgtaactacgccaaacacactgcatgtggcatagatggggacatgaaaaagaaaaaagagagcaggatttagaataaaataaaaagagaaatgattaagttactacacatgaagaatcttttgcctcttatacttagccctgataaatacccaaaggaggaagaaggctactttggcattttcagctggctgttaaacatattgcaccacatcagaacttcttttattttattttattttattatttatttattttgagatggactctcactctgttgcccaggctggagtgcagtggtgcgatctcagctcattgcaatctctgccttctgggttcaagtgattcttgtgcctcagcctctagagtagctgggactacaggtgcccaccaccatgcctggctatttttttttttttttgtacttttagtagagatggagtttcaccatgctggccaggctggtctcaaattcctgacctcaagtgatccgcctgccttggcctcccaaagtgctgggattacaggtatgaaccactgtgcctggccagagcttcttttcaaaacaacataccaagaagcaaaaggcccaaaaagtgcaatataatgtaatttttgaattggtaagggaaagatactatattatccaaaacaaaaagtaatgattgactggttaaatgctaatatccaagatagtagttaggtgagcgacttgagcatgagcatacattctagagattgatctttaatcaatatttgataagggagaagcaaaggactaatgaaaatccattatgcaactagtaagctaactagttaactaatgaacaccagggtatgctagtgattgaattaatgaaatccttgaactatgtaatacttctaatgctaaaaatgaagatagtgatatcaagaagcagaactaaaacargatggggaaaatgtactctctaggtgtatagctgcaaaacacctacggatttatgccatgatctaagaatatgtttatagctctttgatgtaaaacatcaactctctccatttcatataattacacctggcatacataagacaaagtatttttatgtgatcctcaccatcaaagtgtgaattaagattcctgttttgtaggtgagaaaaaaagrgctcagataaatgaagaggtttatacaaagttggtggagttgagacaatatctcagattgcctggctgtcagtcatagaatccctccacggagacttgctgactgcttgaagactgttattggaaaagcttccatctgaactgctcatttgagagattgcccgaccttactttcccatatagattttggtaaatttctttctttttaatgagtctgcaaacatctctaatggccaggtatttactccagtcccctcagagaaaacttttttattatagtagattaatcaaaacattttattttatgtgacaaacctatttatttattatttatttatttgagacagggtctccctctgtcccccaggctggagtgcagtggcacaatcttggctgtctgccacctctgccttctgggttcaagcgatgctcgtgcctcagcctcctgagtagctgggactacaggcacgcaccaccacatccagctaatttttgtatttttagtagagacagggtttcactatgttggccaggctgatcttgaactcctcacctcaggtgatctgccacctcggcctcccaaagtgctgggattacaggcatgagccaccatgcctggcagaccaattcatttaaatgggccacatccctagtacataacacatcagtcatgattgtgaaatccataatgaagaaaatgtgatctaacaatattccttttcctgagaatatcattgaataaatgtatgctaaataaaagttaaaaattcacacaactacttgggaaaactggaagtttctacgaaagctgaacatttaagtatcctatgatacaactacacactcctaggtatattttcaaaatatatgcttatatatgttcattaaaagatatgtactatatgttggtttctaataaactaaagctggaaattccaaaatacccagaaacagtagaataaacagaaaatttgtgacaccatttacatagtacaatactatatggcaatagtacatatagctacacacaacaacatggatgaacttcatgtgaataacgttgagtgagaaaaagaagacaccaaggagtacatttccataaygtacaaaaaccagggaaaactattctacgctgttagaaggtagcacagtggttatccttatgggatagtgattgcgaaggggtacacaggaggtcctgctctgtttatctgagtgctggttatgcaggtgtgctcagttctcctaagatatgtgctcttttctgcatgcacattgtacttcaatgaaatttcagaaagtgacataaaaaaactagaaaaatatagtggtagaaactgagggactttttatatttttgaggaaggtttaaatgattgaaccaaagttccttgccttcattacatggctcatgctgatttaatctacaaatctgtggaaatttgtgctaagtatcttgacatcttatataatgcaactattgttgcatcatcttgaaatgttaatctttgcaaatattatacctgcacaatttatagagtgatttagaataattaaggaaaacacatggatttaggattgcagcttcttctgtagtagtgatgcccagagatcctctaatgttgtgatgacacagacggctgccttaattaaacaatttccatagaagatgtcacacatatatgatttttgatacattgaaagcaagactcctgtagaactagaagcatatggcaggtctgcacattattagataccagtgaaaaaatccaaaacaacagaacaacaaaagaatgggaccaaggcattgcctgtgaatgttataaagaactgggggcaaaagaggccactctgagaaaattaaagattttctttacaatgagacctgatgtcttgctatttttctctcagattgatcccaacagctaagctcttgttcccttcattactcatctcccaaaaatgccttttaaatgagaggtatggaaggtgcaggtggcatctgtcacatggctgatattagttaacagtaaaaatgaaggtggaaagtggaactctatgcccgttacactctaataactttattttgttcttaggtctctcttagcaaattgtttctagtagctgaactttgaacccacatccctgtgatccagtagctgatgttcctatatttaaagccaaaatcacacagtagttggcaagagaaaaataacacttagagggatttcctatggttaatttacatggtgtatacaattcaaaggacaaatcaacaagaagcaaaatgagagccaactttgccatttatcaggtgatgctggtgctctaggcagtcaaagagatttggactttgctcaataagtacaaggccagtataattcagtttttttgggagtattttgtttgtcttgcaagtattaccattatggcatgtttgatccttactggaaatggtttagaacgtttcagctgaccatccaaaggaataatgaacacagagcttattttttcaaggtacagagtttaaaatgtgaaagtcctgaaagttttaggctatgaaccagcaatccctttccacatctttcttcacactactttctgttcctcagaggcaaccccttcaattcttatagttgttgcttctatttttaagaatccttatttattattattattatttttgagacagggtcatactctatcacccaggctggagtgcagtggtacaattatagctcacagcagcttcaaactcccaggctcaaccaatcctctggcttcagcctcctgagtagctacaggtgtgtgaggactacaggtgtgtgccattgcacttgactttttaaaatttttttgtagaggtggggtctcgctatgttgcacaggttggtcttgaactcctggcctcaagtgatcctcccaccttagcctctcaaagtgcgggggttacaggcatgagccacttgcgtccagccaagaatgcttatttttaaggattatgcttatagttatatttcttgatttttcaattttagacattatcaattaacttcctatcctgaacgataatgatattgcccacttacatgccctcttcccctcctttcatcctatcaacattttaatatcacaattcttagctaagttactatttaatattattatgacaatgtaactgctgttcccagttcagcaatgtgatgtactatggctgctctttctttcttatacaagtttttggtttttttggagttataattgccctattttaatttcttgatttgcatatatgtacctgttatgattacattccagatctttccaacagaactataaaattcctctggtcaaatgcatcatgaaatctgwgaactccattctttcgcttccttgaagatctttctcctggagctctcagcctccttctcattctgttctcaaggcctgcatagctgttgtcttgggacttcccttccctattatcatagaaatcccctttgctctttcctgtgcggaatctcttgttttcttgactccatgtctctttctctcttggcttatccccttgttgtggaagagaagttctatttacaaagtttcttgagtaaaggtaaatggtagattaatttttgagatcttgcatgcctaaaagtgccttggtgctgctctcacacttgatggtggtttggctggatatagmgttctaggttgaaaataatttctataatttcgaaagtattgtttcattgtcttctaatttttggattactaatgagaaatcctatgtcatccttattcttgttcctttggctctgtcctgctcagaaagcatttaggatccccttttggtaagttttctgatattttactgtgataatcttggtgtgaagtttttggttcacagtgctggacacttggtgagctcttctactgtggccactcctgtcctcctgttctggagaatcataatgttgtatttctttgataaaatcttcctcttagtttccctgcacttgagctgagacatctttattagctggatattggaatgcctggatggacacttcatgtttcttatcttttttgctttattttcaatctctgtttattctagtttcagggaaattttcacaactttatcttaccttctgttttttttcctgccttcatgtttttcacatctaagatttttttttctgagtctgttcttatttatttatttattaaagaaatgtggtctcactatattgcccagactgatcttgaactcaagcaatcctcccaccttgccctctcaaaatgctgggattacgggcatgagtcaccacacctggcactgtttttatttatgactggagcactaaaaagatgtaaaatctctatataagtggcttgagcttaatgactagtggcttcgctttagggtaattgggtggagactaagtcattttactaggggaagccaaagtttcaagacaaatatatatatttttcttttgggtcagttggcatcaaagcaacatcttctaatctatccctaccaacatttatttcacaaacttttacttaattccctgtttctgtttctaataaagcatatatttatgaggatgtaaatgctgctttttgaaaggggtaatggattcagattcagacagcagggatttgagtcctagctcctcctaggcttgtctcgaggatcaagtaacataatgtattagaagcaccctgcaaactaaaaagcacttcatgagtcttaagcattattaataaaagttgtgacatttgggcaggtattcaaaacattactgagagctaatttctttttccagactgctccagcttgaaatgaaaagcaaatttaaaagaatcatgcaaagatattgacacagctaaatttgctgcaagcttctggggttttaaatttttttcctaaaaccctgaaatgttggttaatttagttctctcaccaaccaaatgatgaagcaatttgggcatctcagttgcccttttaagaagayagtgactctggcctaaaataaatgagacgcttttgggcttgatggtttgtgtgttcagcagaccaagtcaggtttattgggtaagaaggtgaaaggatgattaaatgaagtttgcttttcaatctattacatcctgaaatataaatttctataatatataatcaaggcttaaagccttgaattctgtctaaagactatagcaaggaagaacaatgaacaaattaataattatattattatttctatgtgtaataaattaattgcatttaaatgaaggagcacttgcttttaaaattagtagattctactttgattaatgaaactatgattagattttaaaagtactcttgaatgcttcaagcattccattttgcattatttttgttaagaacaacatttaagttggagttttaagtaaaataaaaactcacgattttacttcattgttacctgcatttgtacaagttcaattactgatcacaatatatgttacataacccagttccataaaataaaattctaggcctccargtaaaactgttcaattagcctgtcctccacagggttacctgtgagggaggccttgcctcattttgactgtagacatataaatgcctctgctccaatgatttgctgtagaaataacaatttattttcaagttcaattggaaattattgttgcacagtttagtagtcaataatgacaagttagatcaggagatttcctgcagttattctctatatttctyttgtatggtatggcagccgatagccacctgtagctattgaacacttgagaagtggctagtgccattggcaaacttggtttttaattttaattaatttaaatgtaaaaagctacatgtagctagtggttactgtattgagcggcacagctttgtatcatcacaattgatatgtgcatgagaaattcctcaaagagctcactttctaacaaaacagctgatattccaagaggttttattgtgtaaaatgtattattggttccatatgtagacagagcttggtgctcagacggatgaaaggaacccatgcaataacttctgcactcacaggttggaaaacgttgttctagagtgaaggaaaattaaaggataagaacagtaaagagaaaaacttattagaagtattggaacatgtgtaaccagttaaggagtgctaaaggatgaaagcctatgaattctggaccttggggtattttgcgtgtgtcctaaagtgtgtgactcctcttttcattctgctgattattgtttggcatcagatcttaaactccaacttcatataagaaaatagagtttactttctctttagtgaccttttaaaacctgtaaagaatatgtaaaaaaaaaaaaattgtaaaaaataatgtaaaaaaatagagattctcagtgatttgcactggaagtcatgcctgatggtctactttcttgtcaacagttgcagaatagcttgatttaaaaattaatatcctcatttaatgattagatataaacagatctccttcatgatataactgaaccatactgcccccttctttccccagctccatgtctgtgggaggcactgcatatatcacagtcacagatcaacactaaaggtaggggttgtggtggttatctcccaccaacccacccacccaaacctacaatctaaattaaaacagtgtgcttgtggccgggagccgtggctcatgcctgtaatcccagcactttgggagaccgaggtgggcggatcacgaggttgagagatggagaccatcctggctaacacggtgaaaccctgtctctactaaaaatacaaaaaattagccgggcgcggtggcgggtgcctgtagtcccagctactcgggaggctgaggcaggagaatggcgtgaacccgggaggcggagcttgcagtgagccgagatcgcgccactgcactccagcctgggcgacaaagcgcgactctgtctcaaaaaaaaaaaaacaaaacaaacaaaaaataaaacaaaacaacaacagcaacaaaacagtgtgcccgttactgcagctttaaggcaagtttcctagggccttggagcaccacttcaagaccctccagtttagaaattcggtagcttccacttccctagcaggaggggagaaactttagattgtagaattattttgtccataactaaatgtcaactctacattatgaatctaacaaaaaatatattttgtgattcttaacctggatctaggatggaaaatatatggatggcaaaaggagaagcattccttttagtgctgaagctaatcctgagttagtgaaaagaaaatgaaatactaaataacaacctatgtattaggagctagcttcaaattatatacttattgtttaatattctcaaacactgatgtattccatagtcccatcagctctcaaaataggatagctatttccgctaactgccctagatggcactaaaagcaatttcacaggtattaaaccttgacattctaaacaaatatgttgttctttaaaacagcaacatacatctggctggagaaagtaattggaatgcagggaacaatgccctgttctgctccatcacttaatgatcaattacgtttcatcaagtaattcataagacatattagataattccacgagccacacaactgctaacctttgcatggccttgctgacatggttacttagtctgaacaatgcatggaccatttgctaaaaatacatgtgtttcagtttgggagaggaggaacaaatccaagactgtccaaatccaagactgtacattaagttctgacttcattttatraaaaggaacaaagcagtagttctaccaagcaatgaagcacagagawtggaaaatgacccatcaagcactrtggacacaaatgttgccatctacctattacattgacatttacctgaatgaggttggcagctgggttccttcttttctcaaagtgtttctggcggtgttgttcttgtacttttaatgcaaaacctgagccaagaatgccctggaacaaaatacaaawatggcactcaaaaatttcaaaagcactgttaaataatacaaatattaaaaagtcactaaaatgagtctgagagaagacaaacggtatgtaacctgtccataaacatgttacttattaaaataagcagtatttatctccattataataccaatagccaatggcaaattgttgggcaatactgccaggagatacaacttctgttctttagtaagtcaattaggcattgtcatttattatcttttgtggtatagcataggcaccatgattataaataaaatcacaataaaatttttttttgtgtgtgtggccttctctgtgacatttctttttgcctaagttagattgaatggtctcatccagtgatggaatgtagagaacatgaatttcaacttgggacagagctggattttaaatctgagggagttaaagtctcactgctgtgaacatgggaatacttctagcactttgatgagactctgaaagttagattctctattcatgaaatggaggagagaggactgtataaaatctgtcccagctgtagttctttataatgttataactgtacacctactaaaagaaaagtaaaatggagagcagggatactcagttttgaagatayagagtagaaggttttctattttgcccatttgtacactagagacaagaacgtggatcattgcaaagcacattcccattttaattcacacttttaccattccttgccttttttattttggctcacctattcagtttttgggattagtaagattagtattcccttctaggtttacattagttttgggccagtttgcttttcttctgcttatcatcttgatctgccaaaattctggttctttgatgtcccccactcttttcaatttgctctggtctactaacatttgtaaaaacaagatgctttgtctcagccttgggttggcttttggagcttgctaaattcagtctctgggctttgtctttaactcttgagtttattagcatggggctgggagctctgctgctttcaagtctgtggattttacttgctagctataaattattagttttttattaaacttcaaggagtctaaccctttsgttagagatggacattttataagcactaagtcagtatttgctacaggtaaggaatggttgcttttcttttctttttatttttagagtagctcaaagatggttcaaagatgctataggctgtctggagaggtggtgggtttttcatttctagaaggtgttaagtctcaactgaataacaacttggctgagatatttttgggctctagataacctttaaccttccttcttatcttgagattccacacttctgagtacatcagtgacaataaccagacaataagtaatgcaatcatgtttaaaatatgcagtggtctgataatactatttgctactcgtgagcaatgatctactccattattaattagtataaatgactgtactatgaaattagaaattacatcataggttctgttttccatctctccttttcagtgactgtcttacgctgtctaagatctctatctcatacaggttgtgattgtacaaactaagctttataaaaacctggtctctgtgatctggtttatagatttaaacaacatttccctccatttaggtgttataaaaatgcccctccatttctaaatccagaacaacttaagtcatttgtaacttctaatttttttctgctgtgtaagatcatttaggaaagatttctttattttccctttaatactacttttcataaagtgtagacatgtaagagaatatgaaataccaaaatttctggcatatatttataatatgtagtatatatacatgcatttatgtgcatatatgtgtataatccacttgtatggagcataatttagattttgcagacattgaattaacagcactagctaccattttgagcacttatgatgtggatgtgaggttcggagtttaatcccctttggaaaataaagacaggccctacatagcacaaatttatcatctgccaaacaatctaaaatgtgctgaaaatcacattggcattgctcggtaacatatattagtgaatggtaaatgttcactacgtatttcttgcgccagactgtacattacagcagttattaaaccaggtctgcttattgtctcatcatggctcctttccaatttttttccacctctctcttagtacacagcttggtgcacctaaacagaagtctgtgaaaataaggtctattatatttgtatatacacacataaaacatggcttaagctttgaacatatatgtcatcccttcaaatactgacaccaataaatgtaaagaaatttacccttcattatcttctggattaaatgaacctaatttgtaacccacacatagcaaataggcaatgctgaaagacatcctattttttttattttttattttttttgagacggagtcttgctctgttgcccaggctggagtgcagtggagcgatctcggctcactgcaagttccgcctcctgggtttacatcattctcctgcctcagcctcccgagtagctgggattacaggtgcccgccaccatgcctggctgattttttgtattttttagtagatacatggtttcaccatgttaggcaggatggtctcgatctcctcaccttgtgatccgaccgcctcggcttcccaaagtgctgggattacaggcgtgaatcaccacgcccagcaagatgccctgtttttttaaacggtttttaacatgttattatatgcaataattacatttagttaatattgttaaggattacagtggccaatatttttaatggaatggttaatatcttgagtcaaacagcactagttcttgcactgaatttactagctggaggtctcaaggaattcagtctctataaaactcaatttcttcatcaatgaaaatactcttagcaggaatatctagcagaagacaagggagcactctaaaaaggagaaagacctgcatatcagggtaacacaggggagctggggcttcttctgtgagctcattagcccagagatggagcgggcaccaggggaagtgaccccacagtggcgctttggatgggtggcttgtatgactctgtgatgtgcaggatggcccttctgctttgagggtaagatggagaaaggctcttttctttcttggttctcaggtgtcctgggtgggaggaaccctacataggggcagcccacaatccacctctagctttctcagcaaaatgtcaatgtgtcttcctaaatttcaatcagacaactcttttggttggcagatacacaggatataataaaatctctggcaatcttgtttttttctaaaggtatatatggaccattcagtctttcatttaataaataaggactcagaaaatattgtgaagtttcagtaaaagatccttagtagaggttacttttcttggggttcttaagaaatgtaattttctgtgaaagcaaaattttcagatttccaacataggttaatttaatttgcatataaaaatttcatacttactttattggaaacatttccaagaatgactacttagtctctgacctttaacttaacctagtgacatatttaacctccctgtgatagtttagagtttcattatggggactgcctttttgctgtgctgggtgcagccaacttccagaggtttgttgaccctaacactaattggccctagatcttcatacattttgttttcccttttaatttaattttatttttactgacaggatacacattttgaacattgatgtctgcttgctactcacagatttccttttcccttctttgytgttagtcttttaccatttctttctgttgcagtgtttgttctatcatcttcctctatatttattgtttataatcttcaaagaattgtgaaaccatataggtgagtttatcagaattttctctgaatgaagactaggttatgaattaggtctcaagtggctctcctatgaggacagaacatagcctgttgtctatttcaacagcccagaggttgcctacctccttgttcatagtttttcactgaatcatagaggttgctctacatgtggcctcaggataaatataaacacaaaagytgcaattattttgtgccattattttgggaaaaaacccaagactgcgttgtattgtttctaaaggtattttcctgtagggaatctgattattgagtgaatctcttctctgttctgaattgttgagattgccagatgaagttgccttggatacgtaagatttttttttttaattctcctggatttcatcrttttgttccaggaaacatgtatttctagattcatacaggcaaagggaagtaacatttattgagagttctcttcatgacaagcacttgacttacattattacattggtccgcacaaaatttctctgggctcaataattcttcctccattctattaaaaaagaaacttattcagggtcactgttcaggctgaattgcrtccttccaaaattcatatgttgaagtcctaatccccatgacctcagaatgtgaccttgtttgaaaatagggtccttacagaggtaatcaagttaaaacgaggtcattaggatggaccctaatcaaatatgactggtgttcttctaggaagtagaaatttggacacagatgatgtgaagacacaggaagaagagccatctataagccaagaagagaggcctggaacagttctttctctcatggctctcgtggtttctcaatgctttgattttggacgtccagtcttgggaactgtgagacaatacctttctattgtttaagtcacccagtctgtggtacttgttaaggcagccctagtaaactaaagcagtcatatagttagtatgtgacaaagatgtattcaaactgaggtctagtacccaagcatatgcatggccttttcagtctcttttctgtgattttgagtgttctggggcagaacgatctggtgaatctcaagttgggcactggtgggacaagggtgttctctgcacttattaataggcagaggagaagccctaccacctaaaagagctttggagaggtgctctggggtctctggttggcacagcttgagctgtgtctggagcaagactggatctattttccttaagcacttctgctcccaccgcgttaaccctcctttttattggctcctccttccctaccccagrtggagcgaacaaaagcaagaacttggaaatgggggcaaactgtaatattttgaacagctgcctttaaagacacaagagaataaaagyatgagaaaggcaggcttcattcactaargagaaaataatcagaagcttgggggcagataaatgtgccctttattctgataagatacagaaactgctcattaaaaaaatcaatgatgatgacacaatgaataaatcatctgacatgtttaacaccctttaaggtcatatgcttttcactcaaatggatctgaagagaaaaatactccattgkgcacatctgtctcttaagtagcacacattataaaccaaattggaaggatcagttttaaaagaatatagctttaaatctttgcaaatattttaaatgtcttagtagcatgttgcctaaaaagtgagccatctgaatgattatttggtcacaaagtatgagcctacattaaataaagtctcagattaagtgtctccaagggaagaccatattttataaattatccaagtagatatatttagaaaagtcaacattatatcggaaaaattatatttgtaaatgatatagatatgttcccaagcatacgaatttgtgagagctcactctaataagtctctaagatctaatttaaactgctttattggtgcaaagatactcacggcaggaagtgcaaagaaagaaatgccaaggagtgcaaagcctgcagaaagcaatcttcccagccaagttaggggagttttgtctccatagccaatagttgtcaatgtaatctagaaacaaaataaatagaatgtgcagcttaagtacttgagaggaaagttaggacctatgaacagraggcaagcaacgtttccactaaatcattattcaacaaatcttgttcrtgctttttattactgtgctttaattttccrtgacgcatgacagaacttctctttgtttaaggaaaggaataacctacatacttgttcctcccttataacacagttttccrtcttttctaagtgtatttaaggaaagattatttaagtaagtggataaccatcagtgatacagaaatgatagcaccatggatttaggactggatcagtacacaaataataatttatgttaatttaggctgtcccttcgttaccttagcaggcatttcctgaaggtctggtgtgtgcaaggtatgtgttaagatttgtagtggaacaaaaatgagggcatagttcttgtcctaagatatttatggcctaataagagaaacatgccacacatgaataattaaaatrcaaaacaggatgagagaggtattataatggaggtacaaataacctgctatgggaattcaaggaagagattagttattataagcttgaggtgttgagggagctttactagggagatgtcatcatacctgggctttgaaagaggggtaacattttgagaagcagaaatgataaagaaggtgatctagggaggagaaagaggtggctagctgcagaacagtgagaacacatagagtagattctgaaaagtatgagttgttcagctggactggggcatggtggatttaaaaaggattagtgacttcttcaatttatttttttaatattttatagactactgtgtacaggtctttcagctccttggttaaatttattcctaartattttaatttttgtagctactgtaaatgggattgctctcttgatttcttttttggaaagtttgttgttartgtatagaaatgctagtgatttttgtggtgttgattgtgtctcctgtaactgtactgaatttattagttctagcagtttttttctggaatctttagggttttctatatataagattatgttgtcagcaaacagcaaaaatttcctttcttcctttcttatttggatgccttttatttctttctcttgtctaactgctctggcatggacttccactactatattgaatagaagtggcaaaagtgagcatccttgttttttttaaatcaaactaataatttattaataatttttaatttttgtgggtacacagtagttatatatatttatgagttatgtgggatattttgatacttgcatgcgatatgtaatgatgatatcagggtaaaagaggtatccatcacctcaagcatttatcctttgtgttacaaataatccaattatactcttaattattttaaaatgtacaattaaattattactgactatagtcacacttttgtactttcaaatactagacgttattcactctttctggttttttttggtgtccattaaccatctccgcttccctctctgctcactctctccactacccttctcatactctggtacccrtcattctactctctatctttgtgagtttaactgttaattttttttaattattatactttaagttctagggtacatgtgcacaatgtgcaggtttgttatatatgtatacatgtgccatgttggtgtgctgcacccattaactcatcatctacattaggtatttctcctaatgctatccctcccctctcccccaccccatgacaggccccagtatgtgatgttccccatcctgtgtccaagtgttctcattgttcaattcccacctatgagtgagaacatgtggtgtttgattttctgtccttgcgatagtttgctgagaatgatggtttccagcttcatccatgtccctacaaaggacatgaactcatcctgttttgtggctgcatagtattccatggtgtatatgtgccacattttcttaatccttaactgttaattcttagtttccacaaataaatgagaccatgtgaagtttgtctttctgtgcctggcttattttactcaacaaaatgagctccgcttgcatccatgttgctgcaaatgacaggttctcattctttttaatggctgaatagtactccattgtgtatatatgccacattttctttatctgtctgttgatggatgcttgggttacttccaaatcttggccattgtgtatagtgctgcaataaacatgagagtgcagatatctctttgatatactgatttcctttcttttgggaatatacctagcagtgggattgctggatcacatggtagctctatttttagttttatgagaaacctccaagctcttctccatagtggctaaattatactaatttacattcccaccaacagtgtacaatggttcctttttctccaaatccttgccagaatttgttattgcctgtccttttctccaaatccttgycagcatttgttattgcctgtctccaaatccttgccagcatttgttagtgcctgtcatttactggagtgagatgatatctcattgcagtttgatttgcatatctctgatgattaattatattgagcaccttttcatatgcctgtttgtggtttgtaatgtcatcttttgagaaatatctatttagattttttgcccgttttaaaattggattattttattttttcttatacagtcatgagagctccttatatattctggttattaatctcttgtcagatggataatttgcaaatattttctcccattctgtgggttgtctcttcattttgttgattgtttcctttgctgtgcagaagctttttcaygtgatgtgatcccatttgttcrtttttgccttggttgactgtgcttgtgggatattactcaagaaatccttgccctggagaatttccctcatgttttcttgtagtagtttcatagattgaggtcttagatttaactttttaatcccattttgatttgatttttttccatatggcaagggataggggtctaatttcattcttcttcatatggatatccagtttctccagcaccttttattgaagagactgtcctttcctcgttgcatgttcttggtacttttgtcgaaaatgagttcactgtggatgtacggatttgtttctggtttctctcttctgtcccattggtcrgtatatgtttttatgccagtaccattttgttttggttactatatctctgtagtataatttgaagtcaggtaatgtgatttctccagtttttctctttttgcttaggatagctttggctcttctgggtattttctggttccatataaattttagcactgttttttccatttatgtgaagaatgtcattggtatttttgttaggaattgctctgaatttgtagattgctttgagaaatatggaaattttaacaataatgattattctaatccatgaacatgaaatatctttcctttttttgtatcctctttaatatctttcatcagtgtttcatagttttctttgtagagatctttcacttctctggttaattcctaggtatttaattttatttgtagctattgtaaatgggattattttctcaatttctttttcagattgtttgcagttggcatatagaaatgctgctgatttttgtattttattttgtattctgcaacttgactgaatttgtttatcagttctaatagttttttgatggggactctaggtttttccaaatataagatcatatcatctgcaaacaagcataacttgacttcttccttcccaatttggatgctctttatttctctcttctctgattgctgtagctaggactttcagtactatgttgaataacagtggtgaaaatgagcatctttkttgtgttctaaatataggaggaaccatccttgcatccctgagataaatctcacttggtcatgatggatgatctttttaatgtgttgttgaattcggtttgctagtattttgtcaaggatttttccatcaatgttcattagggatggtggcctgtagttttcttttttaaatgcattttttgtctggttttggtattaggataacactggcctcatagaatgagtttagaagtatttgttyctcctctactttttggaatagtttgagcaggattggtattagttcttctttcattgtttggtagaattcaacagtaaagccatcaggtttcaggtttttctttgctgggataattttttttatggcttcaatctcattacttgttattggtctgttcaggttttggatttcttcatggttcaatgttggtaggttgtatgtatataggaatttatccatttcttctaggttttccaatttattggtatatagtttctcacagtagcctctaatgatcctttgaatttctgtagtatcagttttaatgtctcctttttcatctctgattttatttatttgggtcttctctccttttttcttagtctggctaagtttgtcatttttgtttatcttttcaaaaaacaactttttcttttgtttatcttttttttttttcttttttgagacagagtctcactctgttgcccaggctggagtgcagtggtgtgatctgggctcactgcaagctccgcctcccgggttcacgccattctcctgcctcagcttcccgagtagctgggactacaggcgcctgccaccacgcccagctattttttttttgtattttttagtagagacagggtttcatcatgttagccaggatggtatcggtctcctgacctcatgatctgcctgcctcagcctcccaaagtgctgggattacaggcgtgagccacagtgcctggccttgttaatcttttgtattttctttgtttcaatttcatttatttctgctctgatctttatttcctttctcctacyaactttgggtttggtttrctcttgctcttgtaggttgcataataggttgtttatttgaagtttttcttctttactgatgtaagcacttttagttataaacttcccttttagtactccttttgctgyatcccattggttttgttataggttgtgtttccattatcatttgtttcaagacatttttcaatttgcttcttaatctcttcattgacccattggtcattsaggagcatattgtttaatttacatgtgtttgtatagtttccaaattttctcttgttactgatttttagtttcattcaattgtggtcagagaagatacttgatattatttcaattttctgaatgtcttaagacttgttttgtggcctaacatgtggcctatcctgatctatccttgagaataatccatgtgtttaggagaagtgtgtggagtattctgcagctgttggatgaaatgttctataaatatttattaggtccatttggtctattgtgcagattaagtttgatgtttctttgttgattttctgtctggatgatctgtccaatgctgaaagttgggtgttgacgtttccagctattattgacttggggtatgtctctctcttttgctctaataatatttgctttatatatctgggtgctccagtgttgggtgcatatatatttatagttgttatatcctcttgctgaattgattcctttatcattatataatgaccttccttgtctcttttgatagcttttgtcttgaaacctattctgtctgatctaagtgtagctactcctgctctttttcggtttccatttgcatgggatatctttttttatccctttattttcaatctatgtgagtctttatagatgaagtatgtttcttgtagtcaacagatcattgggtcttgctttttaaaatttaattttaatccattgaatccattcaatcctgtgtcttttgattggagagtttaatccatttatattcagtgttattatggataagtaaggacttactcctgccattttgttatttgttttctagttgttttgtggtcttctcttgcttttttctttccttcttgtcttcctttcattgaaagtgattttctctggtggtatgatttagtttcttgctttttatttttttgtgtgtatccattgtatgcttttttgatttttaggttactatgaggcttgcaaataataccttataacccattattttaaactgatcacaatttaactccgattgcataaacaaataaacaaaaagaaaattaatgaaaatgctacattttaactttgtcatcccacttttaaactttttgttgtttctactttatcttattatgctgtgtatatcttgaaaagttgttgtagttatttttgataagttcatctttttgtctttctacttaaaatataaataattagcacaattatagtgctataatattctgtttttctgtgtacttactattaccagtgagttttctacccttagatggtttttagtttttccttaatgccttttttctttcaaactaaagaaatcactttagcatttcttgtaggacaggtctggtgttgatgaaatgcctcagtttttgtttgtctgggaaagtctttatttctccttcatgaaggctatttttgccagatatactattcaaggataaaatattttttcccttcagcactttaaatatgccatgccactctttcctggcctgtaaggtttccactgaaaagtctgctgccagatgtattggagctccatttcacgttatttatttctcttcttttgctgcttctaaaatcttttctttatccttgaattttgcaagtttattagtgaatgctttgaggttaaatctgtttggtgttctatagccttcttttacttgaatattgatatctttctctaggtttgggaagttctgttattatccctttgaataaactttctctctctctccctactttttaaggccaataacttagatttgcccctttgaagctattttatagatattttgggcatttccttcttttttattcttttatcttttgtctctgctgaccatgtatttttaaatagcctgtcttcatgctcactagttctttcttctgcttgatcaattctgctattaagggactctgatgattcttcagtatgtcagttgcatttttgacctccagattttctgcttgattctttttaattatttcaatttatttgttaaatttatctgataaaattctgaattcattctctgtgttatgttgagtgtctcatgttttcctggatkatcttgaggttgtggtgtttgtcagtgtctgggcattgaagagttaggtatttattgtagtctttgtaatctgggcttgtttgtagccatcctccttgggaaggctttcctggtatttgaagggacttcagtattatgatctaagtttttggtcactgcaggcatttctgcattaagggataccccaagcccagtaatgctatggttcttgtagacttgtagaggtatcaccttggtggtcttgaataagatctgaaagaattctctggattactgggcaaaaactcttgttctcttccttacattctcccaaacaaacgagtctctctttctctgtgctgaggtgcctggagcttggtgaggggcgacacaagcagccttgtggccaccatcactgagactgcactgggttagacctgaagccagcacagcactagatcttgctcaagtgggcatccttattttgttctggatcttagaggaaaggatttcaatttttcactgtggagtataatgttagytattggcttataatatatgctttttattgtgttgagktacattccttctgtacctaatttgttgaggatttwtattatgaaataaaatttgatcaaatgatgtttctgcatctmatgagatgatctgcaataagccaggcacagaaaggtaaatactgcatgttttcactacatggggaatctgaaacaatgaaacccatggtagaagagagtagtatgctggttaccagaggctgggggttgggggaatggggagatgatggtcaaaggacacaaagcctcagttaaacaggaacaatatgtgtatgtgtgtgtgtatatatatatatatatatatatatatatatatatgagatctattgcacagtgtggtgaatacagttagtaatgtgtattgtgcatttcaaaattactaagactaaatttcaaattctcttaccacattttttttttctgagactgagtcactctgtcacccagactggagtgcagtggcacggtctcagcttaccgcaaactgcctcgcaggttcaagtgattctcctgtttcagcctcttgagtagctgggattacaggcatccgccaccacacccagctaatttttgtatttctagtagagacagggtttcaccatgttggccaggctggtyttgaacttttgacttcaaatgatccccctgccttggcctcccaaaatgctgggattataggagtgagtcactgcacccagccacaccacaaaaattgatatgtatttgaagtggtggatatgttaattagcacgatgtaatgattccacattgtgtytgtaaatcatagcatcactttctaccccagaaatatatacaactataatttctcaatttacaatgaaagaaaagtaaaggattagtaaagagaaggttaactagatatgctaaagctaggccagggaatgtctttgaatatcatgcctctcctatgatcagactgctccaggcgttccccacatctcttagaacaaagtcccagctcctccatggcctgcagggttcttcatgattgacctcagctaacttctcagatatggtcttctaccatgctctctctcattctgcttctgcccctcctgccttcctattcatcagcacaccaagctctttttttttttttttttttgcctaaggacctttgcccttgcttttctctttctgaatttctgttacttccaggtttgcattcaggtacctgctgaaatgtcagctccacagaaaaccatcccagatcacctaatttaagccacttcccaagactggcttagtctcccagcctacatctttctcccatccgggatgcctcctgtccttgaacactggactctaagttcttcaattttgggactcttggatctttgaccacagactgaaagctgcactgtcggcttccctacttttggggttttgggactcagagtggcttccttgctcctcagcttgcagacgacctgttgtgggacctcatcttgtgatcatatgaggaaacttggattcagataatttaaacagtttgcttatgagtatacaactataaattgcccactagtgtgtcctattacaaagtctgcctttaaaackaaaatagagaggacccacagaccccctgcaggaagcagattgctcctgaaggacctaggagacaccctaaatactgtgctagcatccacggctgagaaacccacagatggttcacatcacaggactctgtagacaatccccagtgccagcccggagtctggaagacttgttgggtggctagatccacaagatagataacaatcactacagctcagctctcaggaagtcacatccataggaacagggggagagtactacaccaagggaacaccctgtggtacaaaagaatctgaacaacagccttcagccctagaycttccctctgacagagcctacccaaataagaaggaaccagaaaccgattctgttaatatgacaaaacaaagttctttacaactcccaaaaaatcacactagctccccagcaatggacccaaaccaagaagaaatccctgatttgcctgaaaaagaattgaggaggttaattattaagctaatcagggagcaccagagayatgtgaagcccgatttaaggaaatccaaaaaatgatacaagaagtgaagggagaaatattcaaggaaatagatagcataaataaaaaacagtcaaaacttcagtaaactttggacacccttatagaaatgcaaaatgctctggaaagtctcagcaatagaattgaacaagtagaagaaagaagttcagagctctaagacaaggtctttcagttaacscactccataaagacaaagaaaaaagaataagaaaatacgaacacagcctccaagaagtctgggattatgttagatgaccaaagctaakaataatcagtgttcttgaggaagaagagaaatctaaaagtttggaaaacatatttcagggaataacagaggaaaacttccccagyattgctagagacctagacatccaaatacaagaagcacaaagaacacctgggaaattcattgcaaaaagatcatcacctaggcacattgtcatcaggtaatctaaagttaagacaaaggaaagaattttargagcagtgagacaaaagtacctggtaacctataaataaaaacctattagattaacagcagatttctcagcagaaaccctataagctagaaggtattggggccttgtcttcrgcctcctcaagcaaaagaattaccagccaagaattttgtatccaacaaaactatgcttcatatatgaaggaaagatacagtctttttcagacagacaaattctgagagaattcaccactaccaagccaccactacaagaactgctaaaaggagctctaaatcttgaaacaaatcctggaaacacatcaaaacagaacctctttaaagcataaatctcacaggacctataaaacaaaaatacaatttaaaaaacaaaaacaaaaaacaaaaaaccaaggtatacaggcaacaaatagcataatgaatggaatggtacctcacatctcaatactaacgttgaatgtaaatggcttaaatgctccacttaaaagatatagaattgcagaattgataagaattcaccaaccaactacctgctgacttcaagagactcgcctaacacataaggagtctcacaaacttaaggtaaaggtgtggaaaaagacatttttggaatatggacaccaaaagcaaacgggagtacctattcttagacaaacaaactttaaagcaacagcakttwaaaaagacaaagagggcattatataatgataaaaggcctagtccaacaggaaaacatcacaatcctaaacgtatatgcactgaacactggaactatcaaatttataaaacaattactaacagaccttagaaatgagacaggtggcaacataataatagtgggagacttcaatactccactgacagcactggacagataatcaagactgaaggtcaacaatgaaacaatggatttaaactataccttggaacaaatagacttaacagatatatacagaacattccatccaacaaccatagaatatacattctattcagtgcatggaactttctccaaggtagaccataygacaggccacaaaatgagcctcaataaatttaagaaaattgaaattatatcaagcactctctcagaccacagtggaataaaactgaaaatcaactccaaaatgaactttcaaagccatgcaaatatatggaaattaaataacctgctcttgaatgatcattgggccaaaaatgaaatcaagatggaaattaaaaaattctttgaattgaatggcaacaatgacacaacatatcaagatctctgggacacagcaaaggcgatgctaagaagaaagtttatagccataaatgcctacatcaaaaagtctgaaagagcacaaacagacaatctaaggtcacacctcaaggaactagagaagcaagaacaaaccaaacccagacccagcagaagaaaggaaataaccacgatcagagcagaaccaaatgaatttgaaacaaacaaacaaaatacaaaagataaatgaaacaaaaagctggttctttaaaaatgaataaaattgatagaccgttagcaagattaaccataaaaagaagagagaaaatgcaaattagctcaagaagaaatgaaatgggagatattacaactgacaccacagaaatacaaaagatcattcaaggctactatgaacaccattaygcacataaactggaaaatctagaagagatggataaatttctggaaaaatacaaccctcctactttaaatcaggaagaattagatagcctgaatgaccaataacaagcaatgagattgaaatggtagttaaaaaattaccaacaaaaaaagtccaggaccagatggattcacagcagaattctactagacattcaaagaagaattgataccagtcctattgacactattccacaagataaagaaggaaccctccccaattcattctatgaagccagtatcaccctaataccaaaaccaggaaaggacataatcaaaaaagaaaactacagaccaatatccctgatgaacatagatgctaaaattgttaacaaaatactagctaaccgaatctaacagcatatcaaaaagataatacaccatgatcaaatgggtttcataccagggatgcagggatagtttaacatatgcaagtcaataaatgtgatacaccacataaacagaattaaaaaccaaaatcacatgatcatctcaatagacgcagaaaaagcattcaacaaaatctagcattcctttatcgttaaaactctcaacaaaactggtacacaaaggacatctatgacaataaaatgtcataatataacaatgtaataaaagtaataaaagtcacctatgacaaacccacagccaacataatactgaatggggaaaagttgaaagcattccctctgagaactggaacaagataaggatgcccactcttatcactcctcttcatcataatactggaagtccttgccagagcaatcagacaagaggaagaaataaagggcatccaactcattaaagaggaagtcaaactgttgctgtttgctgatgatatgaatgtttacctagaaaaccctaaagactcctccagaaagctcctagaacttgcaaaagaattcagcaaactttctggatacaaaattcacatacacaaatcagtatctcttctatacaccaacagcgaccaagctgagaatcaaatcaagaactcaatcccctttacaatagctacaaaaacaaaaaaacaaaacaaaacgaaacaaaaaaaaaccaaacaaaaaaaaaatccacaaaacttaggaatatacctaaccaaggaagtgaaagacctctacatggaaaactacaaaacactgctgaaagaaatcatagatgacacaaacaaatggaaacatatccaatgctcacggataggtagaatcaatattgtaaaaatgaccatacttccaaaagcaatctacaaattcaatgcaatttccatcaaaataccaccatcattcttcacagaattagaaaaaacaatgataaaattcacatggaaccaggaaagagcccacatagccaaagaaggactaagccaaaacaaacaaacaaataaacaaaacaacaaaaaacccaaccaaccaaacaacaacaacaacaaaaacaaaaaaacccaaccaaacctggaggcatcacattacctgatttcaaactacaaggccatagtcaccaagacagcatggtactggtataaaaatatgcacatagaccaatggaacagaatagagaatccagaaacaaaccaaggtacttacagtcaactgatcttggacaaagcaaacaaaaacataaaatggggaaaggacacccttttctttttctttttcttttttttaaggctgaattttatcttttttattatactttaagttctggggtacatgtgcacaaagtgcaggtttgttacataggtatacatgtgcaatattggtttgttgcacccatcagctcatcatttacattaggtatttctcctaatgctatccctcccccagccccctaacccctgacaggccctggtgtgtgatgttcccctccctgtgtccatgtgttctcattgttcagctcccacttatgagtgaaaacatgtggtgtttggttttctcttcttgagttactttgctgagaatgatggtttccagtttcatccatgtccctgcaaaggacatgaactcatccttttttatggctgtatagtattccttggtgtatatgtgccacattttctttatccagtctaccattgatgggcatttgggttggttccaagactttactactgtgaaaagtgctgcaataaacatacaagtgcatttgtctttatagtagaatgatttataatactttgggtatatacccagtaatgggattgctgggtcaaatggtatgtctagttctagatccttgaggagttgccacactgtcttgcacaatggttgaactaatttatactcccaccaacagtgtaaaagtgttcctatttctccacatcctctccagcatctgttgtttcctgactctttaatgatcgccattctaactggcttgagatggtatctcattgtggttttgacttgcatttctttgatgaccagtgatgatgagcattttttcataattttgttggctgtataaatgtcttcttttgagaagcgaaggacacccttttcaacaaatggtgctgggataattggctagccatatgtaggagaattaaactggatcctcatttctcaccacatacaagaatcaactgaaggtggattaaggacttaaatatagagcctgaaactataaacactctagaagataacattggagaaacccttctatacattgagttaggcaaggatttcaagaccaagaacccaaaagtgaatgcaataaaaacaaagataaattgctggtacttaattaaactaaagagcttttgcacggcaaaagaaacagtcagcagagtaaacagacaactcacagagtgggagaaaatcgttataatctatacatttgacaaaggatgaatatctagaatctacaatgaactcaaacaaatcaacatgaaaaaaacaaacaatcccatcaaaaagtgggctaaggacatgaatagacaattctcaaaagatgatatatgaatggccaagacacatgaaaaaatgctcaacatcgctaatgatcagggaaatgcaaatgaaaaccacaatgtgatacaccttagtcctgcaaaaatggccataataaaaaagtggaaaaatagtagatgttggtggagatgyggtgaacagggaacacatctacactgctggttggaatgtaaactagcacaaccactatagaaaatagtgtggagattccttaaagaactaaaagtagaaccatttgatccagcaatctcactactggttatctacccagaggaaaagaagtcattatatgaagaagacacttgcacatgcatgtttatagcagcgcaattcacaatcgcaaaaatgtggaaccaacccaaatgcccatcaatcaatgagtggataaagaaactgtggtatatatatatatacatgatggaatactactcagccataaagaggaatgaattaatggcatttgcagccacctagatgagattggagactattgttctaagtgaagtaactcaggaatggaaaaccaaacatcctatgtkctcactcataggtgggagctaaactmtgaggatgcaaaggcataagaatgtcacaatgaactttggagactcaaggtgaaaggatgggaaggaggagagggataaaagactacaaatagggtgcagtgtatactgcttgggtgatgggtgcaccaaaatctcacaactcaccrtgaaagaacttacttatgtaaccaaaaaccacctgttccccaataatttacagaaaaataatcgctgggggacactgtataataataacagtcattttctcataaagacaaaacaaaaccccacgaaaatcaacaacaacaaaaaaagctacttccctaccaactgtttcctaaatccttattctgttcatctttattcatagaatgtatcaatacctgaaatgatattgtatattgattaaattgtttattgtttgccttcccaactagaaagtaaattgtatgtgggttgggactttatcttactgctgaatccaagcaccttgcacagtgattggcatacagtagtcactcaatatatatttactgaataaaggaatgaaagccctatgggtgggataggattctgctctcttgttttgcagcccagaaatactgacggaaggtttttgtaagcaaagtacataatgtgatcagagtagtgcttttagaagctgaaattatggcagcaaatgtacaggagagattgaaataggaagaaatgagaggtgcagagaccagttaagacactatgagagtggagagtaaagrgaaatgtttaggaagttcaatagaaataaatttattgattgaggtaaaaggaaagactaagttaacagtgacttgaaaattttaagtgggaagatggttgcaccataaataaaagcattataatgaaaaagagaaggttttggagtaaaggtgaagagtttagttttgcaaataatggtttttcaaatgtcagtatgactaatgcagaaatgtctagcaggaaactgagaatgagagcttgagtcctgagagagaaatttggtttggcgtgagatttgggttttagaatcagtaacagggtgatgttaaagctatgtgcataactgagattacaaaaggtacacagaaagggtccagggacacctcaaaaaacacagacatttaaggaatggaagggaaaggaaagtcagagaagaatgtctttggatgtcatgtttttcaagtttttcaaaagtagaacaatcgggaaagggttatataaatggaaactcaatagagaatggagagtttcacaaagaccaggtaatctctgatgtcacagcctaatagaaaacaaggacagtgagtctgggcacggtggcttatgcctgtaatctcagcactttgggaggccgaggcaggtggatcacctgaggccaggagtttgagaccagcctggccaacatggtgaaactccatctccactaaaaatacaaaactagccaggtgtggtggtgcatgcctgtaatcccagctactcaggarggtgaggcaggggaattgattgaatctaggatgtggaggttgcagtgagccaagatcacaccattgcactccagcctgggcaacagagtgaaactccatctggaaaaaaaaaaaaaaaaagagagagagagagaaaaagaaaacaaggacaatgagcattgagaaaaagagactgaatatggtggagataggtggtcactggcaatcactgagaaagtggttgctctggtcatgccaccttacctgggctttgaaagagggggaacaattcagaagcaggtttgataaagagggagacaaattctatgatgccagacctttcagaagcattcagctcagctgaccacctctttctagaagcactcttctcttcacttccatggttttctctttgtattccttggtggctctttttctgtggctcctcttacccttttcaacctttggacactggatttttaaggttttgttctaagtctttttcttcttttaaaaattgtattcttcttagactttcctttcttttctatcccctcttttttctctctttccaggtgatcttaaatgttctcatagatttaaatgccacttttatgctaaacactccaaatttatayctctaggccagaccacttttctgagttcccaattcacatatctgcagttgacagttccatttagatgtcacacagtcatttaacttaatgtgtctaaaacagaactcttatttctaccaaatatattccttcctgtcttaaccaagagctccaccaatctatccacttgctcatgtcagaagcctcagaatcatcctaactattcatttccctcactccccccacggaatctatcagcaagtcctgttgattcgatctccttaggtttttgcaaattcacccccttttctctgtctttgctgccaccatggtagaccaggctgctatagtagcctcttaattgctctctctgcttttgcttttgctttcctctagttccttcttcatatacctgcaaggggtatcattttcttatttccatctaaaaaatccttcaatggctagctgttgaattcaaaataaattctaagctactaattaagccatctccacctacctaagatcattttgattttacccttgctcactgcactttaatgacagtggccttttggctcttcaaacaagccaggatctttctgcctcagggcctttgcacaagctgttccctcagctggaattgccattttcctcactcttcccagggctccttttcatccttcaggtcttatccaaaatactccctcattggagaggcctttcctacctatcttcagtagagactctgattactctatattacagctccttgtttygtaataacattaacgtgagtgatagyctgttgtatttttctttgggtagggattcttatttccttaactagaaagtggaacctcagcttgctctttatttccccaacatctagcataatgcttgccacaaagtgagagaaactcactaaatatttagtaaataaatgaataatactttgaagaacattggcaacaactgaagtgagatgtagagggcaagaactcccaggaatctctgacttgargggaggctttccaggatgtacttctgcatgtttgtagagagkktgagactgaagagggaaggggtggcggcttcctgatggggtaaagtacccaagaaggaattcggttaagggcacagttggaggggttagcccaggcagtgtgaaaggacagcgcttccacagtgggggtatgatgtggcctcagtgtgagtggagggaaggattaggaatgcttatgtctgtcctttcaattatagacaaggagaaggtgggatcatgtgtggggagtcagaggcttggaataggcaaagaggcttgggctgtgaaggtctgagaaggggtcaaggacaggttaataagaggtctgctggttggaagaactcattcaatgtcagagagagggaatatgtagtagaactttacaggagccaaattaatctaatgtcatcagcagtattaatatggaattctcaaaagaattccttgagaatgcagaaaaaaaatttccaggtcaattttattcttaatctttatatatgtgggacagatattaatctactatactttttctgaaaaatagcttaatccttttacatcggtttattaataataatagactgaagaagaactttcatggtttggtcacagcaaaaatgttacatttcgtggtttcctttgcttttcattccaataatacatttgctcggcccagtgctcacagagtgggttttaaaccactgactctaactctgaagaatgggacacagccaagtgacaatgtgctcagtgtttcatcctgagtagaaaagagtgcctgctttctttcattctgaatttagggttgcccctttctcttacaggggtggtttgcgggggagaatagaaggttgtgaaatctgagaacagcactctggagttcctctgggggtgagcaaagaccctgcccactttctccctacactccggttcaggcttccgggatgatcacatttcactgaatgcaagggacctgaacagccagcaactgaacccccagcctcaataactttctcccctctgatttcaaakgagctagggatgtttcctggttaaagcaaaggggccttttgttggcagcttaggcttgggaaggatctggcaacagggtggcagttttgtccccctctatgccagagagggagttggtgtgggtttccctcgttttttgcctggagcgtgcatgcatcatttcccttctgtggtggcaaagaggacacctgggcttcatgatgtgaacagaaagatagcaccagacataaaattatgaagtctttaagatgtgcttacaataaaaagatgttaattttttccaggtattcaccctgacccatctgcttgatctggctttgacattttaagtcaaggaccagctgcatttgataaaccatccttagatgagcgctgcatagatattcattgatttttctggactttcaggtcaagctgcccttgaagtaccagtgagtctccttggaactgtacaactacattatatttcttttcttttcctagcacttgggaggccctgctaatgtttatcagttgatcctttgtacatgaactgagtagcaggagccctcttggttcttattctcccatgcttgtgctaaataataaacctctttctgccttccaaaaatgttatgaatcttttcactggtagaacccagtaatgattagtttcatttaggttcagggtcggagaaagggcaggcccacacaagaacccaagggcacccgttcttcagaataagtggggagattctggaatagcagcatgtttcagagaacctggagaggctgcatatgcgatctttaggggcttggaggaaatcacatctagacttcacaattgaattgggtgatgaggcagtcagttcgttttctagaaacatttctcacagatcttcaagaacccagcagcatcctgatggcatggcatgggaagatgacttattcrattgtatctcatcatctctgtattgcagatgcttacaaactgcgtacgtcagtgactcccaggcagaagggcaggtkgctattatcacttaacagtatacagttaacacagtaatatgggccaaatgaagttaaagagccagagctgattttggaaaaaatggattactgttataaagaaaaacaaataaataacacactccctttacactgtctttaggctgggaatccaacattaaataaataatccctttacactatctttagactgggaatccaacattaaataaataatgtagttgctcctttgaagatacttccatcacatcccgccccctttgttgtgtaattctctgccagttctatatgtgcatatggcattagggtgcaagggttgagtcccatgggtgatggtgctggaattaaacccagtgactctgttcatctcgggtgaaccatgaggatgcttcatgactacatatgggctaggtaggtggggatgacagggattgggtgggtttgggatgacagaaagaactaaagtgtggtcggttaatgggttctttttgtactaatatatttttgatacttcctgagtcaaagcatttaattctcttctaatatatacagtgttaaaagtgaatcacaatacatcagacttttactctgcatagcaaatgtgctgcaagggaattagtagaaccataaagcagttgaatcaatgtaaaataaatgttcttatgagacagccttgttattctctgttggtgagataattttctgatattatatattaatgcatgagaatacacagagaagtcttcttaattgaaacttttatgatggctacttggttgcttagtcagaaatttgactaatgcagataatcacaaagagacttatatgctgcatattttattttagcctaaagcacataaatgtaatattcttgatgaagaatgtgttctgcaattggggttctgccttatcttttttgcataaatctcactcataatgcatcatttattttccttaattttaatgttttttaaaattaactttttttttagtggtgcataaactcaacttttgtgggagctatctgagaacagagtcctaaatatttaagatttttcccccacatagttgtgtgttcacccctgattttgaagtatttttagtattttagtatatttagtattttgcatttatcaagcttttctaaagcattctattttcgtaaaccatccatctttctttctgtaccatatgtcatcagtttatgcaataatataaaattaaaccatgccattataattacaaatacaactgacataaaaaggtttaggaatgggatgggcacagtggctcacgcctgtaatcccagcactttgggaggccaaggcagacagattgcttgaacctaggagtttgagaccagcctgggcaacatggtgagaccccttttcttcaaaaaattagtaaaaaattagctgggcatggtggcatgtgcctggggtcccagctactcaggaggctgaggcgggagggctgctcgaacctgggaggttgaggctgcagcgagctataattgcaccaatgcactgcaacctatgtgacagagtgagaccctgtctcaaaaaaaaaaaaaaaaaaaaggtttggtaatgaacatgctgactctttgcaagcattcaaacaatgttcagaacagaattctgtggatactaaagagcattttgtgctctgcaagcctcagtatgttttgtgggagtgaggagtgttggttaatctggccagtcagtgaagaggaaataagttctgagagcttctactctattctaaaacaaatacaatatttacataagtgggcaagtaaactaaatagtgtttcgtgagctttgatttcccacacccatgtgagcgtgacattttgcttatatatacgtgtgtgtaagagatgagaagcaggagaatagagagatggatctttacatcacgatattggacataattccattttttttcctcattccagagcttgtaagagatatgctggtgaacatgcactggatagattacatttttattataaaaatcttctgtgattcatactcgtgacttttgagtatgatctttataatatcataggtaaggtcatgacgttttgaatttactttttaaaattaaaaacaaattacaagtgacaaaaatgtccaccatctctttcagtaaagttctaggcagagtagtattctccttaagtgagaagctgccatttcttgccacagttcttaaactgagaagctggcagctgccttttcaggctgcagggtaacaaggcggatgaggatctgggcagggatggtctgctttgccctgctacctccccacagctggcctcaggaatccctggtattttgtaccatctcttcagctggaccatttatttgaaggcgtcttgcagatagaaacagcttagatatattttggcccttatgtttcctatgctcaaatacagtcacacaggtgaaagaaaatacattctgaaaatctgtgggttggaaatgttggcataaagttgtaattatgttaggaaaatctgaggtggagtgggggcaccttcgtgtgtttagcattcaggaattcttcctcagaaataatactgaaaaacaaatgaaaactctggtccagacttttcttgattttttttttaaatgagatggctgaggctatggtcagattataatttaagacactggttaggctaaagttttttttcttttcaatagcagaattaattccaaatcaggagatataaatccttctttctttcaggcaacaaatcaacaaatatttattgacctgattttgaagatacaattatgtttttagtaaatctatgtacattagtttatagctaatgtgttcaggtgaacaatatactgttggtagatttccgtggcacggtataattctccccaagggagtctttgaggcagggtctcactcaagcacccaggctggagtgcaggaaaacctgatcttaagttatttcaaaataaatctaaagcagatcaaaaagagaaaaatcactcccacaaaacaggaaggatttaataacagaaaataactccagggaaacccattcttaaattatttcagaataaatctggaacaaccaaaaatgagaaaaataacaatagaaaatgataataaatggagctctatccaacaatcagaagatccccttttccagcagctctcagtgcctcagctactagagctacttccctcttccattttctgccatcaatgcaactttagttgccacatcagaacccaggacatcttttcatcacaacctccaattcccaagcctcttctgtgttcaaactgtgggtctgcatcaaaacacataactctttttttgttccttttgtattaaaggtgctttcatttaacttccacagcaatgatgtctacaccaacaatagctctcatatttgattgggcacttcctatgttcttggtaccaggtcttttatatctatttcacttactcaatgaactaggtattgctattcactaatatgaaactgctttcagggatcaaagttttttgggcagcactgatcccaccaygatatccctccaaatgttgatctaggggacagatctcactatcttaatggaaggagttccagagttagtattgaaaattcactggcacagcgtatctgtggaacaaaacctatattttgatacttaatgttgatactgtgggatcttttaatataggggatttccttttttcatcaaagtgtaacacttagaaatactctcatttaggatgctatcatttccctatttattctggatacttccatagttattaaggtttccattaggtgcaacatgcgcaattttaactaagaaatacccaaccataattttcactaaggtcttgattaatgtataaataaaaggtataatagtctaaatttattttatttcccactaggaatctagtatatgttcttcttaaaatgaatagaaacaatgagctctcttgtttgtttgcttcttctgtctttttaggattcagacaatttcattaatgagtcagttaatatcaacaaacctgctacggaccaataaggccttaaaaaattcttcgaagtttgatctcttataaaatttttactctcatattcaagactagattttttttaaaaatagaaacataattaggccattcaggaacctgttaagtacgggttaaatgtcagtcaaattagcagaactgaaaggcaaatcaatgaaaatgtttcttcccctgaaagtcacagatatgacctttgaaaacctaccgtgtgggttattctggcaaaagaaacaaactgatgactaactgagaggtatattaagagtttcccacacactgtttaacacacaatacagcaattcttttttgtaataaggagaaatggaagactaataaaaagaaagataatgagctcccaggctaaactcaccaacaactgcatctcagtggcaaaaggggcacctgggtgcctcagtaagtcaaatacattagaattatccaagagaagcaaaaattaaacttgaattcaaaccattgctttgaaggctgggatgataaactgtcttccccttgctggcaagaaaagcctcctgttttctcagtttacagtttatcccatcatgagtcacagattttcatttgctctctacatataaaaagtattttaagaatgtcagataactgctctctttcaagcttccactctttttcgaaatgcccattattgcttgtgaatagtgaagagcagccggaaaccacattattaaaccaacggaatcctttgaaaccaatggcataatcttgtagacatttacttagataacttaagaaaaaaattcgaatctttaggtgaatgtatttctcatttttattcattttattgctgctatgcaatcaacaaatacaacaagttctgctaaatacagccctaacaaattttccccctctctgacaaatgttctgggtcttgctgatgagcttttgatgactagtggaacaatgcaacaattggtaactctgtgcttcactaaacaaacaaataaaaagcctatcattgtttaaatcacagcttaagaaaatgatatatttttattttggcaacaatctagaactcaagaaatactaagggtggtttaaaagagaactcacggggttttttgaaccaaaacgatatggacattctttagacaagcatttataatctacctgccaggcttaagtgattctgccacctcagcctcccaggtagctggaactacaggagtgtgccaccacacctggctaatttttgtattttttgtagggatggggtcttgccatgttgcccaggctggtctcaaatgcctgagctcaagcaactggcccgccttagcctcccaaagtgcttggattacaggcgtgagccaccatgtttggctatgattattttcatataactcccctttggaataccttaaaggaataaaataaaaagaaatgtaatttatacattgcataaagcactcctatatcccatgtcattcttattacggcatagctccaatgactgtttcataaattctttacaatgcagggaaaatttttgcttcagtggaaaactatgcgttgttcagagtacacccttccaggtttttggattctgattttatggggctctgctcttttcatagcctttgagctattttacaactctgtaagttgttgataactggtagcaatgcaaaataattcttgcctatggacatgtaaataaattctgcctagtggaggttgaactgacttccctcccacactgtggaaggagccagttttgcctctatttgcacattgatttcaatattcctgatctttaaatgtttctgtcctttggatagtgctttgaactggttttaacatcttactggtttcttcattaataatgacttaaacttttaaaatgagttaaatgaatgtttagcatgtgttaattttctttctatgtaagaatcatgattttactttatttatttggaaaattattctttaataatataaagaaaaagtaggttttgagaggaaagttttgaaattaggtgactataatctctgatctcacagatggttaccagtcttctttttcatttctttgtgctgcaattttattcacagcttccattcattttttaaccccagataaacttttgaagagcggaaaatcaatgcaacaattgatcatttaaatttgtgctccacaaagttaaaacaaataaacaaactatcaatgttttaatcaccattttaaaaatgatatatatttatatattttatatatttttaattttggcaacaatctagcactcaagaaatattaatgatggtttacaagacaacttagttggcctaaaaagatgtggaaagcctttagacaataataagtagtatttattttccatataactctctttcgcaatttaatatttttattgaaaccatccataggaaccattacgttgtattaaaaaaaaacaattcacaacatccaataaataaaaaatgtatttttatacttactgtgccccaccagagagcatctgcatatgtagaaaactctttattggcatccttttccaccagatagacaaggaaagacgaaaaaataagaaccaaaaatcctatgtaccaagctgtgattaattcctagatataaaaggaatgaaagatttttagaggtgggaaatctttgaaaaaggaaaaaagaattctatgaggattctattcactttactacttcttggatgtttatgatggctcttaaataatccattgtacatcatgtcccaaaattgttttaaccattttctgcaatgactaagttttcttgtgacaggtttattaactattacagcgatcaatgaaaaagtttcaaaaattgtgtttttaaattcagagagcaaatcttaccttgctgtgagcataaaccactgaacccagtaatttccaagtgcctccccttcggtccatgcgcaccatgcggaggatctgtaggaaacggagacttctgagtgcagacgtggcaaaaatattaccctgagtttttgcagaaacaactgctattgaagcgataagaacaatggtatctgaaagaaacaggtcgaaatagccacagttagcacgaccaggaatttttatttaccaaaacaatatttccaaaaggttcactttgacctatttaaggtacagataaacagatcttgattcccagctgcacctagtgccacttggcctctgtggcatttccgaagactgaagaatgaaaaggcagagaatgggacctacctattgctgtagttctgaccctttggccattctgcgctttacctatgcaattttgaacaacgtattatttaaccttcaacagattggacaatggtgttcaaaaaacccaaggtttcagggagccttaagactttggggcaacctttcacaatgtctctcgtttcatcctttttcctgtggcaaaaggatctcctgcctcagccctcaacaccacagcttctgggtgatgtgacagaggcatgtaaatgtgtccagcttgaaagtgctgtgagatataatcatttctcttgttttcctgccaaataagtttgcatttcctttcccccaaaattccctaatgtggcacctgcaactttgcatattgtttaacaaaggcctcagctaagctgaatactctatgcttcctgtatagagtattctttagacctgttcaccaattatgtgtaagtttgctgcataattaaataatattacatttgttataatagggtatgtaagtataaacactgtgcattgcaagggaatgaatacttaatgtttgacatattgacattaggctgaaaaaatctgccttttctaagcaaaaaagagaaaaagagcatctgatgaaagcatagaaaagataaaagaaaacttaatcactccataagtaaacatctgagtgatgggaagtaggctttgaagtgggataagtgaagtggggatgaatggcctcctgtggcaattttaataaaagttagcttgactttaacatcctcaaatacaatttccttcctgctccaagtgggttgtgcatgactgggcttccacactccaaagaggagttccatttcaaggatgtcacatttgtaatgtttctgtcatcctctggattaactgctgtataagtgagtattcctcattcagctcatccttctccctgcactgagaaaggtctggtctcctggtgtggactgagaagatcttctgagcctctctgctggtgcccctttttgggtcagtgctttgagagagagggggggtcagttgttggcagtgcaagtttcagccaaagggcttcttcccctctcctctcctttcttccctctttccatcctttgacagggtctcactctatcacccaggctggagtgcactggcatgagctctgctcactgcaacctctgtgtcccacctcagcctcccaaggagctaggactacaggcatgcaccaacacgcctggctaatttttgtatttttttgtagagatggggtattgctatgttgcccaggctggtctcgaactcctgagctcacatcatctgccagccttggcctcccaaagagttgagattacaggtgtgagccaccggtgtccgccctgaaggactttttccaccagctctaaatgcatgtgcttttgtgggtaagtacccagagagccaaagagagttaccactcttggcagctgttggaaacaagaaggaactaaatgtgttgacactgacaccaaagacatattttaagtgaataaaggccagttgcaaaacagtatgtacaatgtgattttattttaatagaaatatatattagtatatgactaggaaaaaaatttgagactaggctgggcgcagtggctcacacttgtaatcccagcactttgggaggccaaggtgggcggatcatgaggtcaggagatcgagaccatcctggccaacatggtgaaaccctgtctctactaaaaatacaaaaattagctgggtgtggtggcacgtgcctgtaatcccagctacttggaaggctgaggcatgagaatcccttgaacccaggaggcggaggttgcagtgagccaagatcgtgccactgcactccagcctagcgacagagcaagactgcgtctcaaaaaaaaaaaaaaagtgagactatacgctgattattactattaattatttctaaagggagtgagctgaagtgaatatatgcataaaggggcttttcactttgtaaattattaatttctgtatgttggaagtttataacaacgactatgtctttgcaattaaaaaaactttataaaaagagttatgtgcaaacacatctcttggttttcatcatgttgagggatttactcctgagactagtggtttacaaacagacattacttatatgaccctgttggacatacattttgcttttatttcattgtaatcytgctttctcccaagtgtagaaagaaaagaaaaagatatactacctcatttactatgctaaaatattggaaatactagaaataagtacatggctagtaggggtgcagaaaatactacacttaaaacttactatgtgcttggcattttcttcagttctaaggttttttttttttttaataaacattaccttatttaatccttacaatgactttatgtgttaggtatcccacagatcccattttacagatgaaaaaagcgaggcagaaaaagcatatattgtattcatttttaaaaaaactcagctatcggtttgttagactacagcacaaaaagtatgctataaagttagttcattagagaaaacctagaaaagtaagagaaagattgttgatttgagacaatttaaaaaattatgcacacagtgaatcacaatctaaatgtttgaagttccaaaatatgcaaaggtaaccacagatttgatttaataccctcattgtaattcagatcagacgagaaagttagagttcagtaaactgaaatcatagatgagcaaccaaatggcaaacagtgagtgcagtcacaaaaatgtttctggttgggttacagtcatccactggaattttgctgtcagtaccacctagactatttcctaggctagtattttacaagttatgagtagtctttatttttacttctatttatgtatttactatttttgtgatctactatttcatagaatggtggttccacagtgttttatcattgttttgttcacaattgtatcctgagtacctagaacagtgcctgaaatatagtaggcactcaataaatatttaaataagataaattagattaaaaaacactyaaaagttggctgagctttgttctcttaccacatcaatggcttgttgactgggatatcaacctaaaatactcaggttaatcaaaggatcacttcaatttctagcactgaattctatagcaacataattgttatagctatcatccattagagtttattttaaaatctccctattatttaaagtatatgcmtatatattaaattgggggagtagcttaagctgtgcagttagttaattgtctaaaatattttttgaaacataggaagcttgtttttagtgaagataacacattttggtgtaaggtagaaactatggacagcccttgaagctcactggcttcaggttcatttgtttatccatttatgtattaagtagttaattgactgtcaagaattatattagacacttgtattaaaaatgaatattcaatcattcatctgaccatccatccatcacaattattgatcaagtccctactatgtaccaggcactgtgctaaatgttttatatacatcaatgattccgaatggggacaattttgcctccctgggacatttagcaatgtctggagacattttgcattgtcatagctgggaagggggttgctacgagcatctagtggtagagactagggttgctgctaaccatcctacaatgcccaggacagcctccagaacaaagaatgactcagccccaaatgtcaatagtgccaaggctgagaaaccctgatgtacattattttatttaattcttcaagccaacctatgtagtagatgatattataaccttctctttcttataaatgaagaaattgaggctcatagtggtcaagtcactaacatgcataagtggttgagctggcccttacttgactccaaagctgtgtccttaagaattatggtataccactccatccagggtgggatagggatggaggaggaacagaaagggggaggctatgaaagcaggtggataataaatcaggaataaattgttatcgcataaagcattcagagaagagaaaagtgcagggaggagaaagcagaaataaaatgatgctgaaaaacagatggtacttttatggctgcttcaagagaaaatggggctagagaaagaaatagaactgctaataaacaaggaggagctctaagtcacatgaataaaaaaaaaagcatgtaatccagaactcttaaaatctacctctctcaaaggaaacaaattagaacaagttgggaagtagtgaagaaagagctattgattataagcagcccagtagaaatgtgaaatataggtttacaaggtattaggaagtaggttcactaatttactgcatcacttagaatgatttacacatgaattcttgaaatttgaggtgactgcaaagatttgaacaaaataaataccataatgatatttaagacacataaggactgtgaaagagcttatttttagatgccactggaactttgctcaagtattatttagtcagcaaaatcaatatgaattgatcaccatggaccctgtctaaaaggtgttagtcactgaaataccaaaaagccttcattatttacatccaaagcttccctattgtgaactcaaggattgggttagagcaaggccaattgtacatctgaacctgatggactgtgttttgttgctacaattacactgcataatgcatgtattagaaagtataacatggctcaatgtaaaatcacaatgaaaagaactaaatcatctggatcaaacaaagcatggttgaacactttcaaactagtagttataaggacagataaaccctctcgaggtaagtaagccacaaagagggtatatcttgacttctagaaactgtctggagacttcaggcttttaaaatttttgtaaattaaaagttattctatagtctcagaaagttttccctaataactaacataaatttacctctttccctttaaactcacttcatcttgttctctctgagacaatcagaagtacgacaaatacaatgttcttgatgtttatatccccctctcccaccacatttttttgttccagttttttgaattattctagtggcctcactataagctaagttttgaataattttaataaaatatacactttaaagttataaagtaaaatatcaaaacaatacaaatgtatataaggtaggacactaatttatttaattaaccaattacttatgctatagtttggatatttgacctccaaatatcatgttgaaatgtgatccccagtgttagaggtgaagcctaatgggaggtgttttggtcatgggggaggatcgctcatgaatggcttggtaccgtccttgaagtaatgactgagttctggctctgtaagttcccttaagatttggttgttaaaaagaaaatggcacttatgtcttgcttcatctctcgtcatgtgatctcagcacatgttggccccacttcaccttctgccatgagtggaggcagcctgaggttctcaccaggagcagatgcaggcaccatgctttttgtacagcctgcagaactgtgagccacataaacctactttctttatgaatacccagctttgtgtattcctttattataaaacaaatagactaagacacttattaatgaatttttaggttacttttggttttgctattaaaatgatgctgaaacgaatagtcctgtacatttatttttaggataaggaatttaaggctaaatttcttgagactgaattcttggcatattttgatttgtgattgatatcaagatgccttcaaaatgatggtaccaattctcactaacaatgtatggaaacacttatttctctctccttgctaataaaaaggaatgctaataataataaaaatagtactagtaaatctaatgtttactgttcactatgtgatagacatggttctaagcacactcatttattacctgggatattataagtcttcaatctttgcaaatacagtgggaaaaacaaaaccatccccctcctgttttagatgcctggatttcatgtcatttttaagtcacagaagttaagttatctagaatgactttgtccaaccaagattataaaaatattttcctatattttattttggcacacttacatccttatttagttaatgaatttatgtttactattcagaatagtctttgtggtaaaggtagctagctgtctaccacagatatgtgcttcccttctaaggtacagcattatctctgagaagtggttgcccatctagaggtctcatttcccgggaccccttgcttctgggtgagatgaggtgactaattctagttaatgaagacgaatggaaatgatgtatgccacttcccagttgagggcaagcacatatggcttatcactttctctttttctatgtcagttgcagtttggtactaagaatgcccttagaaaccatgtgctgaagatggcastgcytttgtcagcctgggttcctgaataactgcatggaacagagcctttaccatataccccaaccccaaacaaagaacaccttcattggactattacacaagtaagaaataaacttctattttatttagttactagaatttggagatttatataataactaagcattactctaacttatacaatcattagttttaacggaatttttgtttgtctctgtggtgaagtagagaactaatcttactttttatcccatatgaaagtcaattttcccaataccatctaaataaaaactctgtcattctccaaatgtttgcatatacttattgagaagcctattttgggattctattatgttttattgcctattcctatattcgtgtgacacaaatgttattctttttcaaagtagtatcaattattgtaaacgtatttatttttaccaagtgaatttcagaataaatgaatcaagttaaacaacaaaattctgatacagacctcatattaaattcacggattaacatctccttctttattgtcttcctcgtctcatatctactgagtggtttacttttgttgattctgcttccatagtatgtttcatatctaattttctctttccatttatcctgtctcctccttagttcaggctacgctacttctctcttggtcatccctacaatgtatggcctggttttcactctcctgtttttcctttctctaaaccactttgtattctactaccacatgaaaatgttaagatgattatactacctctgtgatttaaaaaaggccttccaatacatagaagaaagatcaaattctgctacctggcattcaaagtgctctataaaatgctgctgctctgcctagaaggcccttctcccttctttacctggctcacttctgcttgcttctggaactcagcacagatatcaaccagtcaaggccacttgtgcccagaggtctgaggtatgctcctgtcataacacttattacccatgattatactagtagtctgtttacttgctggtctcttctatagtaagctataagaaaccaactgcatgcagacgtgcttttttttttgtaacctcagtgactagctccgtacatatcatactgtagatgttcaaaacttatttgatagatacttacctgataagttatttgtttgtagtaattaggaaagaaatagaatacaatgttataattttaaaggtcttaaaaacaatatagtttaatctcccatattttgcagttgagaagtgaaggcacgaacacacgaaaattccatacattaaaaaagaactctacacagattgaaatgcaaaaaacaaacctggaaaaaaatggcaacatatatgatgatgaacaaaagattaatatctttaatatataaacataaaacactaagaaaacatgctagtagaaaattggacagaaggcacatagacgaatttatcctaggaagaagaaacaatgactaattaatatatagaaaagttctttacaatttctagttttgaaatttaaaatactagaaaggtaccattttattctatcaaactgacaaagtttaaaaaaatgaattgtcaatgttggcaaggcagagaaaaaaagttatttgatgaagattttctgtaagaataaattggtatggtattttttgggggagcaatttgacattatttgacaaaaccattaacaatgtgaataacttatttcaggaatttaaactgtagggatgtatgataaaattgtagatgttaacaagtttgcagcagcatacttattaaactattgtttttttctcctcccagctcatacctaacactattagtaacagtataaaaaatgagaaccaatccagatttctaatgaggatggattaataaaaaacaacatgctatatcccttccagagcatgggctgtggtgctcatgtgcctcagttccaatcctggctctgctgcttaatagctgggttaccttgttaagtgactgaatctttctgtgcctcagtttctttatctgtaaaatgtagataataaaggtacctatgtcatagggttgcaagaattgaataagttaactgtgaaacatctcagtacaatactaacatacatttgagctaatttattattactattattattaccacaaatgcgatacagccacaaaacattatgtcttagaagaatattgtgagataaaatgtttctaaacatcattatttaaataactgattacatagcaggatagcaggatttcagttttgctctcccaaaatattatgtattattattattattttttgagacggagtttccctctttttgcccaggctagagggcaatggcgcaatctcagctcactgcaacctccacctctaggattcaagtgtctctcctgcctcagcctccccagtagctgggattacaggcacctgccaccatgcccaactaatttttgtatttctagtagagacgatgtttcaccatgttggtcgagctggtatcgaactcctgacctcaagtgatccaccagccttggcctcctaaagtgctgggattacaggtgtgagtcattgcacctggccagattatgtattcttatagtatatagaaaaataaatagtataaatacatacatttgcatattaatggtgattatctttaggtggtaagattccgtacaaattttagttttatatatatatatatatcttttgtccaaatgatctttaatagccatgtattgcttttgtaatgagaaaaaagagaaccataacttatttaaaaaagaagctatggcctagaaaggttagtacattggccaaggtaatttatttagtcagtggtgggaaaacagaagagaaatgggcaacatttattgagtacctctgatatatgaggctgtgcgggatgctcagtacacagactttatttcattgtttctccataatagcccttcaaggaggcacagaggttatgagtataaacttcatgtgcaacagcccaggtatttctagttctgtcctttcttagttgtgtgaccttgggcctattaatcttgctgagtcttggagtcctcacctgcaaatagggaatagatccctttttctcacagggctattgggatgattaaatgaaataatacatataaagcctttagtctgccttagtgtgcctggtatcatgttaactctcaatctaaaaaaaaatgttttatagatatacctttcccttcacttttctagattagtaatttgatactaagaaagtccaagaatcttatccaaagtcatttagctggtaaatggagccaaaaatcaaactaatttctgtttccagagcacttatatatttttttcccgtgtttctcttttggtagcttttatgtcatagaaagcctagtaaacagggatgtagaaagtcaagcaaaggcttacatgtgatattccaagaagtaaagtattatcaagaatagggaatataactacgtgcaaatagttgatattcaggtaaaatttagtgaaaatattataattaacatgttttttatattttaggttgtcccaatgggacagcagattgagacagagaggtcaatctgccttatcaatgtgagcccttttctgcagaaatttataatttttttagtgtcccatgtatatcatgtgccagatgttttattgccaacagagcagcaagataagaaggaatagaagtgttctggttccattatatttgcttatgtatacagaaggaactttcaaaagaaacagagatgtaaagcatggaagcataaagaacattgaactatgcctagtttaattatctgttcgccattaactagctttgtcaccacttatctctcagggctggtttccatacctttaaaatagttggattgaactggcaagtctcaaggatcctttctaactttgaatttctcaaattctaagtggtacattttttgttttggatactggttgaacgaggaagcatcagaaggagtgttttggatatgacttttctcaaattaagtgttaaggcaatttatttattcattcattagttcattcgacaaatattttttgttgcatgtctactataagccaagcatgaggtatagagcagtgaataaaagagaagagttttctgccctcatggagcttatgttctcctggggtaggctgatgttaaagcaataaacaagtacagaatataatgttaggtagtgacaaaaaccctggggaaatgcagagcaggatgagggtggagtcacagaggggcgggtgctctatcttaatgtgaagttccaagaagtaaagtattattaagaatagggaatataactacttgcaaatggttgatattcaggtaaaatttagcaaacatcttataattaacatgtttttaatattttagtttttattttatttttgagacagtctctgtcacccaggctggagtgcaatggcatgatctcagctcactgcaacctccgcctctcgggttcaagcgattttcctgcctcagcttcccaagtagctgggattacaggtgtgcaccaccactccaggctaattttgtatttttgggagagatggggtttcaccatgttggccaggctggtctcgaactcctgacctcaagtgatccacccaccttggcctcccaaagtgctgggattataggcgtgagccactgagcccggccgtttttagtattttcggttgtctcaatgggaaagcatctcagaggagccatgacccaacgaagtgaaggggtgaccgtgatcatatctaaggaaaaatggttccaggcaaaaaaatataaaaagaccttgaggtggaagtgtgttcagtgtgttcaagggaaggcaaggagatcaagttagcttgagcggagtgagagaaggctccagccagatcacgacagctttgggaatagctttagatgtccttctaagtattatatgatagcggcagggaaagggtttttggcagagtgcaggatcagatgtgtattttacaagatcattttggttacctttgggaaaccaaccaggaagaggctggatgccagaaaggaagccagatgtcagagaggaagctggaaggccaggtaagaagccactgctgtggtctggacaaagggtgagagcagcattacaagagtgaggttaaagtcaggaggagctgtaaaggagctggatttggtgcacattgtgaaggtggagaggccaagacttgctgaaggactgactgtgggatgagacaaacgagggagtctaaggctgacttcagggtttttggtctaagcaatcaggtgaataaagtgctatttactaagctggggaaataccactggggataggtgaggagcactatttgaagggcagaactacttgtccgttatggccatgttaattttgagatggctagtaggcatttggtagatggtgaatggggctggagtctgggggaaaggtcagggatgcagagtcaggcagtagatttttttttttttttttcatgctacaggacgaatcccttgcaatatcagtaacctactgaaacaaattgcttcaaagtgtgatcacaaacatttaatttcagatgtgggttacagactgaaggaggtaaggaagctgtgtttctgtatttataaaacaggaaagaagcatttgtcccctgagagtcatcatgaatgagtaggaggcacatcctatttaaggcatagtctagtatcttgagtaaattacctaggtgtaattccatcagttttcaataaatcgaagagatgaaaagtcatgtgtattttctgatgctttagaacatggtttagggcaatgatacagtggctttatattatattcttttatatagaaagtttgagacagcttttaggaacagcaattttgcacgttgataccatcagatgtttaaaattttcttcagtacctattttcacacataccaaatgacaaagctgcagtcagttttgatttctaaacagaaccccataccagtatttgactgcagattaaaaaaaaaaagatttggattccaccaatgaataatcaaatttgaaacatctgctggaaatcccaacatcctatgatgaaattccatgcttggatatcttattcaaggtcatagcttgaatatttaaacatcaacagccaaacaatggcattatgggtttaaatttacagagcaaaactacaatacctaatttataatactccctttttgcacttactctaagcagttaaatgatatggaccctctgaaacttagcagccagttatgtttagtagtgttgggatatgtaatttttctttaagaaacttgatacttattttcagatgacatacagattatgattaatcatcacctactgctaaaagtttttgaaaggatatcttcaggaagttctttgaatagactgtgttactcggatgttacaatggagatgccacttgagatgaaacgtcacttagcaaaggacatttatggatgggaattcattctaagtattatctgggaaaatttagaattacctggttcacctggctctcaatatttttcaatgcacaatttcctatttttggaaatatgaaatggatacagtttaggcacttggctaatccttaggggtaaacattggggtgtgaaaatagacttttcctcctgtgaagaataaaaagatagcactttaaagagtgaatttgagtaaatataagccaagaataaatacctgacattcattataattttgaaaatcttgcttgttgccatgtgtagatctattatatctatctatctatctatctatctatctatctatctatctatcatctatctatctatctatctatctatctatctatctatctatcatctatctatctatctatctatctatcatctatctatctatcatctatctgtatttcagtgggattattaaccaaacaggtcacatataattatgcatctaactcccatctttacttataaaatccttaccaaaattttccctcactggcactagattagagcagtttttggaactttctaatttcatatttacttttatgtattgctgtttatgaacgctgcaaagtgtattgctgctcttatctgtgcttaaaaggaaagaaagagtgtcccagagaagcttgtacaagataatgcgataaattacttccagaaacaggatcagaattcatggcaaccaactcctgaagctgcaggtcaggcggtgaaacacattgtcttataacaaatcctaaagctatgaggaaaaatcctccttcggactcactttcttttcattatcaattcctttcctactgtcatgagctttttgaataagacacgctctgtttaaaggagaacaaaaacaaggtttattgaaaacatgtgatactacaacttaggaatcttttataaggagactggagatggcctaatcgagttcaataccattcaggagctggatattttcccattaactaaatatggaagagtataaagaaagcataattcaaaaatagtttcagatgtgcacattttgacattgtgacctgtaaatactccagaaaaccacagaaacttgataagagatggattcttaagtcacacaatggcaaatgtcctaaggattagctacagtactttgatctccaaattccaagcacagatttggagtctgtggtaggggctaaaatcaaatatttaaaacattttgcaaaaggcagaagtaaaataattgagaaaaaggcaatatgggagtagacaagcctcctgtaaaagaacctacaattcaaagcatgcatgcaaattaagcactttattaaaaaatataatcatgttcccatgaccaaataaaataattgaagcaattagattaaaaaatgcaggcaaaaaatatccttttgaaaacctctgataactgaggcaaaggggctatttttcaccttgcattgcttgaataattgccacattttttttctctatttgctcatgttgactgtgttgtttttactttgtgtgtgtaggggttgtgatgggggcccgggggatgacgcttctcatgtgactgtttactagcttgcagttttctcaattttttattcattcaatacacattcattgtggccagaaacttctaggacctgggcatataatattaaagggcatggctggtgtggaccagatggatgccttctgtctgcacaaggctgaaagcatggtttgcatagaagacgctgaatcgagtaaccacaatcatgagtgatgaatattatgacagaagaaatacaaggagcacattgcagggacaattaacttagttaagaggccaggkaagccttctgggagaaacatagatgaagccataatgaacaaccagtctacaagaaagcttcaaaagcccttctaattaaaccacatcctttaggtaccatacataccattcctgaaattacttattatatctaaggactccagactcaaaaagtacctgtcttggttcttgctccttccatttacctcttaaaataaaatgcattcttatttaagatacacagactctcaaattctaggaatgccttattgaagatattttgaggaaaaataataaacaaaaacatacaaagatggtctgagttgataatttttttctgattgtaggtatcgattctaggattgattagaggcttcactgaacacatcacttttatgattctgtttgctaccactaagagttatggagtattgattaaacaccaggcattaagctaagcactttacatgtatcatctcaytgcatcttcttgggcaatcctttgaaaagttacaactaaaattctaagtttaaaattaaggaaatatatgaagagcaaattaaggcaaataataaagcaccttttagaacagagtttttcgtgagttaaaaatgccattctatgttacttcagcctagaactgaggaggtgcacatggaaatcctatggtaaattatctttggcattgtccctctttgcaatgacaaaagtgcctggagtgtgagtagattcggaacaactgtacataatatgagcccattaacccatccaaatattgctatacaaaaataataatagtcaacatctaaactgtacttcatctgtgccaggcaataattcttttaatttagtttttgaatagttaacatatttatattttaaacatcaaaatgacataaaaaggtaaatgctgaaaaatcttactcctacccgtttccattcatgctgtcctcattcgctatcctcagttaaacatttttattctcttctttttgtaaaaattatttcaatgtttctttatacaaacacaagcaatatgaaagtcaacttttatttttctcctttcttacacaaaagtagcacactatatatgcagtattacatttcatttttcttttatttcatatatcttgggattcttctgtagctgtgcagaaaggtcttccactgtattttattgtttggatttacaatagtttattcagctatagtgaacatttactacaaattgatgaaattattaggaagtagacttcctgggtcaaagagtaaatgcttaagtaattttggtagatattgacactcttccataagggtgatacccctttgcactcctgtggcatgtgagtgcctatttccttgcagtctcatcaataaagtgtgtggtcaaactgcagatttttgccaatctgataggtgagagaatgctttcatttgcatttcttttttatgagtgagactgggtatgtttaagaggtatatatgtatttcttattctgtgaccagtctgttcatatccattttattttctgttaggttgttgggtttttcttgatttctagagctccttataatttaaggtgattagtttctattttttagtaggagttgtaaatatttttccacatttgtcttttgacgttgctgtttagtttatcatacagtattctttgattttatgtattctatcaatattttctcctatgacttttgtatttttagttataattagaaaatctttccagattccaaggttctaagagagtttaccaatttcttctgcccagtattttatggtcttatttaatttaaatctttgatttatttggagtttatcttggaatctggtaagatagatatggatacagctttaattttttccaaatgagtaattaattattccagcatttcttacaaccagagtgagaatgaagttgggattcatatattttggccacacagggttgtttctaactttgagaaaataatgtttttgttggttatggtggaagatccaaggggagacatttggcagagtcttggaggaaaagtagtcttagagaatagttttaagaatagggcaatttctgagaggtgttgaattaaggagaacaaacgacttctttttagatcacattagaaccatgaatattggacccaactctctataaagcaccactgggtcttggtggcaattttaaatattttattccattggagtagtactttaaggctctaactaatgtcattatctgtatcttttagcaggaaagtataattagtattggtctcagtaaagtttgcttgaataaggactttctaaaaattaaagttagatttaaataatggtccttcaggaatttgtacagtattggctttttacattaattggtctctttatacttcatctatgtaaacataatacttacattcatttatcacagtatgaagaactgctccttaatgggcaatactttcatttgtttcttgacccaagtggtaaaatatacatttcgttaacttctgcttgttaaaaaaattttcatagaaaaacagaaaaagcagaaacatgatttctatgaaaataagatgtcatttaagacagcatggtctaatttaatgctatgaaacattctaggcatttcaacattttattttatgatttatttttaaacttttatttcaggttctgtggtacatgtgcaggtttgttatataggtgaattgtatattatgggggtttgatgttcagattatttcatcacgcaggtaaaaagcatagtacctgataggtagtttttttatgctctccctcctcccactttccatcctcaagtaggcttacgcgtctgttgttctcttgtttgtgmccatataactcaatgcttagctctcacttgtaagtgagaacatgtgtatttggttttctgttcctgtgtcagttcgcttaggtgaatggcctccagcctcatccatgttgttgcaaaagacatgatcttgttcttttttatggctgtgtagtatttatggtgtatatgtaccacattttctttatccaatccaccatcaatgggcatgtaggttgatttcatgtctttgctattgtgaatagtactgtgatgaatatatgagtgcatatgtctttaaggtagaatgagttacattcctttgagaataaacccaatagtgagattactgggtcaaatggtaattccattttgagttctttgagaaattgccaaacggctttccacaccggctgaactaatttacattcccaccagcagtatataagcattcctttttctccataaccttgccagcatctgttattttttgactttttagtaatagccattctgacttttgtgagatggtatcttattgtggttttgatttgcatttctctaaagattagtaatgttgagcatttttttatatgcttcttggccacgtgtatgtcttcttttaaaagtgtctgttcaaggactttgcccattttttaatggtgttgtttgtttttttgcttataaatttgtttaaattccttacagattccggataatagacctttgtcagatgcatagtttgcaaatattttctcctattctgtaggttgtctgttcactctgttgatagtttcttttgctgtgcagaagctgtttagtttaattagatccctttagtttaattgacaaaattagtcaatttttgtttttgctgcaatcgcttttgtctttgtcataaaatctttgccaggtcctatatgtccagagtggtatttcccaggtcatcttccagggtttttatagttttaggtttgtttttttttgagacggagtctcgctgtcgcccaggctggagtgcagtggcagcatctcggctcactgcagcctccgccccccggggttcacgccattctcctgcctcagcctcccgagtagctgggactacaggtgcccgccacctcgcccagctaattttttgtaattttagtasagatggcgtttcaccgtgttagccaggatggtctcgatctcctgacctcgtgatccgcctgcctcggcctcccaaagtgctggaattacaggcgtgagccaccgtgcccggccagttttaggttttatgtttaagcctttaacccatcttgagttgatttttgtatatggtataaacaaggggtccaatttcaatcttctgcatatggctagccagttatcccagcaccatttatggaataggaatttcttttcccattgcttgtttttgttaggtttgtttaagatcaaatggtttgtgtgtggcattatttctgggctatctcttctgttccattggtctatgtgttttgtaccagtaccatgctgttgtggttactgtagccttgtaatatagattgaagtcacacaatgtgatacttctggctttgttgtttttgcttagaattgccttggctattcaggcttttttttggtttcatacaaatttttaaataatttttttttctaattctgtgaagaactggtagtttgataggaatagcactgaatctgtaaattgctttgggcaatatggccattttaacaatattgcttcttcctatccatgagcatggaatgcttttccttttgtttatatcatctcagattactttgagcagtgttttataatgcttgttgtagagatctttcacctacctggttagctgtatttctatgtattttattcattttttaaatttttatttatttatttatttttttactatactttaagttctaaggtacatgtgcacaatgtgcagatttgttacacatgtatacatgtgccatgttggtgtgctgcacccattaacttgtcatttacattmggtatatctcctaatgctatccctccccccttccccccaccccatgacaggccccagtgtgtgatgttccccaccctgcatccaagtgttctcattgttcaattcccacctatgagtgagaacatgtggtgtttggttttctgtccttgtgatagtttgctgagaatgatggtttccagcttcatccatgtccctgcaaaggacatgaactcatccttttttatggctgcatagtattccatggtgtatacgtgccacattttcttaatccagtctatcattgatggacttttgggttggttctaagtctttgctattgtgaatagtgctgcaataaacatacatgtgcatgtgtctttatagcagcatgatttataatcctttgagtatatacccagtaatgggatggctgggtcaaatggtatttctagttctagatccttaaggaatcaccacactgtcttccacaatggttgaactagtttacagtcccaccaagagtgtaaaaatgttcctatttctccacatcctctccagcacctgttgtttcctgactttttaatgatcaccattctaactggtgtgcatgggatggcattcttttttttattgcacatcactcctttattatactgatctggaaaaaggatttagtacagttatgstcaaatgaacactagacctatgtggcagggccaagcaactgcaacatgattcagaaatcagtgaaaaacacacttggagaggaccaagaggcatttcactgccatgaaacaaggcagggagggattctaaaacacacagcatgaagcactcctgcccctcaaaggtcaaggagcttaccccatattggtatgaggaatggcttatgttctgatgaccacatgtgggactatttcaaccaccacgagaaacccttagaagggttawtgttttgtattatttatatacactatacttttttttttttaaataaaagtaaatgtaacacataaactaaattcaggattgatcccaaccttctagagccagttcctctggggtcagggaggaaacagctgtcacatcaccatgcaggttacattcatcttccactgggatgactagagcccccaggcagtggcctgactacagacaagcacaggactagctcctgggggcagacaggctctcttgcttctcctcattggtcgtagctcagcatggctcctcctcacaagtccttagtaaacaaagcacttgcaaaaacccaagtcactatctttgaactctcttggataasgggggcttttccacagcttagactgagaacctgtgccctagaagtgctattctgactagaatgtatgaagggagtgggtgcagaagacaaaatggctaaaatgaaaatgggagccaccggtccccatctgcagctgcaactcaagatgtctatagatgtggtcagtgtgacatgttcaggagggagggacagatggatgcaatgggcagggagggtgcctgtttgctggccttcacttcttggctttgccctgggcagccacaacttccatggctttgcacatggtctcttcatcccctaggaactgcgtgggctgggcttgatgggcttcaagttcttgtccaattcatagacaatgagaatgccagttggcaggttcagctccatgatagcctcttcagagagacccttcagatgcttgtcagtgccccagaggctgttgccatgggctgcagtcagtacccatttcccctccttgatctggggaaatacttcttcattccagaagggcagagctctggcaatagtgtccttcagactctcacaggagggtaggtgattttctgtgaggtctgcatacctgtgatccttactgatgttgctgtagaaaggatggtagggctccatcggaggtggtgggacatcataggagcacctgcagatcttcacctgggcttcactatgttttgcagcagtttctgctttattgagaccggctagagccccatagtgctgctcattgaggcgccaagtcctcactattggcagctacatctgatcaatggcatctagcactgtccagaaggtcgggatcgctctcttctgcaatgaggtgaagcagatgtcaaactcatagccagcatctcgcagtgcctgctttgccgcctcatggcccgctgggctcaggatggcgtcgtaccagccgctgaagtggttctccaggttccactcactctcgctgtgctggatctgcaccagtttgtaggtggccatggtggcaggcttgggggatagcattcttgatttggctctcagcttggatgttgttggtgcacagggattctactgatttttgtacattgactttgtatcctgaagctttgctgaagttgtttatcaaaccaaggagctttggagcagagattatggggttttctgggcatagaatcatactgactggaatcagggacagtttgacttcccctctattcagatggcttttatatctttctcttgcctgattgctctggccaggacttccagtactatgttgaaaaggactggtgagagaggacatccttgttttgttctggtgtttaataagaatgcttccagcttttgctcattcactgtgatgttggctgtgagtttcttatagatggctcttattattttgaagtatgttccttcagtgcctagtttgttgagggtttttaacgtgaagggatgttgaactttatcaaaagccttttctgcatttattgagatgatcatgtggtttttgtttttaattctgtttatgtgatgaatcacatttattcatttgtatatgttgaaccaaacttgtgtcccagggacgaagcctccttgatagtggtggattagctttttcatgtgctgctggattcatttcactaggattttattgagaatttttgcatctatgttcatcaaggatttggcctgaagttttgttttttgttgttgttgtgtccctgccaggttttggtatcaggatgatgctggtttcatagttagggaggagtccctcctcctctgttttttggaatagtttcagtaggaatggtaccagctcttctttatacttcttgtaatattcagctgtgaatccctctggtcctgggctttttctggttggtaggctttttattactgattcaattttggaactcattattggtctctgtccaggattcaatttcttcctggttcaatcttggaaggttgtatgtttcaaggaatttatccatttcttctaggttttctagtttgtgtgcatagaggtgtttttagtagtctctgagggttttttaaatttttgtggggtaggtggtaacatccctttgtcatttctgattgtgtttattttgatctctctttttttccttattagtctagctagcattttatctatcttatttattctttcgaagaaccaagtcctggattcattgatcttctgtatgtttttttgcgtctcaatttccttcagtttagtgcagattttgatttcttgtgttctactagctttggggtcgatctgctcttgtttctctatttcctctaggtgtgatgttcggttgttaacttaagatctttctaactttttgatgtaggcattcagctctataaacttccctcttaatattgctttagctgtgtcccagagattctggtatgtagtatctttgttctaattagtttcaaataatttctgaatttctaccttaatttcattgtttacccaaaagtcattcagaagcaggttaatttccattaatttctatttttattgcactgtagtctgagagtgtggttggtatgatttttttttatttgctaaggattgttttatggctgattagtcaattttagattatgggccatgtgcagatgagaagaatatatacactcctgtttttgggtggagatttctgtagatgtctattaggtctatttagtcaagtgtcaaattcaggtcctgaatttctttgttagttttctgcctcaatgacctgtctaatactgccagtgggatgttaaagtctcccactattattgtgtggttatctaaatctctttgtgggtgtctaaaaacttgctctatgaatttgggtgctcctgttttggatgcatatctatttaggatagttaagtctggccttttgaggtgaaccctttaccattatgtaatgcctttctttatcttttttgatttttgttggtttaaagtctgttttgtttgaatgtagaatagcaactcctgcttttttctgttttccatttgcttggtagatttttctccatccctttagtttgatcctatgtgtgtcactgcatgtgaaatgggtctattcaagacagcatactgttgggtcttgcttctttgtccaacttgccactctgtgccttttaattgggcatttagcccatttacatttaaggttaatattgatatgtgtggatttgaaggatcaaatcctgttttgtgttgttaattggttattatgcagatctgtttgtgtggttgctttttggcatcaatggtgtgtgtacttaagcacgtttttgtagttgccagtaataatctttcctttccatatttaacactctctttaggacctcttataaggcaggtctgatggtaatgaattcccttagcatttgctcgcctgaaaagaatcttatttctccttcatttatgaagcttagtttggctggatatgaaattcttgtttggaatttcttttctttaataatgctgaatataggtcctcaatctctgctggcttatagagtttctgctgaaaggtgtgctgttagcctgatggggtttccttgggaggtggcctgccccttctctttagctgctgttaacattttttgttttgttttgaccttagagaatctgacaagtatgtgtcttggggatggttatctgtatagtatctcacaagggttctctgcattttctcaatttgaatgttggcctctctagtgaagttgggggaattttcatggatgatatcctgaaatatgttctccaagttgcttgctttctctccctctctttcagggacatcagtgagtcatagatttggtgtctttacataatcccatactttggagattttgttcattcttctttaatctttttttctttatttttgtctgactgagttatttcagagaagcgatattcaagctctgagattctttcctcagcttgatcgattctgccgttatatttgtgattgtattctggaattcttgaagtgagtttttcagctctatcagatcagttctgttctttcttaaagtggccatttcgtctttcatctcctgtatcactttgttgtaatccttagaatccctggattaggttttcactgtctcctgaatctcagtgatctctgttcctatccacattctgatttctctttttgtcatttcagcctggttaagaaccattgctggggaactactgcagttgtttggaggtaagaaagcactctgacttttgagttgccagagctcttgcactggttctttatcatctgtgtgggctgattttccttcagtctttgaaattgctgtcctttggatagtttttttttgtttttttttttttttgcctctatcttctttgatgccctggaaggtttgaatctcatataaggtgggttcagttgactggcttcatttctggaagaatttagggggtaaggctcagctcagaacttttgggctgtatgctgcaactttgggaggctgttactggatctctgactttattctctggccccttgaggttaggaaactgctaaagtggaggcgctaaggtgttcctgcacctctggccacaatactctgatgggtggtgccagccaaaccactttgttggggtggtggcagcaggatctgtgctcatttgtaagtgccaagagcagtgccaagagcaagtggcagtgtggtggggtgaatgctcatcaactggggcagagtgctggtggccatggggctgccggcctccatgtgcacgctcatgctggtagcagtgtcagtgcaggggcaggctagtggtgagcgtggggctgccagcctccatgcatatgttcacactggcagcagtggcagcgtggggcagggggtggggctgctgacctccatgcacatgtttgcattggcatttctatattttaaaaggaaatagtttggcagtttctgataaaggtgaactagcactatatgaccctagagaaataaaaacttacgttcatacacaaacctacacatgaatgtacatagctgccttatttgtaatagccaaaaactagaagcagcccaaatgaccttgattaggtaaatgaatatacaaattgtgttacatctagatcatggaattctattaagcaataaacaggaatgcactattgatgcacttggatggatctcaagagcatcatgctgtgtaagaaaaagccaatttcaaaagattactactttacaatttcatttatataacattataaaaatgacaaaattacagtgaaacagaacagatatagtggttcccagaggttaggattgaagagagggagtacctgtaaaggaataatacaaagtatatcattccaagtttatttagggtgatggaaaagttytgtattttgattgtggtggtggttaaatgcatatatacatgtgagaaaattttataggagtgtatataaaaattgagcgcatgtaaaaactggtgaaattcaaataaagactatagctaatagtatgtattcatatcctggttttgataattgcagtatacgtaggtaaaatattttggggaaagttaggtaaagagtacatttgaacatggaaattctgtactatttttgcaacttctaagtaagtctaaagttattccaaaataaaacattgaacatcttttataatagttacatttattttctttcctttcctttctttccctccctccttccctccctcccttccttccttcttcccttccttccttccttccttccttccttccttccttccttccttccttccttccttccttccctccttccttctttccttccttcctttctctttgtctctctctctctctgtcttactctgttgcccaggctgcagtacagtggtgcaatcataattcactgcagccttgaattcctgggcagaagttaccttctcctatcagcctcctgagtagctgagactaccagtgtgttccaccacacccagctattacagttttttttgtttgtttttgtttttgtttgttttttttgtagagatagggtctcattatgttgcccaggttgatgattttgaactcctaggctcaagtgatcctcctaccttgctctccctttaaagtgctgggattacaggcatgagccactgtgcctggtatgttttcttttagactttagacaatggcccctagaaggagggagatttggggacaggaatcgaatcatatcacatggcttattaattttcaagtggaacccctttacttatgtttcaaagtgaggaaaataagaagttctttgccagttctggccagtggaattagaatatttgctttcatggcatcagataccatctagtacatgccgaaaatacggatcttgaaaagacagttgctaatctatgtaatatggttttccactgatctgttaagaaattcatttttcctgctccttcattatttctccacatgtagattaaacggattatactataattaaatttgactctaacaagaggcagtgctttagagcaatgagctattgggaggccagcatgctattcctagctttactgctgatttatgggctaaggacaaagcacccccacttcacagtgcctcgacttttccatctatagagtgaagtaaacaatgtctcagagggacatggtgctgctttataagctctatattctaattgagctccaaattcctttatagaaaggtgctctttgaagaactaaagatgtatttatattgttgttgtgactcttaatagaaatgaagctttaaaatctaattttaaaagtctcctcctgcacagtacattatccacgttcttaaatactgcaatcaactatgcactgagttgctctgtgatatttattaaaaataaaaaaggcaccacaaagacaaacttgtagaacattttcaaagccatgtgcaggggtttaactgcaggacttccacagaagttaatgggactcatactggcaaattgcaggcaccactttgaaaatttaccccatagtgacagtttaatgcttcttattgatcatacagtttcagataacatctcaaggcaaaaagggacaatttctcaaaagaaataaacaatctttaatgaaataattctgcactgcaatcatcataactaagagtatggaatagagtcccttggcaaggaggatcttaggaactgcttactggtgataccactggggctgtaaaaaagtttccatcacattctaattccagttcctcatagaaaaataacattttaaaaaacaatgtaaaatttcatgtttctaagggcagaaatatagaaacaaaattcagaggattatttccttataaacttatgtttatgttttttataaacataaatgggtaataatttgtatattgctgatatgaagttccaacaggcatacatgactaaaaaacccagggcattaaacagccatactttttgttgcctgattaatgctgctgttcataacctgaatagtattcatattaggcctgccagcaacccgtaggacctttgcctggtggcctgtctttagaaggaaccttgattcagggtagcagagcctacatggccttcagggtgtgacctctgcctgtctcccctatcaccttctgctattctccccactgctcattgagctccagccacgagaccttatgtctccaccttgtacaacccaagctcatcaagtgttaataatccttgcaattactattccctggcctggaaagatctgtgtctaaacctcctcatggctggcttcttcttaatattcaggtcaactcaagtgtcaactacttagaaagactttctcagaccacccaagctaaggtagcctctactctttctgttttattttcttcattgtgcttatctgtagatgacattatcttgtttttcaaaaacatatttgtgtattgtttttctttgtccacacgaatattatctctataagaaggaagaccttgcccatttggtgccatacagcctctccagcatccataagcatgcttggacatggtagaaattgtataaatgttcagtggatgactcaaacataatttgaaaacctgggggtagtcctttgcttctttgttttatacaatcactcatgatattccatagccttctttctaggactacttcaatttccatcacctttgctctgtaacaccataattatagtatacctcctttaagttttgccattctctaagggcacaggagattctattcttacaggcagggaccgtgttttagtcgcttttgtatcctttatacttaagattatgtttgacacataataaataccctgtctgtgaatgaattttcttatgtaacatgtgatagtacagaatgttaatacagtatatcatagtgctctactaaagtttatagaaagagtgggaaataatccttattcattttcctcttcggaaataaattttcttcatgtggtccaaccatatcagctaatcaagctgtcttgtaagttcaactttcaagtttgtgtaccaggtcaacaattatctaaattaccgatagtttattaatgttaaaaaacatttgaaggtagtcctgcgagtaatgttacttgctctccagaggtctccaatttggaaatacacagggagcctcatgataacaacaactgaagrgtatatgcaagtttgatacaggtaagtaagtctattttaggtcctaatttcccattcaggttagagagcagcaataggtaacataatttagttgatataattaaggctgatactgcaattaatgttctataaagcctggcttttctttaaagatcttgaattactaatgataagcataatagtatcatgttcttctgtttacaagttgatgacaatagataaggttcaattaaatttaattttaaaatgctaataaacagtaaagacaattttccagttgggtatgtatatttttctagagtgaaatcatgagaaataaatccaggttctttcacctatcatctttttaagtttgtcttgcttcctcatctataaagtcttcagtcttgtcttacttcctcatctataaaatgggacattataaaggccaggcgtggtggctcacacttgtaataccagcactttgggacgctgaggcgggtggattacttgaggccaggagttcaagaccagcctggccaacacggtgaaatcctatctctactaaaaatgcaaaaattagctgggtgtggtggcgtgtgcctgtagtcccagctactcgggaggctgaggcatgagaatggcttgaacccaggaggcggaggttgtagtgagctgagactatgccatttggactccagcctgggtgatagagggaaactctgcctcaaaaaatwaaataaaataaaataaaataaaataaaataaaataaaataaaatagaataaaataaagtaaagtaaaataaaataaaataaataaggacattatagtacttatgtagaattaaataagaccatatttataaagtgcttaaagtagtacctaatatatagtagttctcaataaatatcagctattactaactagagggattaaaattgttttaatgttttgtgatcagccaatccaacaggttttaattgtcctcagatggtccagttaatcacatggaaggaatctacatgcactgagggagtttgaacacttagaagtaataagttgcagaagagtgtatgactaacagaaaataagtgaaataatataatttctactaaagggaaaagggagtagaaggtatagaaaataatgccattgaagagtaagtctcttagaacaaaagatagagaagacagagaaacagaaaaatgatgtctcaaaatcaatttagaacacagtggcagttttgggagtctgatctaacttttgaacacattagcaacttaagttgccttttaataagatgaaatcatagatatattagagtagtctcagccatgtggtcgattttaataaaggcttcaattttattttatccacgtaggataaaataaaattttattttattcctcttttgtcctcttgtggaaataattacactgaaaataaactgttaaaataacaataagaaatcaacttacacttagcatcaaatgcagatccaagactaacaacaggctggtattttctcactgagactccctgcaagactgaaaaatatggccctgttatatctgcctttggaaagcgtcaccaaggaatctaaaaaaagccactgtgagaagtaatttgttggcttcctgacacatcaggctcattattgtgatccaagtttcagccttaggtctatttgcaatttttgggtaggtcagtaatgaaagctagaaaaaagaatgactatgaaatcagtcttagaggttattcacaaattctttatgccgatgttattgggtgagtgttttgtgttttcacatagagaaatcataaagcagccagtctgggtaaatgaagggcagcttgggtggtcatcccaaaacacacttgactatccacatcagcaatacagcaattagtgctcatagctatagaatgttattatgacagaagagtcttaggggagagataaaaattgaacacatagatakgaggaagaattttatgttctagataagattttactaattttcaaagcaaatgcttaaaaccaagcagacatacatcaatgtacagtagtaatgaaacaaagtacctaattaaaaaaagttaaatagatttatttcttcccttatgttataattgtttaaaatatgttttccaaacacaaatatgtaatgattttaggatttgtgagatcagtgggcttttgaaatgctcttggttttggctagagtgcaggggtaaggaaggtgggcagttcagaaggggacatgctaaaaccttcagtaattagcccataaaacctctatcaattgggcctttgtcaatagggtgcaatagtacatggggcttgttagctgaccactctagcagcttcagtgtatttccaactggaaagaaaaacattggtgtgcttacagaaagcatttcccaggttgaaggcacagccagtctaccacaatcttttctatgttcttttctcgaatgctcaacacttctaaaaatatttgggtgtgtacttggaatgttcagagtaatcaaatcttacaaatacatgaagttttgggaggttttagctatatttccaaacacccattcagaacagttatcagggacagataagagatgctatttcttttttcattttgtcacagtaaattaggttgaacaaggcgactacagtgttcactttagtattttaccagttacatcaagcgtttttatgaacctgttgaacgggcctagaaatagtctcaacagtcatctggtacagcttgctgccttcaggaaggtgatgtttgattcctttgtgtaggttaaattttactgacctcatactgataagccacatttgaacatgcttcactataacatccattcagctggaccatgggtcaaacatgtacatttaataaaagactaaaaaattcataattatcctaactgtaagtacaaatctagactttgttctaatggggattcattatatatttatccatgaaattttcttccaaagcaattaatttcctagaggtaaaatatctaaataaagaaaaggtctgaagggttaacaaaactgcaattatgcstaaaccatgtcatactagtatttttttgagacagggtcttactctttttactcaggctggagtgtagtggcaggaacatggctcactgcagcctcaaactcctgggctcaaatgatcctccagtctcagccttctgagtagctgggactacaggtgtatgccaccatgcccagctaatttttaaatttttgtagagacaggtctttccatcccaggctggtcttaaactcctgggctcaagtgatctgccttcctcagccttccaaagggctgggattacaggcaggagtgactgcgccaggcatcatactaaatttttaaggtcactattgatacatccaaaggcaagtaagattatagataacataacatcatttttagaactacatattatatcaagacctgcaaggatctgaggcaggaagagaaagactaaaggactaagatgtgttgatgtatccgtagctgaaaacagctatcaaaaggcagcagacatctgggaaaaagctttctttttcgcatggaggccagagatacattggcattgcttctgaaattggaacaaaaccaatttttaattggttttaaaatctggaatgaaacatttttccagtcatccatgaactgaccttatcctgtagaagttgagtgaatcttggctaaccatctgccttgtgaattgttttgtttgggccccttatgggacagaaagtacttgttgtgcagtagtttcacatcaggttacagtcctttgtaatgctgcctgagtagagaattcagagagaaaaaagcatctccagggagaaaaatctaatgccttcactaatatgccttggggctttatgaacctgcaaggcttggagttaccaccgactttgctccataccttagcatgatggcttccaaaaagcagtaaagcctrttattggagaagacagacaaacagacwgcattcgtgagggccaaacaaggtattttaagatagatttaactgagaattccactagattcactattgtaacaccagtgcctcacacacagccacatttccataaattctggtttaataagtggagacttttgagatgtgcatactatgaaagaagtatggaataaaggattcttcttaacagtgcccatggatggtgatacactttcttccttaaatccactctgcccccmccatagggaacaggagtaagggaggaarctgagaagattacgcaacaattcctgactcctaaaacaaaacagaaaacctgtggtagctgtagaagatagcctaaactattttgtaaattaaaaacctactttttcaggttgaaaatagttgaaataaataagcctcatcaagaattttcagtatttggatttgaatggctgcctaggaagtgagaaagacaaaaaagcaagagagccaaatttagctactaaataataataataatagcttttatatatagacttttccattttataatacttttaaatattactgggaaatgctagatcttaattccagaatgctctatggcatcttcattaggaagtacaatttcaagctagaacccaggtgaatgatgtctctcagaaacaatggcagctagggaggtgcagagatgtgctatgtatttgggtattttggattggagggtgggggattcatatttcagagtgtagagcactttgtccagtctacagttaccaatgcattaagcaaaccatacttataatcattcttgaagaatgttaattgatatgcattaccagtaccaatgtatggctatctattccagctgatccagagcataaactggtgtcatattgtagagcaaaaagggttttttatactcactgaaatcaatgttcccctaaattagggcaacactggagaaacatgtatttccatataagttaattgatataagtgggtattctagagccagattgcctggctaaaattcaagctctaccacttagtagctgtatgacattcagcaactaactccgtctctctttgyctcaaattcttcaactgtaaaatggggataataaaaatatctacctcataatgctgtggagacaacatcaaatgagtcaacattttcaagacacaagagtgcccggtccatgataagtactccatggatgttagcttttaatattaatcaaatattgcaaaacaggagatagaagacaagaatgttggtgtcatagtccaggtatctgasrctctgatattcacctataacacagaagggctttcgagcaaacctcagtcttccttgccatcctctatatcgacaacagcaacccgcagaccagattcgaatgatgaactccaaaccaaagacgacaatcatcacgaactcctaaaatatcagataagacatatcagagagaagcattatggagcaaaccacagtaagaagctctatgcatatttttggacatttaggcactttgtctaaaggatctagttgttaatatctaaagttaagaacatttcctttctccagatcaaactaaatctggacagcatttgaacctcatactgtctgcatttcctatcatggaatgctattccttttcaagtcattaatgcttcgtaaatttgggagtcagtttcaatactaaatgtgcaggctgaataatggatctgtctcgtctggaatttatagtgtagctgactttagctacccagtaacatgtgaaatatctgaaataaaatagcgatcctgaaatataatggcaagttttacagaaaatagagcttcattttgctgcaaggagtgacataatctctaaatcttcgagagttgttcttagagaaaaagaagcaaatatttcgaagtatactgaattctttcgttacagtgtcaaaatctccttataaaacagtaagtttcaaaagcattacagtgtgacacacatatcctttgccagaaatgagaccctgaatcctccagatctgaagcttgttaattattatgctgccctttggcaagagctgcctagaaaacaacacctgctccaggaaaatgactgagattatttaggaagagttgtgagttaaccctggggaaaggccagctagagtggctcattaaacagtcgatgatagaatgaaaaaccaaatggaatttgtaaaacgaaagcatttctggagcaagcttagcacagtcaccttgctgtctctatagggacaggcactttatttatcaaaattgtttttcctttaaaaaataattcactttcttgttttaaaacgagggttgattcaagatttataatgtagaacaatatttatagattgttgttataatagcttaattgtaaaagtaatatattgtctttattaaaacttccaaacatcacagaaatacaaagcagagaaagtaaacattctaacctactccccattctcccattcttactcgcaggataaaaactgttaccaaatttataaaagtggcatttttgttgcaaatttcaggcaaatgtctgtttctttaattagagcatgtgatgatatgctgcacttttgaaatgcctagtagagctatatcattctatccttctcttattttgcactaagtaatccacaaatatttctcatgatgggaaataaatacccaatatcatcactgcttactcacagttattcaaaattacttataggataaaccttcaaagatgactttatgcacagataaccaaaattagggtcaacatacattcattaataatccgaaggttttgtttgattttggctttgttttggttttgaatgtatatctgggtagttgagtctgttcatttattaaggtatctaaagtgccagatcatttcttgttaatccagcacatctttccaaatatggaaaacatactcaggcccaaaatgcccatgtagttgtgcctgtgcccaacctaggttgaatggcagatccactttttaatccctgcccctaattcctgcttatgccaggacatttggcactccagttgtgagtactcatattataagggatcccaagaaaatcccaaatgtggcctgagcccccgaacactacygtgtagtaatttttctttttcatggaaacagatgacaccaatatgtccattgttcttaacaaatgacagatatatgcccattgttcttaggtatgccaaggtcactgcactattcctctgctgcagtaaggcaggataaagtacatttacaagttctttattcaagccctattgttcagaaatattgcttgctgcttttttttttaagaaggtgaggggaaaatgacaagacagtctcaaaattcataaagcaaaaccaatagggctgaaaggaaaaatagacaaatgttaagtcgtatttgggaacttcatcaacccaccttatccttgctcagaactatgggcatagcactactagaatgaaaattaacaagtatgtgaactatttgaacaacacattcaacctgcaggatctgactgatatgagacatttcacccaacatcagcagaatacacatttttaaaaagcacccatgcacatttattaagatagattatattccgggtcataaacaaatttcaacaagtttaaaagaataaaatcagacagaatgtgttctcaagccacaatggaataaaactagaaatcaataacagaaagacaacaagcaaatctctaaacatgtggaaattaaacaatattcccagtagtccattggtcaaagagaaagtctcaaaaattttaaaaaaattgaactgaatgaaaataaaaaaatgacataacaaaatatgtaggatgcagtaaaagcagtgctgagaggaaaatttatagcactaaatgcttacattgtagatgaagaaagttctcatattaataatctgagtacctacctcaagaaattggaaaaagaagggtaaaataaacccaaaggaagcagatagaaggaaataacatagaaaagagcaaaaattaatgaaactgaaaagaggaaaacaatatggaaaatccatgaaacaaaaaagtggttccttgagaaaatcaataaagttgataaatctctttcttgaaagctgatgaaaatccccaatgtcaggaatgtaataggggatatcagtatagattctacgccactgaaaaaatgaaggagtactatggtaactttacgcacatacacttgataacttagaagaaatggaccaaatcctttaaaactacaagctaccaaaactcaacaaagaagaaatagacaatctaggtagccctataaccgctaaagcaattgaactcatagtttaaaatctccccaaacagaaatgtccaggtcaaatggtttcactggcaaaatcaaccagacatttaaataagaatatatcattttcacacaatttctcccagaaaatagaggagaaaaaactttctcaatgattttatgaagtcagtattatcctgacaccaaaaccagacaaagacaataaaacaaagcaaaacaaaaactacatacccatatttatcataaacttagacacaaaaaatcctcagcaaaatattagcaaacagtcaatcagtcaatatataggcaagtaggatttattccaggtatgcaaggctagctcaatggttgaaatcaatcaatataatgcattatataataaagctaaaaaaaaatcacataaattgatgacgaaatagcatttgacaaaatccaacacccatttatgattaaaaaaaactcttggcaagttaggaaaagaggtttaacagtttaattcgataaatagcatttacaacaaacttaacatcatacttaatagtgaaagactgaatgcttttccccaacattaagaacaaccaagatgtatactttcatcactcttattcaacatagtattgtaagttatattaatagttgctgcaataagccaaataaaagaaaaaaaaccatgcagtttggaaaggtaaacataaaatggtctctatttacaaatggcatgatggtctacagaaaaatcccaagaaatctacgaagacactcttgaaacaagtgagttcactaaggctgcacgatgtatgatcaatataaaaattaatcatatttctttatactaacaatgatcatgtggaaatgaaaattagaaacacaaaattattatttataataattccaaataaaaataacttaaatatccacttagaaaaacacatacggtttatgtgcattgagattatgaaatgcagataaaagaaatcagaaaagacctaaataagtgaggagaaataccgtgtttatgaattggaagactgatcatagcaaagatgtcaattcttcccaaattgatctacaggtctaataaaattcctgtcaaaatctcagcaaagttttttttggggggtagatacaaacttattttaaaatttatatggaaatgcacaggacctggaatagctaaaacaatgctgacaaagaagaataaaacgagatcaatcactttacctgatattaaagcctactattatagctccagtaatcaagactgtggattggtggagggatagacatatggaacatacagacatatagaacagtgaacagaatagagaattcagaactagacccacacaaatatgctcaattgatttgttttaaaggtgcaaaagcatttcaatggaggaagaagggccctcaacaaatgatgctggaaaaattggacatctataggcaaaaaagtggaccttaatctatacttcctatcttatgataatcatttaaaaatggaccacgggtttaaaaattaaacataaaataataaaacttttaggaaaaaaatggagatatttttgggatttggactaagcaaagagttcttaatcttgacatcaaaagcagaagttataaaaggaaaaaatgagaaattggactccatcaaaagtaaaaacttactctgtgagagcccaggtactaaggatgaaaagacaagccatagactgggagaaaatgtttgtaaaccacatatctgacaaaggactaatatctaaaatatgtaaagaaaccttaaaactcaacagtaaaaaaccaaaaactcaattagaaaattggcaaaggtataaataggatattcataaaagaggacatacataaaagaagttacacatatggcaaagaagcacatgaaaagttatttgacatcattagccatcagaaaaatgcaaattagatcgcaatggtatcactacacagctagcagaatggctaaaataaaaaatagtggcaaaaaatagtgacaacacaaaatgctggggaggatgcggagaagctggatcattcaaacactgctgatgggaatgtaaaacagtatggtccttctgagcatggtcgtttcttataaaactggacatatagttaccatatgactcagcaattgtactcttgggcattcgtgtcagagacatgaaaacttatgtttgtacaaaaacctgtacatgaatgttcacagaagaagtattcataatgaccagaccccaaaaacagcccagatgtccttcaccatgaggatggttaaacaagctctggtgcctccataccatggaatgctactcaataataaaaatgaatgaactattgatacacagagtaacataaatgaattgccagggaattatattgagtgcaagaaaagtcagtcttaaaaagttatacactgtattattccatttatataacatttttgaaataaaaacatttcagaaatggagaacagattagtggctgctggggtcaggctggagaagggaaggggtgtgcaagtgtgaaggagaaggtggatgtggttagcaaggggtaacttgagagatccttgtgacaatggaactgtccgatatcttttttttttttttttttttgagacagagtctcgcgctgttgcccagaatggagtgcagtggtgcgatctcggctcactgcaagctccacctccctggttaatgccattcgcctgcctcagcctcccgagtagctgggactacaggcgcccaccaccacgcccagctaattttttgcatttttagtagagacgtggtttcaccgtgttagccaggatggtcttgatctcctgacctcgtgatctgcctgcctcggcctcccaaagtgctgggattacaggagtgagccaccgtgcccggccggaactgtccaatatcttgattgttgttttagatatactaatctctgcaagtgataaaactgtacagagccaatacacacacacacacacacacacacacacacacacacacacaaatgtattcaagtaaaactggagaaatctgaatgagatttgtgagctgtatcaatattattatcctggttgtgatattatactatagttttacaaaatgttaccttttgcggaaattgggtaaagtatacacagggtatgtctactatatcttacaactgcatgtgaatctacaattatctcaataacaatttaaatttaaaaaagccattgccagcaatctagacaatgggatagactcgtaagaggaaatgtgttcttcaaatccagatgctgggtctattttcactgtgttttgtttagaggtactctctaaatcaccctttggatgaggtctcattgttttattttcatatgagttgaaaatacaaaaatctgttacattcagtcgagatgatttaaattagggatggttcttctgacccttgctgggtaagccatgagacaagttctggtgcctttgctgctgtacctcaggataaagcagttcattttctcttgcttggttttagttgaaataaaatgctcgctatttactgaaatggcagctaaagagattagtgaataatattcagaatatttgacttgtttggaggaaagctgtagtggaaacttgatgttattaacaatggtcctgtccttccttatttaagcccctagaagcttggcttggataactctttacaaaagcaaagacaataaatgtgtattatttttatcactcaccttgtaggagttacaatggttcctcatttgtcctcacagaattttggtaaaacatagaagcattttcttattcttcttaaatgataaggaaattaagaagcctaagaggcagtggtggccgggcgcggtggttcacacctgtaatcccagcgctttcggaagccgaggcgggtgggtcacgaggtcaggagatcgagaccatcctggctaataaggtgaaaccccgtctctactaaaaatacaaaaattagctgggtgtggtggcgggcgcctgtagtcccagctactcaggaggctgaggcaggagaatggcgtgaacccgggaggcggagcttgcagtgagccgagatcatgccactgcactccagcttgggcaacagagcgagatactgtctcaaataaaaaaaaaaaaaaaaaaaagaaaagaggcagtggtagagctagtcttgaattttatctacaatatgtattgagaataccaatccatattaaccctcttttccaggcattaaagaagcctcttcatatgtcacacctgagaactgtgattcaatttaattgatacatataactctgctgtaccatttgaggtttaaattatgttcttgccgttattttgttttttagctacttaaaattgttttaggcagattgattttttgggtacaaattcacaatgcttaaaagctcatgtaccagttgttttctcattaattaacagcactgttcattaaaacacagtgacctttgtctaatctacaagctgtcttctgtgaccattagttttttctggttttatgccatcaaatagcattttcgtgaagatgaaatgccgacattataaaccctgtgacatttgcagcaattcttgaagagctgtggctaattagacatacataattagaactattgcttttattcagaatatcaacataatcaattcccagctgtttttgttcctttttgtgtgtgtgcatatacttaaagtaacatagggctagcaggtcaacatgcctctttacataatccctgcagggaaagaatttgtgatgtaaastgcatcataaaatgcaaaaaaaaggcatcagtcagaagagttgcagttataattctatgtaatttggaaaattctactagtataacacatattaggggaatgaaattaagatctagagatggctccaaacttaaaccaaaatgtggaaatacacaaaagtaaatatcttccggaattgtgtctctttggagagcagaaaaatatcctaaaaacatgcttactaactataacttatagaacatcacataccatcatcaatccagctagctttcaagcttctccttactttttgggaaggtatattagtgtattggaagagaatttgagggaatgaatgtttttaccaaagggactaatttgacctggtgttgaggacacatggatatttacagaatcattgctgcacagaggtggttgtgagagcgtgacagaacttcactaagttggctagtagatgcttcgggggtgggtatggggggaagggggtcatagaagtgggagtggggtggagataggggaaattagattaaggtgtgaaggggtatggatgcttcctgccttggaaaaaaatgactgaggtagttttgacagacagtgtcactgcggctagtctcattgattggaaggcttaggtagatatgatagatgaatttgtttgagtagctccagcaaaatctagtgtcttagtgggtctttccccttgggattagttgattcctgaaatttctttataaatgatttatccattcaagtttttcacacctgttaatatataaatctgctcctgaaaagtaattcatttaaccatacctaaataacaatgttcatttatcccagaggttcttcagaagatcatagggaggcaatagtttgaaaatgccccattccaaatgactgattgacactttgttactaaggaaggatcacggctggttttttatcaggtattgaggccataaattgagaccatatgggctggaggcaggaagtgggtgccccctgcttggggaaaagaggtgggaacagcaggacattcctggtttacccctcgctgcctacctggagtggccctatgcatcccagttactagttgggatgccatgatgagaggacttccgtcctctcttgtagtgattttagatccttagggatgggttggctcttgtcagcagctataatgcctgcctagtatgagcagccacccagatgatcccttctgcctttacgttttatgttctgtaagtcacatctgcatcagggcacaggatgtcttaggctttccccttcacctgccacaggtgaagtctgcccatgggaccaagctgaagtggtgccctttgtggaggagccttactgaggttttttttgttgtccatcctcccccatcctaaacctatttataccttaattggtttgaggtttctatttgggtgtgtctgcatgcccaaatgattcatgtatgaatcataaacaccaagctggaaacattgaaaatggcttgctgtaccttgaactggacccagatatgtattctgttatgattttgtaaaataatcacaaattaaccagtgcaacttagaatcgaagatcagtgtcctgaatcagatcaaaatggaaacaccgaaagtgtctccaaaatgaatgaaatcaaaccaagttttcatttgattcaaattgctaatttgtctacttctcactaatctataggcttttcttcctcttaagaactacatgaggctgggagcagtggttcatgcccgtaatctcagcactctgggagaccttggtaagcagatcacttgaggtcaggagtttgagaccagcctggttaacatggtgaaatccggtctctactaaaaatacaaaaattggccaggcatggtgacaggtgcctgtaatcccagctactcaggaggctgaggcaggagaattgcttgaacctgggaggtggaggttgcagtgagccgagatcaaaattaaaatttaagatacacaaatttaaataaaattccttaaaacaaacaagtatttctatttagagagctatcctgaccttgagaaattagtacatgtcagccaagttgactataaaacagatcttatcttctcatattggtgatatttgtcctgtggattgaagtggatgcttgtgtcaagataagagatagtacggcttccatgctactgagagtgagaggcaggtcagggctgggcatgttcttagagaactttcagaatttttatcttttcttacggaggagttatgtctctgttcttatagctgcccttctttggaccaaaggaattgctcttatactgggaggtcccttgatttccagaaaatctgcttcttccttcttccttgagggtatttacagagtttcatatagctaacttctctgcaatgttgacttcatttctagatgttctgcttttcatgaattcattttataaatgtctaccgaataccataaacatgcaggatataaagatcagcaatgtgttctgtcaccctcgaggagtttataatctattgggggaagataagacacaccactagaaaactcacaaaatctcgtgccagaaattctgctgagtgctggtttctagagaaatgccttacccattgtcgtagcccctctgcttagagcaggccctagccaaatgtttgttgaagtttccttcagttcacggcttcaggctcagcaccacccaattagcatactgttttattatctattaaaatcaaaattctcaaaaagagctagctggaggtggaaaaatgagaataacttaattggcctatgattttcatttctgacctgtctattcagctttatgacactaattgcaatgagagggtgaatggcttcttactgcaagatgtcttagtgacagtgtgggcttattttgattaatgtaagctggaggacagtaactacctaatttcactcctatggtttctaccactgaatgattttattttcatttgttgttacccgatacctcttctctttttacattttactagcctgaaaggatttttcactaatggttacaccgttgttcttaagacaagctgtgggggaaagaaagtgagagacagtttatcccttttatttaagcatattttaggcagaatctccaaatgtcttagttcttggaggaaatggaacttcagggtggagccagagtggctcctgaaggctaagcagaagtggccagtgtgttttatttactcagtaaccaggaaagcaaaggctgtgttgatgaaggggtagaaccccgaaaaactcaactgttgagctgtcagtggggaagacattctgcttgttggtagaatgtgaaaaacccggaagaaatggaaacctttgggatcatggctttcagaggagaaaagggtattggcagggtagtgttggagtcctgtagaaatcagatacaatcttgctttgtttccctgcccctagtcttcttgtggactgccatgtgccactgggagaaatctccttgcctcctcaggtcatttgaccaaattccttctagacttcctagcaaaacagaaaacattttgaatcaaaacctagtcttgccttcctcctcttctacctgtgatgattattttcctttataagcaccaaagtgcattttattacctaagattatttatttttcccattaccaaagtatgtgttattggtgtaaatgtactttgtggcaatatgagtaatatcctttggtgagctttgagaggtaggaaaacacatctttctgtgcacattgcatgcacactagtatgctcacttgctttcagaacttgatattgaaactcagtcagttaggctcatgcaaaagaacaggaaaggcagaaatctcagaataaaaactgacaggaggccctgttaacagaacatatcaccaccaatagaaactgcatattagctctcagtgcaatttctaataaacataaagaagttaactatcctcaaagtatataaatcaatggcattgtaacaatattccattaatcacactttcaaaattaaggaaaatttaaagttttctgctgctttgaacaactagatcacaaagaaaaatctaatatatgcagtctcttttattttaataatttcaatgttattaaccatgtgaatcttcacagtgtattcttcatgaaatctgtcatgattctgtgctatttatttatatctctaattgtttccagtcatccatcaaaatcattcaagaccactcatgccataaatcaagtatactcttttttttttttttttttttttttgagacggagtctggctctgtcgctggagtgcagtgacgcaatctcggctcactgcaagctccgcctcccaggttcacgccattctcctgcctcagcctcctgagtagctacgcccagctaattttttgtatttttagtagaggcggggtttcaccgtgttaggcaggatggtctcgacctcctgacctcgtgatccacctgcctcggcctcccaaagtgctgggattacaagcgtgagccaccgcgcccggccaaatcaagtatacttttaaattgagtaagatgaagggcctgatcagagataatcttgaactaatttaataatctcttctgcttgttgttcaattgaaccattaaacaatagattaagaatcaatatgtttctatactggcttaaaaaaaaaaaactgagttgaggataaaaacaagagaactacctgggcaatttccaagtgttttagaatgcattttttttaatgctccctaagcataacacatagcacatggcaaatatttagcagttagatttaatggtgaattatcctgacagctgaatccaggaattcatgggagtatcctttgtttctgtcacaatccgtttctctgttgtgttatttaccaagctacattctgattcccatttgtttttctaaagtttccctgctggagagaaaatgccttgcttgccaagtgtaacttttatctctgatagagatgactcctactgtacataagccatcactcttatttgcccacagtagtgtttggaatattattgctgtcatacacctctgctcacatcatcaatatgtcttaattaatacatcactgcctgcttgccacccattatgcacacacacttaccaaacaacctctgatgggtgacggcctctatccacagcaggatgaattgccattgcttgaattgatttggaaaatcacttagtataggagggaactgatctgcyacagtaacttgaaaccctcctctactctcctgctcctttatttggttgtagacttattcctacctggcaacacgacacttgatttggagaccatggtagtactttaatgatatatgagaggactgattcacaattttaactaataaagcatcctgtacacaactagtgaccaaagccatggaaatatagacccatatattgaatttacaggacattaacaagaaataagctctgggcaaaaataactgtctattcagaactaagagtctgcccagaaaagaatgtattggagagagaaagtgcacttcttactctttcctaagcagcatggcatgcctgaatagatgtaaagtgatagagcggtgtcaagttgaccttttgtaaaatctagataaaagaagtcctagagcaacgtgcacaggaagtaaatttacagcctgggtcagagtgaacggggtggctgggctgaaggaaaaaggaacaaggaacccacagcagtggattctcctcttgaaacaaggagagctctgaaaaatttcctaagctgtaaaggaaacaactcttgcctctctcgtttgcatcccctttttcatccgtgcttacattccaggccagccatgaagcctcgagggaggaaatgctctcacacctccctacaggtagcctgactatgcagctgtgttgttcacaccgtcttgccgtggtgaagccccaagaatctctctgcaggtgtgggagctggggagactctgctgctccatattttggcaagcagggaatagaattgtattaaagcaagcatttttcccccataataaagagtttctaaagtcactgaaagtacagtatcccccagccccatatcttggcaggcagggaatagaattgtattaaggcaagaatttttttcccccataataaagagtatctagagtcactgaaagtacagtattcaaagactaggtttatatatccaagattggtatctcatcagagactataaattgtttacactgttgaaagttcccatttttacaacttcttctgttttattaccctgcttgtttgcatggtaaatatggattcagtggaatcttatcttcttccagaacactaatacaattcatcacttctattcagactccattaattcagaatttgtgattataccactagagtttggttgatgcttatttttgtattatttattaaaagaggatatactaggcaaattcagaacagaaatgagaggacaagggggaagatttagcatagttaagaggaaacacttttcaagacccttaatagcacttatttgcatttaaacaattaatggaataattacaatcaagccatctcattaattaaagaaaacccagcaggatctttatttggcaacagtttgttagcagagattctctaagtatcgactcaaaggaaaattgataggagatatgcctcctcccaaatgctaattaccccctttcaatcatcttaaatgtttcccaaacattgaagtaatcattccaataagctacagctagctgtacaaattactatgcaaatacgtgtcggtctgtcccacaggtaagttccaggttcctgcaatctgtggaggcagcccttagcctagcaaagcatgacaagctggaccagaaggaagggtctactgctgatccaaggggcttgagattcatttccacagccctatcttcactagttccttgatctgtatttgcatattctgttttgatccttttcatacttctactaaaaggtagacctatcccagtagataaggcctacttgcctctttctccttgatactggcttctaaataactaataagctacaagttttggggaagcaaagggccagcacattgacttcaatgggtcaatgtcaaacactgggatcattaatttggtcagagtgggacgctcagaacaaagtgcagaaaaggtggtttccactatgtctcattcattcattcagcagagcccaggggatagaagcatggaggggtctgccatttatggaatgtgtgcaatttaacttaacctctctgtgcctcagttttttttttctataaaattggaatgaaaaatccattcttaatagggttgtcaccagactttaaatgaattaatatttttacagtgcttagaacagtgcctgatacacagaaatcgctttaactctgttaaataaaataagcccactcattaaatatttgctgagccaggtgctcttctaaatgctggaatacagaactgaacagagtaaacatatccatgtccatttgatgtttctagtggaagcaagcagataatataatgaacaagtacattgggatacagaaagatagagcattggaagataagtgctatagagagtgataaaagaggatgaaggtgctgggaagagatggaaggtttccagctttaaataggagcagggtaggccttttggagcaaactctaagttattaagggagtcaagcagatatctgatgaaagaagtttcgagacagaaggatcagttggtgcaaaaactctgagtgtgaatgaggaacaaggagaccgggctggctgaagtagactgggtaaaaggagagggataggaggtgaggatatctgggaatggctgactagactgtgtccctacatagtttttaggtcactgtaagaactttggcttttactctgcaagaaatggggagtacattccaggacaaaggccttgggcagaagtttggatttgtgctctgaccacagctgctctcatccctcaccaggttttggtagagacagaagatccttctgaaaggaactgggcacctggagatgatccgaggatcagggcatggaaactgggacaagactcataagtgtgtctattctaggcaagggaataggaatgagaatctaagctaagaacaaggcattccctgatgcatgctaaaagcagaagcttgaaaatataaatatatcatatcctcattagacgattttccataattatgagaactttcaagtgaatactattctgctcactgccaagtgccaacccacagctactcagccctggtcctcaacgtggccatgaacggacaagtttccaagaatgtctttgaggagatgagaaacaatgtgagatttggtattgtttactggcaataaaggaaagaaaaacagcagatatgggaagaaccatcttatatttgatttttatatactttccaaaatacatttaaatgggaattcggaacacttgatttttttttttttttttttttgagatggagttttgctcttgtcgcccaggctggagtrcagtggtgcaatctcggctcactgcaacctttgcctcccggctcaagtgattctcctgcctcagcctcctgagtagctgggattacaagtgtgtgccaccatgcccagctaatttttttgtatttttagtagagatggggtttcgccatgttaggcaggctttttttgaactcctgacttcaggtgatccgcccacctcagcctcccaaagtwctgggattacaggcgtgagccacctctcccggctgaagtgtttttatttataagtttgtagaatgcttgcttatcttgttcagctgctcaatttcttcttgctggaaaatctagagcatcaattatgttgcaacagttttggtaaaattgccatccttttctccaattttgacaaatgtctggctcggatgtctttagaatatgacaatagagagaattagatcacttttcactttttctggcatgtaagccaaagctggggagtagagactttgaatttatcttattttctgactttagcactgcgtgtaaaggagtggccatgaagtgagaatattaataaggaagttagggacataatacctatcttcccgtgcctctcaatcaaatgttgagtgttcaaaatattaagaaaagcatgtggcttataattgatactattacttaattgaaatctttgagtattgaggagagacactgtgctggtgggaaggtgggcagtgggatgactattgtcatgcagaatgcactgaacatttataggctagggcctgattcatacaacttgaatgtcgttatttgctttggtcacattttgtctgttggaaagtgaatctccttgaataatgtttttgttcatctgaaatgtcagtcttataaaaagctgctagtcactatagtggttagaaatttccatcttataattaaaacaaagttgttggcagttgaaagaaacataaaactgaattctggctctggctagagtcaaattatgtgaagattttattttattcctctatttctgaagattactgagtcaagagaaagagcaatccctcatttcagatgaattttttttttcttggagattttcccaagcaattaattcttctcttttgccttcctgccctcatctgctgcaaaccccaaactttgagatctacctgtctatcaactatctatctatctatctatctatctatctatctatctatctatctatctatctaatctatctatctatcatctatctatctatctatcgctttcagttgatggcatatcaagggaggttcacatatgtgggtaacctaaggttatttttttttgtttaattaccttgtcctttgaaatcattctgtcctaatgatgcaggtgcttgtgtcagtggttgaactcctatattgatatttgctgctcaggtatttggccaggattatttatgccagaggcttaagggtaaggactgactgcttacagttcataatagcttaggtgtgtggttgtcaagagcaagacattccctttgatgcgttaagaggcaattatgattggcccagtaattattggaaagagaattgacatttgggagtgatgctagtatcctgcaaacaatgatatttatgtagataaaaaacmtaaaccttccaaggtgctccatttcttggagaattccatccctttgtcctttgaaaaaattggcagtagcaggttactgcaattaccctaaagatttctggttttttatcctagattaggtttaagaatggttcccagtgagctctttaaaataattaatatcaataagtcctcaatgcaatgttaatccatagctctttcaaaggaagaagacgccatccccaattttgcttccatcatcccagagcaccaggactttggatgaagactgctgtaagctaatactctaacaagttaaatgctagcattgaaaatgatgcaggtgttaggccatgtcctgggaaggcatctgatgaaatgcctcaagtctaaattttgacagaagcactgctttaaatgaaggttcctaggggcttaatacgaaaatgaagtgtgttaatattgggtctgtttccagagtgttttgctcatcataatggtggctactatttccttatccattttttttcactctccacctcatgagttcccttctttttctctacatagccatgatctccaaatccagactcccgtatctcctggactatagataaatatttccagtacattctgatggtccccaaatgaatcaaatgtaatatatttaaaaccagcctatctctcctctgaaattgtcgaacaccatgtgttcttagtcttggctgatgtcatcactatctgaccatgccccaaagtcagaaagtgcagaaatcctcacctccagcctctcacctcaaacaccaccccttgatggcttggcctcaggaatgttctatgaattcagtttttcttctccatcttttctgcctctattttagtcctgatgctcatgtagcttctgggcaatgcagcagcctccatttcttcctgccctccactattccttctccattccagttattcctcaagacatagtcaaaattatctttctcaaaaccaaatttgatcagatcaggtcattgtgctacttaaggacctcctttccatttccaatcacttacaacataaaattcaaatgactgtactcagaagagtaggttcttctctgtttcaatcttcctttgagcttctgttcatctacctgacccccataaaatctagccagactgaccaagacctttgtgatgctagaaccacctcaaatgtctccatctatggaagcttccttcaattgccagtggaaatgagtcccttcctctcttgtaaccaattaggctttcattctacttacttaggtcctctcatttaagcatgaatgaagtcaggaatgagctagggcacttaacttagaactagtgggcactcaagaaatgcttggttaatgcatttttttttcagagacagaaactcattctgtcacccaggctggtgtgcagtggcatgatcatagctcactgcagccttgaacttctgggctcaagcaatcctcccactttagccttctgagtagctaggactataggcatgtgctagatgaggacttactgtgttgctcaggctggtctcgggctcttggctttaagtgttcccctttcctcagcattccaagttgctgggattataggcataagccactgtgtccagtttatatttaaactggacacagtgctttaaaagcaaaatatgtgttaaaagtgaaaaacaaaagtatcatgtgaggtctgaggagggattggtaactatgttttagtttgactaggctcagttgatctaaaatgttataggaagctgtttgaagacactagtctttttttttgcatctagagatcactagtgaatcattcggttattactaaattagtttttaattaaaatatgttagtgttgaataactggctaggtctttgcagtaattcttgttacatgatcttatgcatttttaatgttggctacagactcatgttatactattattctttaatgtgcatgattatactgctttgatattagataagcatatttgctttaataacataaatgattgattagcccagactcagaagggtaagtgaatctcagaaaaaaatgaggaagagtgaaaaaaaagaggcacaaaatgagcgaataatcactttattttagactttgaaacttgtgttccacattacttaattacagttgcctttatagatcttccaaatgagtgaaaaattgtttttggaatttaatactgctaaaattgcaagattaattgaaaccagagtattttaatgtctccatggaggcattgaacctatatactaatttattaaaaagcttgctattagtacaggagagaaaaacctgaatctactcattcattacatgaagttgacagttttatcttgcatctcttttgctccaggcactgaatacctattttgttctaggcactggggctaaagtgatgaacaaaacaataagggtccactcttagggagcttatgttcttatgtataataaaaccaataatgaaagacaataacaaataagccagcaaacatcaaatagttataaattctataaagacaataaaacaggaatacatgtggagaatcactgctggcttccttagattgaatggtcaggttattcacataggtattgagcacctcttgtatgataagtactgtgatacatactaggaaatacatagactactaacaaatagttcctattcttatatagttttcaatctaacagaaataaaagtatgtatggaaaccaacaactgtagcagagtgtgatgaacaccgttatagaccatccactgctacagaccattccctctgagctgtgttgaaccccagaacacaagggtagggaatgtaacaactcctggagagtcagggtaaactttcaagaagagagcgagctgagaattaataaattgataggaattaccaagatggtgaagggaagtggtagaactgggtttttcaaatagaaggaacattatttttaaaggcacagagacagtgtgcatgaaaaatatgaatggtttagtattgctggcatgtagcacatgactgtgtgtgtgtgtgtgcatgtgtgggcacctttaagggaaatcggtgcagcaattagcctagagatgtaggaaagatcaggatgtgagaagcctgtgtgtagcaaggtgtgatactgtgaaatacacagtatatttggtcttcctccttgtttcctggcatacaactcttaaaatccttagaatcttcaaagtgataagtgtctttttgtatgaattgactggtagctggaaacccctaggcagcttcaggatggaggctggtcaccagaaagaccaagacagggttagagggttgggacttttaatcccaccacccaacctccaaggacgggaaaggggctgaatgttaagttgatgatcagtggacaatgtcaatcatgtctatgtaatgaagcaccctccataaaaataaaaaaggacaaggtttgaagaatttctgtatagctgaacatctggaggttcctgaaggatggtgtgcccaggaagggcatagaatcttggcaccccttcctacataaccttgccctatgcatctcttcatctgtatcctttgtaatatcctttataataagctggtaaatgaaataagtgtttccctgagttctgtgagccattccagcaaattaattgagcccaaggagaaggtcacgagaacgctgatctatagttgattggttggaagcataggtaagaaagcaaatctaaagcttgcaattggcatctgaaagttggggcagtctcatgggactgagccacaagatctgtgggatctgactctatctccaggtaggtggtatcagaactgaattgaattagaggacacccagctggtgtccactctaaaactgatcgcttgctttgcgtgtagggaaaaacccccacacatctggtgtaagaagtgttctgtattgtgagtggacagataaaagactttgttttttcctctctgataaggtaaagaattaaatcttttaattctaaaaaatatttggaattttactctgggttaaaaataggaaaagacagaatgatcccaatgttataggtgctatgcactgagaaaatgtcaaaatacataaataagtgaaaaagaaagcttataattattaaatcagactgtcttatatttttaacaaaatattgtttgtgctatagtaatagctgtaaaatttgtttctaactttaacaccatataacattgtttttcaatctaaactgcctgatagttccctttattaaaatttaggctaattttaaaaatttgaacttttgataaataggtttgtaaagcttaaagatttctttaatatagctggataaaggagagtagaaaagtttgattggatgaagaatactccaaaccatgtcctgatgcaggttttatccttttatccttttgatttatgggacctaaggatgatacccgccaaacttagtttgtgttgttgatgtctttcactggaaaggactgcattatcaatcagaatatagtgtgcttttgaataggcagaatgggtaaactctatccactgaaatatgggctttcctgccacaatgccatatatacattgctggaaaacatagtttggggcaagatttcacactaaaaagaacagggcttatgataaaaatagaattcaaccaaaccactctaaacctaggaaackttgtaaacagagacctaacgaaaacaattctaataagatagaagtacaattaaaaaggcatgtcaaattctaataaggaaatgctggagtaatcttggccttcacttaacatgtaggtgaagagagcttgatggactgggatgctggtaaatattcaggctgctgcattatggagataaggtcaccctgtcatatatcacaggtagacagaggtgttggctttgcatacaatgtggtgatgctaatgatggattacttctgttcatcatctatgtttgtgtcttctgcacaagactgggaagatctgtctaagtaacttccaaggaagagcgagtatccaaaataaagaaggtagacatggcagtactgcattccttcaagcttggtgcattcagataggccaatgtgttgtatgctgagctgctattatatgagaaaaataatctctaacttctgtgttacattgacatcattactgtatgtacaatttcataaattgtggatgaggtaacttgcattagggaaacttaaggtagcagattgactgtatttgcataatgctccacattctccacctgatttaactaggaaaataattttaaagaatcatcacagacagcgatggggactatatgagtatctcagtgtacagctgttatataatgtatgccatgcctctggctcacagcatacctggtaggtccttagtgaatatttgatgagtgaataaatgaattaatgaatcaatgaacagctcaagattaaaaaaaaaactgcagaagtgacttaaggaaatgtttgtcctcacagtgttggggtttcgaaggacacagctcgacctctatcctagaggtctccatagctctttcttggactctacaaactgacaagcttcccaaactcatcacacagcccacttgcctcacccagttgtatgcgcatccctgcctggctacagtgaccctgggcatccaattctccaccgctgtaggctataggtcaagaccagaaagtgactcagaaaggagcctatggaagagaaacagatgggctaactgacaggcagagaaacctccagacttatagaggtgtaattaactcacaaattctccagtcattattatcattaagtcaaagaggcaggaatgccccccggcccttctctatttctgcataacactcctccaacataatatgttgggatttctctttcttttgaggttgcatttgatgttattcatacttgatttyacctgatttaaaaaataacgttcaggagagtaaggggtggggagtgagaaccagagtgagtcctccctactgccctgcactcctaggggtggtcctcttttactttctacccttctggtctcccctgagagctgttttggtctggagtttccatttctttgttaagactcttctgcagtgttctttcatgaggagggctttccaggttttcccatgatgctgagaccttgcggcactgaatctccctaaattagtcttcagtgagccaaggctggagggcctgtaacacttgcacagtctcttttctgttctgcattttccagtaatgttctgtgtattcattgtgatttatagccctggagggagccaggtctgcagcgttttcattgaatccagcctgtaatgttgtttgtcaagctgccatttacagcttggaaaatttttctctaatctactttgcagaggcatgatgtgtcttctcactttagttgtaacccctggtgtgtatacctgcatggggaacagtgggacctaccctattgcttccagcttttggttttgtgcagtaccaaagcaatactcaataaatgggcatgatcagtagtaacctatattgaaaatagtttttgatcatctcatttgtaatctccaagataaaaaaatgacttagagatagacctattttcttgtgtggatatgtcctaaagtgggaacttaaaaaatgatgaattaacctatttctctctcatcttctaatttagtaatttcaccatgatttcaaggttattttcttctggaatcagtcagaggttgtagaaaataccatactgtggacaatgaattcttccagggcagggcgatgccttattcatttttgggactccagaccccagcacaggggctaaaatgtaggaagcatttaatatatatttgagttaaaattgcatgagttaagggactggagctggagaaattagaagaggaagtaagcagaacccagggaaatatrtgaaaatctatagaaatccacaggatcagagaccaagtgggaaatccagagttgggatatgtaggccagagcaagatggcaggtctcaatcaatcagagaggcagtaagcaaatgggaaccacagacaaagcaaaccatgtctggcaggaggcaggtaacctgcagctatgtagtaactgaaggggcagaatacttctaatctgctgaggaaagccctcccagaaatttctgtgaggcacaaaccaattatacaggacttacagttttggtttaacctgtaagttctctatattgttctagtccatgccctttcgctattcatgctgcctctgtttggtttagggctctattgtgttttacttgaataacttcacctgcttcctaaatgtcccccatcctattactctctgctctagtccattctaaagtcaggtcctgcatattgtctgaattttggtgccatatccatgattccatgaacatgtcaatattagtgttatataattaaatgggccatctcctttcatttactgatgatttgccaccaactattactgtattaagtggtgtcactgagtcagctttggattctcttctcaggaaatttacagttcaactggtgcctcattttctccacttctcccaaccctggcttaccctccttcagttgctcatcttcttgcccttccttgtctcaccaggtatgctcctgtctaaagcttatgtccttgaagctctatctgcctggcattttcttttccctaatctttgcatgcctcatcgcctcattccattcaagtctctgccacccatttcagtggacttctctaaacatactatctaaactttccttcattacctattcctttttcttgctttccttttatttgtaatatctaatatattgattttcctgtttgtttattctaggtcttccacaaaaacattagctccatgagaacagagattttggctgttttgttcattgctatctcctcagctcttaaaaaagaatgcctcatccttattgggtactgcatacatcttgttgaataaatgaataatggagaagatacaatgtcaagtagacaggactgaggaaagttagaggaaagaaagtttatttcaggaaggaggaggtatttggtccaggtttcaaatgatggaaatgatcacagcatggaaagatagtaagggaagggtgtttttccttctactgacaaacattttgacttattttccagtaaccctgtaaaatttatcatactaccttgtttctctttctctctccatcagatatacttttgtgaagctcaaaagggcataagagctaaacatcagtgtggacctggttgaatatggctcatttatagctctaaggatgtctgctgggtagcctgtcaagtcttgaaacaaagttgtacagagtttggtagcatagcctggaccacttggttagacatcaatgtttgcataaaaatatggaaaattctttccttccttaattgtagatagaggcatggtctttttcaggcacaatcattatctttagcttcaaaaattctttcctctaatatctgaaatactttttatggggcaacttactatgttattatccttctgttaaggttcagtgtaggtgtttaactattcctgcttttttcttttcagtcatcggcagattgatgagggtcgttagtctctgtgaatcattttagagtttatttgcatttttccttgatgaaagaaaagcaaaggaaaataactgcagttttcaatgttcattgggatattctgagagctttctgcagtaaattatagggatgtgataaatctaaagaagcattgctcattcctcacatctgattgcttcatatctcatactgcgttactgcctttacaaacataagatttaatatcctcgaatggattcttatccttacactctgttatcctctcttacaatatttaataccagaagttttaaatgtaaagactactgtcatctcattctgtatcaaacccttacaatttcatgtgcaaacctttctactttgcaaggaccagtaaatgtgcttgtggctgatttttccctcccccgttaatactggtatataggaagtggcaatgatgtctctaattcttcaataccatgttatatatatatagtgaatatttatatagcaattaaaaatgcatgtgcccgcattaaaaagaaaacaaacatgtaacaaattatgtagctgttattacctttccaaggggatgcttcactttacaaaagaattccctatagattttctttaaatagtaagctccactagtacatttaagatataattagacctgcctaaattgagtttgtacacaattcaggagcagagtcactgtgcagggaaacaataaacccatgtttactttgctacctgaagcataaggagaaaatatgcatatgtagaagctgtcaaacatctggatgtttgggaaagcctggatagagtactcatccagatgctgagcacgatccatttgtagtttggagtctttctaacacagcaggagggtacaggagcaaatatactgagacaggctctgtcttgctaaaattgatagtggcattccttttactgcttatgggtgggcacttttagaaatgataacctgcaataagaattttgcaaataatatgcatcactttcatcaaatggagttctcttttctcaacatgatggacaattttcatctaaaaacttaaaataaatactttaaaattaatctggatggcaagaagttctttaacagagaggaaatgcactccagacagtattgttctcaaaaaggtgggaaatacaatgctaaaacctacaacctttggctaatgaaatcaaaacaaaccaaacaaaacttaccacaatagtctaacctggaaataggagaactcacttcaacagcatgatactcacctgagcaaagtgaactggggctagaagatgaacttttacacttgactatttaccccatgaatcaggctcttgaatatttgcaaaacagaatttagaattctcagtacaaagaacttctagtggtctgaattgatatacccatttgtgataacttggtaagtggaactctttatgaaagcacagcatcctaagtaaaagtgttgtaagccttatttggcatatatggaacaaaaagaagccttagacatgagcacttcattgggtactggaaaatgcattttggtagacttgtcagccttgaaagaagcaagagaatgagaggcagcgggatgctctgaagacagcccagtcttttcctcagccaggcctaagctggaatcttggctattttacacttggtgtgttatcttgcacaacttatttagctatttgtgaaaatgggaggggatacttacattgccagttttatttttctagtaagaaatcaatgagcctaataaatgaagggtacttaaaaaatgctggctccctttcatttttgatggaatcaccaaatataggaaattaacaccagcttttaactgtccctggaatgtggacacacagtttcatacacgttcttgagttcacaaattttatcaccagggtgatggcagagcaagcaagtccatcagatctggagttattcctgcccaatgtttcactcagtagatgcagacatcgagagaagagatataaagccacaagcactgtcatcagacgtatttactaaaatgcttcaacaattgaaatcagtttcattagccaccagaaataagtggctattgtgaacacatgctgcatgccgaatgtgtaccactgagtcacttttagagaacatgtttatgtagcaagcttccataattaacagtgattgcggtgagaaaactcttacacagatacttgttttctattataaaatataatatttcctyaagtgtagcattttcaaatgttccacagttcacctgtacttgtgtccctatgaggtctccattaaacatggaagatcccatgatgatcatatttgctatctttccaagagttttctttctgttgggcccagtcctaagcacttgaatttatctaattttcacatcagccttatgaagtaggctatatcattaaccactttttttttgagttttaaatttcatttaattttttttaatttttagttttattttaagttccggggtacacgtgcaggatgtgcaggtttgttacataggtaaatgtgtgccatggtggtttgctgcatctatcaacccatcacttaggtattaascccagcgtgtattagctatttttcctaatgctcatttaatcttttaaaagatttttctcaatttttttattgtggtaaaatatatgtaatataaaatttacagyttaaccattttaaagtatggttcagtgtggtattaaatacattcgtaatgttacagaaccatccccaccacccatctccctaactcttttcttcttgtaatgctgaaactcttcatctattaaacaataactcactattccctgatccctacagcccctggcaacaaccattccactttgtctctatacttttttgactattctaggtatctcactcatataagtggaatcatacattatttttctttttgtggctggcttatttcacttggcataatgtccccaacattaatccatgttgaagcatatgtcaaaatttccttctttttaagggtgaatactttttttgtatgtatatgccatattttgcttatccgttcacttgtcagtatacacttgggtcgtttccacattctggctattgtgaacaatgctgctatgaacatgggtgtacacatctctttgagaccttgccgtcagtgtttttggcatacatccagaagtggaattgctgcatcatgtaattctattttttatttttttgaggaaaaaaagctgtattgttttccatagtggctatagcatttcacagtcccaccaattgtgaacaaggattccattttcccacatcctcaccaacatttgttattttctgtttctgtgatagtagccatcctaacgggtgtgaggtggtactcagtgtagttttgatttgcacttccctaatgattaataatgttgagcatcttttcatgtgcttattggccacttgtacctcttttttttttgagaaatgtttattcaagtcctttgctcattttttgaattaggttgtttttgttgttgagtttcagaaattctctacatagtccagatattaaccccttctcaggtatgttatttgcagatattttctctcattctgtgtgttgccttttttctctgttgatactgtcttctgatgcacaaacattttaaatttttatgaagttcagtttctctgtttttttcttttgttgcctacacctttggtgttatgtccaagaaatcactgacaaatccaatgtcatgaagtttttgccttatgttttcttctaacaatgttatagttttaggtctttaaggcatttcaagttaatttttgtgtattgtcttaggtaagggtccagcttcattctttcacatgtggatatctaatatttccatcaccatttgttgaaaagactgccctttccccactgaatggtcaaaaatcatttgaccgtaagtgtgtgggtttatttctggactttctattctattccatgggtctaaatgttggtctttatgcctatatataacataaaatttacagcttaatcattttatagttcagtgtattaaatacattcataatgttacaggaaactacatcatgattgattactgtagcttaaatacattcataatgttataggaaactacctcatgattgattactgtagctttgtagtagtaagttttaaaataaaaaattataagtcctccagctttgttctttactttcaaaatagtttgggcaatttgggggtcctttaaaattctatatgaattctaggatgggtttttctatttctgcaagaaacatcattgggattttgataggaattgcattgaatctgtagatcactttggacatgttaacaatattaagttctcaaaactatggacagggaatgagtttccatttatttatgtcttattaatttatttcagcaatgttattgtagttttcattgtacaagttcttcatctccttggttaagttaattcctaagtattttttgatattattataaatggaattgttttcatagtttcctttctaaattcttcattgttggtaaaatgcaactcatttttgtatattgactttgcatcctgctactttgctgaattcatttattatttcttacagtcttttttttttttttaaatcttcaggggttcctacatataagatcacatcatctgtatacagggataattttacttactttttcagttgggatgccttttgtttcttttatttaatagttgcctaattgctctagctagcaattagtacagccgtctagtactttgttgaatagggatggcaaacacagacatccttgccttcttcctgatcttagaggaaaagttttagtctttcacctttgtgtatgatgttggctgtaggtttttcatatgtggcttttatcatgttgaggtagttttcttccattcctagtttgtggagtatatatatatattttaatcatagaagggtactgaattttttcaaatgttttttctggcttcaattgagataaytatgtggcatcttcccttcattctgttaatgtggcctataacactgatcaatttttgtgtgttgaattattctttcattgaaggactaaatcccctttgaccaaggtgtataatcctcttaatattctggtaaatatacgagcattttgttgatgatttttacactaatgttcataagaaataatggtctatggttttctttttcttgtgtctttggcatcaaagtaatgcctcatagaattagttaggaagtgttgcttcttttttatatttttggaatagtttcagaaggattgatattagttctttaaatgtttgttagaattcactagtgaagccatcagatcctgggcttctttgttgttgttgaaagattttttattactgattcaatctccttactagttatagcactattcggtttctatttctttgtgatttagtcttggtaggttttgtgttttcacgaatttgtccatttcatctagatttccaatgtgttggcatacaattgttcacagtactctcttattgtcctttttatttctgtagaatcagtagcaatattcccatttccatttctgattctattaattcgagtattcttttttcttagttcatctatctaaaggtttgtctgttttgtcaaccttttctaacagccaacttttggtttcattgattttctttattgtttttctagtctttatttcatttatccatgtttactgtttcctttgttctggctagcttgggtctactgtattcttttttagctccttaagttgtaaaatgaagttgctgatttgagatatttctttttttaatgtaagcatttatagctataatttttaatcttagcacaactttcactgtgtcccataggttttggcaggttgcgttttgttttcattaatttctaagacttattttttgacccattggttgtttaaaagtatgctgtttaggctgggcacagtggctcacacctgtaatcccagcactttgggaggctgaggttggtagatcacttgaggtcaggagttcaagaccagcctggctaatatggtgaaaccctgcctctactaaaaatgcaaaaattagctgggagtggtggtgcgtgcctgtagtcccagctactcaggaggctgagaggcaggagaatctcttgaacctaggaggtcgaggttgcaatgagccaagatcccaccactgtactccagcctgggtgacaaagtgaggctctgtctcaagaaaaaaaaataaaacaaaggcatgctgtttaatttttgaatattccagttttacttctgttattgatatttaacttcatcccattgtggttggaaaaaatactttgtgtggtatccatctttgtgtggtatccatcttttaaaattgttgagacttaacttgcgggctaacataatggcatatgaataacataagaatgtttatgttattgttattgggtacagtgttctgtattatgtctgttagtcctagttggtttattgtgttaagtcttctgttttcttacttatcttctgtttggttgttctatccattattgagagtagggtattgaagtctacaactattgttgtagaactatccatttctccctttaattttgtcagttttgcttcatgtattttattacctgttattaggtgcataaatgtttataattattacatcttcttgttgtattaaaccttttattaatatataatgcccttctttatctcttataacttttttgatttaaagtctattttgtatgttattagtatagccacctctgctctcttttgtttactatttgcataaaatatcttttccacccttttactgtcaatgtatttgtgtctttgaatctaaagtaagtctcttgtactaagcatatacacagttgaatgatgtatttttatcaattctgccaatctctgtcttttactagaaacttttatccacttacatttaaagtaattaatgataaggagacgctttcatcattttgctctttgttttayatatacttcatagctttttttgtctctcatttcctgaattgctaccttcttttgtgtttagttcattttttttttgtagtgaaatgtttgaattcctttctcacttctccttgtgtatattctatagctattttctttgtggttgccatgggaattaaattaacatcctaaagttataacactctaatttgaatttataccagtttaactttaatggcatacaaaaactctgctcctttacatctctagccctacacctttcagttattaatgtcacataattacatctttatacactgtattccaaaaaaggaaaaaagaaaaatgaaggatgtggggaggatcgttttaatcccctagaagtcacttttgctggtaggggaggggcttacagcaatgggtgaaggtgcaacagcaatggctgccacattttttgtctgcgcctctgtgatcagaagcagcaattagtgatccgaggtcagatttctgatatttggaggacagagttctttttgcccatcctggctcttataagctgtgttcaggtccctcctggaacatgtgcacagctgcctgcaatgggcctgggcgtargggatgggtagctatcactgtgctaagagctgaaatggacaaaattaactgcaacttaccatctaagccttcctctgtaagttgcaaacattcaatagattccagagttccatccattgaattacatcaaattctgccagtgcaattgttgtttaggtggggaracagaatcytggtgattcctactctgtctttcttctagaatcctcctattcacttttaacagataagacaactaaggcacagtggagtgattttccaagtcgcacagctaaaattggacaggagtgaaatttgaattcatggagcccgactatagtctgtatcacattcttaagtctatgctccactgcttctatggagagaaataaggaacctggttgtataggctgaaatctcagttcccacaactgaaaagaataaatgagcaaattaacacaggtattcatttggcttgtaaccaaggcaagtttgtgaagttacaagtttacaagagcgttggcagtgccattctggatggaaatgaggggagacttcctttttggatgtgggatggacagcgaaagtccttatgggggcccccaggaggcaagcaagagatgtctaaagggatggcctgcacctaacacgctggtgccctcaagggaacaattaggtggaaaagagtgagtgtcaaagagggctctgtctacaagccaggtttgcctgtagtgtgctccctgtcacaagtgtcggtgcctttcacttgcacagaaatagaattgtaggaaatatctgaacatattttaaaatgttaaaaaaaccaaaagggatggaagttatgaaaaaatacacaatcttgatataggatttacacatagttctaaatgtacacctctggtgttgtctttatacatcaacagtgtacacgaaaagtgtacaaatgtggatttattgtacatttttgcaaacattttattttattttattcatatttgagatggagtcttgctctgttgcccaggctggagtgcagtggtgcgatcccggttcactgcaacctccgcctcctgggttcaagctattctcttgcctcagcctcacaaatagctgggattacaggtgtatgccaccacacccagataatttttgtgttttttagtagagacaggctttcactgtgttggccaggctggtatcaaactcctgacctcaagtgatctgcctgtcttggcctcccaaagtgctgggattacatgcatgagtcactgtgcctggtcttgcaagcattttaaaagccattgctttttactatttcaatgataatccttcttcttcctttggatggtaattccttcgatatgtctcatcttgggaactttactgctaatcagaatcgtgttctatgagttctgtgactttgaaatcatagtaactgtctcaaaaatacatgttaaaaggtaataaatgagacattacttaaatcattaagatttgtcatcttaatgattgacttttccaaatcttctacaaatgattgaacttttataatatactatgttaactcattgtgaaaaataattaaaatattaatgctttcctaatttattcattgctaaagaaaaagtaaaagacagtatttgaatttttgtgtccagataaaaagattttggagaaaacattggtgaagaatttcatctgtgaatcttagctctgcaatgcagtctgcatatttctaggtaggttttgagaatatactttgacaatgtatcactatagtacaaagatagtaggattaacaaaccctctccctatggaaagccttgttgcaacaggtttctgcgaatatatatctgtagcactaaccacattgctcaaaacaaaggcctcatctgcatagaggaactcatttccaccttgctaaatcagaaagcattcaagactgacatctacatttttattttctactaaatgcactctagttactaaactctgatccattgttcactatttaacaggttttaaaagtcaagatactaatcagttttagactttgtgattacatgggtttctttggactatttagaaattcattagcaatgacagaatttatatttcagaggtttggaggatataaatctaacattttggatttttgacctggctctggaagaaatcttttcatgagattcctaatgattgatttattcctaatattggtcatgcagtagatccagttttttgtttccaagtttaaaaatcagatttatattttcagtctaaaattcctggttgtagttccatatgtggacctaaaagccagctataccttagcccttgggctcagatcatttgtgttatcaaaagggcagacaaggttaaaagcctactttctacccaaagggaaagcttgcaaatggaacagatctctgatgtgctctttggtctatctgttctctaccttgggctttgaaayggtaaccttaacatgagcaatatgctgctggagcacaatttgtatgcaaatgaattgagagagatttattacagattcaaaatgaggtctccctgatattgcacagaaagacttgatgatgtcttagcaaccttgagtacaaactagccatctgaaagcaaaggtaggaaaagcatctgccccctctctcaggttatatgagttgaaatctttcagtttccaccttcgtggtagtaacaattttttcatattcaatatttattgctgtaacataaccaacctctgcttattagggcacataaaccatcttaccgttttcctccccctgcttctgtatacccctaggctttacagaaacagtgagctgttccagtttgtagttcattcaaatagctctaagactgtcaaatctgataattttggacaaagtgagtgggtcaaaatagttgaaaatgaaccaaactttcaatcagatgtgattagagtgtacagtgctatagtttagttgtaatagaaagtatgagagcttaaaaggctcagaataattctgataaaaatatcttggggtctttttccattttaaagtgaattgagcaattctgtgtggttgaggattgacagcataatggaaacagagcaaactgcagaatttatcaccaggtaactgcattagcagcaaaactcataatgcagtctgttggttgaaaagagcatgaaggagccttctattttcttatgaggtgccatatgttcatagttcttggccaattatatttagctactgccaaattacagttattggaaaatgctctctactctatagtctttcacaatataatgagaggcctcatagatactgattcttcttatataatttgtttattagcatagataaacatacttaaaactgctttctaatattgccttctatttatgatatatctacaacacaagatattgctgtgtaatagcaatcctgaacatttctatatatttctaaggattgactacatgttaaattggtgggcaaatgtttcagtaatctttgacatttttatatttctcagtaactcttttttagataggatttttttgtaggataagatgcatagtataaatgttataggcagttcttatacaacattcatgtacgttcttgttcatgtttcacttaccaggatcaagaggcaacttgaggccaattttgtgtgctcagggatggtagaaaacactgacaaaatcaagcaaccaaagacaaggagaaaactgtaaaacaacaaaaagagaaatctgataagaaccttaccttattatcacagacttaatttcttgcttcaaatgaataaagcaccaggcccattaaattagcacacattaactcataaaaactctggaagggactagccattttggatattaaaatacaatgtgatatactgtgcaaatggggctcctctgcaattttattgatgaaaaaaaggttgtgtttgtgggtttgtgtgtgtggcatgctgcatttaaatgttagcatctaagagtttgtgaatttcccatacaacttccttcccaaacaacgatcctgagagaggcccagaaagtatgttcttgctctcctatctggggaatccacactgcagtcactcttcgttcaaaggagccgagtctgtctcctgtttggcaactttgctaaactatcaagtgtcctaattggttgttactcagccactggctcattttcatggtctgatattgctcatggattctcatttgctattcctttatattattaataataagatcatatattaataataagaatagaaaaggaagtgaatgatttcctctgctacccatacactttccatttccttctagtcaaactgctggataaatgacttctcagctctgtctattcatatataaggataagaaacagaattcaggatcaggcattgtctaccaattaatctacagatatttttattcctacaaatgtgtaacttctaggatcaaggcgggagctgagtttccaaggaaaatgtctactaaaagggaaggctctgtttcaaagttgaagttacttattttgaaaggcagtgttaaaaaaaaaacctgagctatttgctctaggtcatattttttacttgtgttcctctctgggaaattcatatagtaagctgtcttaaaataccaagtttctatgctcctctggatgatggtgaagttagtccctgactcctccttgcttcccctgaaaagtcttacaagtcttaccaccacacttgattggaagttcccaaaggccagggtttgggcagtatagccagagtttgcctaattatgcctacaggacaaatctggctcctaatgcctgtttgtgtaaataaagttttatcagcacacagtcacagtcattcatttatgtattgtctatggctgctttcatgctatgattgcagaactgagtagttataacagggtcagtaaggcccacagaaatgtttgttgacccctgactattcaggggtcaatagatgaccccaccacatttattccttgtttctttatatttatcccaacatgttttctatgctgataataatgactaacattcatagaggggttcctacaagctggacactgtgctaagtcccttttaaatgcattctcctcattcttacattatcaattatctctatgttatccccagaaatttatggaataaaattattataatccccattttacagatatgaaaactgagaattaacatttgtagctcttccaaggttgtgtagcagaaagagaacctaagcactgtgtagtctaagcctctatgcagtgtgctgaataagcatcagagatgagaatggtggtggtattctcggctcaggaagacacttctctatctcctcaaactgaggggaaaggggttgccattctaaacagaaggctccaagaggaaagagcctgctagtgaaaaaacctagtacacgatgttaatgattcatcatgcttttttatttttcatttttatttttttagaaatagggtcttcctctgttgaccaggctagagtgcagtggtgcattcatagctcattgtaactttaaccttgaactcctagggttcaagctatcctcccacctcagcctcctgagtagctgggactataggcgcaggccagcaggcctggctaattttttttaaaattttttgtagagacagggtctcaccatgttgctcaggctggtctcgaactcctggcctcaagggatcctcccacctcagcctcccaaagtgtgtctggcatcatcctacttttgattcatgcatctaatgattcaggatactgtggattatattttaagttggtcctaatggactaaaatttgcaaactagtggtcaaaatccagtgcacctacctgacccccaaactataaatgagaaagtaaaatacagggattactaaggtagttgggaggatgatgtggcatcagatgacagtgatagatgtcctcctctggtgaggagcccttatctggatattccctccctttccccaccaagtccaggtttcccagaaaacacttggaaaagcgagcaggggattatttaatcattaagatgctttcctccttcaagagcatcccaatggcagttttataatctatgtctgtgctcgaaacacatcttattgctagttccttcttcatcaatatttgaatgctgttttaatttagccttgtacagctggtagcctttggtacagtgccttctacaatgggtactcaatacatgttttcaattgtgttgaaataattcctatgccaaaaatggattttcaggaatggtctacaaattcttaccactaggaattaaaatctagtgaggtgggcaaagtgaacacattggatcagaatgaaaggcagaggcagataagtgctaagaaaaatgctacagaggctgaaagtggggagggattctatttagctgggaaaggtgggagcacatcaagaagtgttccaaaaaaaagatggtgtttgagatggtctttgaaggaagagtaaggtttcaacaagagaaatttctggagaaacacatcctagaaggagggtacaaaatgtggaaggcagcaagtcagaaaatgaatgaggcaaactatttgccttttgtttcatggaacgagaattatcaaagtttgcagaacaggatgaaacaggtggctgaattgggagtctggagctaagtggaggagaggcttgtagggcagagtctgcatttagttcagtagaaaatggggagccattgaagatttctggacaggataaaagggtcatcagagttgccttctgggaaaattaagttggcagcagtgtgtatagaatggatctgagtagtgagaggcaggaacaagggtaacagtgaatctaggttaggctgtaaatgaacatagtagaaatgagaatggaataaacagggagactgaagggatgctgtaaattggggagtggagtctgggaagcgggtgtggtggctggaaagtctgagatgactgtacaagtcaggagaagaaaagtcaaagtcagaaggagaaactggttttggggagaagaggataaatccagttttagacatccacgtggaaatgtggatttaaatctcggctataaattctagctggagatatggaagtatttttttccccctagaaaaagtaaatgtatggaacatgttatcctgacagtgcagaccaagcatataaagttttggtaaataagcatagaggatattctagaaccatttctttcatttggcaaatgacatcatggagaacaatgaacacattctgctctgaattagctcttggtatcattgccagaggcagactttctggctggagaaaacactgaactgacacagagtgacccccgtaaggtgacagtgttcagatgttgggctgattggcagtgacatagtgaggtttgtgtgtgtggttttgctgactctattgcttctgaggatcctgtgcgcatgtatgcatgctgattactgaccatgaccccaacgcacctctctagtggttgaatacaagtagaagcggtggcaagagtcactgggctcaggctatcctaatgtagagtccacggtcctccaggggatctgtgtgtaaaatttagggggtagtgaacatagaggggggatatttatgtgtttatctttcgctaaccatggcaatagatcatgatggtattagccgtacttgtgaatttgttgctcacaaaaatcacagattttaaaatctcattttacagttgtagatgaaaccataattgtttcatcttgaatattgattttgctcatcatttcaagattatgtagctattagccctactgctaggggttgtttttaataaagaagcatatgcattgccatattgcaaatttgtgtaatgttttaataatagatttcatcataatttttccttttgtagtcacatatatttgaggaatggttcatagtttccacaagattgctgaagggcccatggcacacataaaaattaagacatctgtaattgagaattggtaagacggggctggaagagggcccagttttgcacctgtcagctttatgatgagtttaaaatatatgaatgtttttccatgtatacgttaatcctgaggtatcataagatggatattccttcaaaattagtctggaacagctattggcctttattttgcctgaaacagtcatttatattttgtttctgaggaaattcattttgatctagatcttttatccaaaacttatttggaaggcactgattattgtaagagaaaaagaaggaaatttataaaaaatttaaatattaccaactcaaaggactctatgtttactcaagaaaactatcatcagcctttcttgtgggttaattaagaatcaatttgttagatttaatttgacaaaaagcttgacttgggaatctcatgggtgcttgtataacagataatgtctagcttccagaactagtgcatcaagcacagattcatttagcaagaatgaaaatgatgtgaaaataaaacattcagaaaagctctactgaacgaaccatggcaagttaccctattggcattcacacaaacacacaatccccaggtactcacaaacaattgtgaatgatgcaatgaagaaaggagaaatggagctgaggtttaaagtagacatctccctgaacttagcatgatacaacagtcaaatcaacagagtaggctttgctgattgaagcaaccacacatttccacctagcaggtgctctctgcaagcattttggcagactgtaagtgttccatggcataatggcccatgtaagttagttatactcattaagaaagttttgagggaggggagatcttaaattttttttttttttgagatggagtctcactctgtcgcccaggctggagtgcagtggcgtgatcttgacctactgcaagctccttctcccgggttcacgccattctcctgcctcagcctcctgagtagctgggactacaggcacccaccaccaagcccggctaatgctttttgtatttttagtagagatggggtttcactgtgttagccaggatggtctcgatctcctgacctcataatccgcccgcatcggcctcccaaagtgctggaattacaggcatgagccaccgtgcctggcccttaaatgttttaaatggaatggaaccataggattgaaataaaagatgctaacaggaagaagatatagaatattttaagaaaacaattcttcagaaataacttccaaaggaaattcaaccctgcttctgacttttcataaactttaagtattgctttgatgaagtatgatcttcagtgcatttgacaggggaccttgagagcatttcatgaattatgatgactggagtatgcctgctgacattagagactatagctgaccccactggctggcacagcactttgcctggaggacaggccacctaatgaaatcaaaacttcatcagcagagggaagcactggagtcatttctttcttccagcatcctaaatttacctttctttctaaacttggtactttgcaaaatatcctttatgcataatgtttccataagagaagtgcatttggcacctgggatctactcagagcatgcctcagcttccactgcaaagcaataaaaattaaatatgacatttttagtgtctttaacggtgatttggaataattgattagaacactgcacgat

SEQ ID NO: 97309 - DNA, 131172 bp, Homo sapiens
cctcatttctcctttgtagtttttactttcttccttgacctcaacaatgtcagtgcttctcagggttttgttcttgattttgtttttctcactctgctctccctgggtaaccaaatctaaacctcaggttccagttaactatttctaagctaaagactcacaaacctgtacttccagctcagacctgaagccagcatcctcgacatgtatctaactgactcttgggttcttcatttagatgtactggggttgcctgaaactcagtatactctaatgaaacacatcattaccccatctaaacttgctcctactttagtattttctgtggtcatcaataacacctccatctccgtggtcacccaagcctagactctcctttcacttcccactaattcaaccacccaaatcttaagagattcagcccccaaaagatctggacatatactgcgtttggacatgagggcacttattaaaccaatcataatgccatgatagtgcccccaaacagaaaagtggttaaataaattatgcaatcatttatcagggtttatttttattttttagagatggggtcccactgtgttggctcaggctgggctgcagtggcatgatcatagctcactgcagcctcaaactccttggctcaggtaatccttctgccttagcctccagagtagctgggagtacaggtgtgtaccaccaagcctggctaattttaaaatattttttatagagatgggatgttgctatgttgcccaagctaggcctgaactcctgacttcaagtgattctcccacattggcctcccaaagtgctgggattacaggtgtaagccaccatgcttggcccagttcttggggtttttgaagaatatttaatgacatagaaaaaagcttatgatccaatgaaagaaattaggatatatgacttcatcttagattttatatacgtgggaaaaaaaacagtggtttctttcaggcaatagtaagtagtagtagtaaataaataataacttccatcccatgtagggggctttgcatcaactgttctctttctctggagtgtttttcccacctttgcccaactcctaaatgcattcacactttagaagtggtgaatgcatacttcatctcagattggatgttgcttcctcagaagtactttagaacatgtatgtacttttgggtatatggacatattctcatagtgacctgcgctttttttttgtatattctccaatttaaaacttttaattaaaaagtaaactttaaggccgggcgcggtggctcacgcctgtaatctcagcactttgggaggccgaggtgggcggatcacaaggtcaggagatcgagaccatcctgactaacacggcgaaaccccgcctctgctaaaaatacaaaaaattagccgggcgtagtggcgggtggctgtagtcccagctactcgggaggctgaggcaggagaatggcgtgaacctggggggcggagcttgcagtgacccgagatcgcgccactgcattccagcctgggcgacagagcgatccgtctcaaaaaaaaaagtaaactttaatgtcgaaaatgcaaacttggggagggcagaaagagcacacacaaggctgtcacttcacacttggagggttgcacagcggccagcagaggcgctcctcacttcccagatggaaggaggggtggggggcggggcggccgggcagaggccctcctcacttccccgacttgctcctcacattccagacggtgtggtggccgggcagaggccctcctcacttcgcagacggggtgggggccgggcagatgtgctcctcacttcctagacggggtgggggccggtcagaggcgctcctcacttcccagatggggtgggggccgagcagaggcgctcctcacttcctagacggggtgggggccaggcagaagcgctcctcacttcccagacaatggggggactgggcagaggcgctcctcacttcctagagggggtgggggccaggcagaagcgctcctcacttcccagacggtgcaggccgggcagatgggctcctgacatcccagatgtcagtggccgggcagtggcgctccgaacttcccagacagttgggtggccaggcagaggcgctcctcactttccagacggggcgggagctgggcagaggcgctcctcacttgccagacagtggagcagccaggcagaggtgcttctcacttcccagacggtggggtggcggggggcgtggggggggggtggaggggggagggcagggcagaggcgctcctcacttcccagacggtggagcagcggggcagaggtgctctcacttcccagatggtggagcagcggggcagaggtgctcctcacttcccagacgggatgggggcggggcagaagtgctcctcacttcccagaaggtgaggcggcggggcaggggtgctcctcacttcccagacggtgcgggccgggcagatgggctcctgacatcccagatggtgcagtggccgggcagtggcgctcctcacttcccagacagttgggcggccaggcaggagggctcatcactttacagacagggcggcagctgggcagaggcgcttctcacttcccagacgggtgacctgcacttttcatgaatggtactaaccagtttgaatttatgtgattatattttaaatgtcagcctccctccctagactgtgagctctgtcagagtagggcctgtgcttgctttgttcaccactgtatctctagcaccttgtatggcacctggcatatttgttgaaagaatgaactacatcaatgattttcaaagtgtgttctgaggtagcatcttatgtgtcgtggtaagggactgaggaaaatgtcagctggttgcctcctcccaggtcctgttttatttggctcaaatattggatcctggcataagaatatgagtatacaagaaatttccagtgcttcagaaaatattgtacaaactgctgaattagttgatgttaatgtatcttccatcttcaatataacgtgatcctaggtcaaaataacaaagggggccaggcgtggtggctcacgcctgtaatcccagtactttgggaggctgaggtgggtggaagcttggggccaggagttttgagaccagcctgggcaacatggcaaaacctcatctctataaaaaatacaaaaattaactgggcacagtggtgcgtatctcagctacaagggacacaggaggctgcagtgagcctagactgtgccagtgcacaccagcttgggcgacagaacgagatcctgtctccaaaagaaaaaaaaaataacaaaggccatgtaggaatatacatgtcgtaattagggagtggtatttgccagcaaggttggcagtggttcccttttccaggagcaatgaagcttctctttcctactcttaattgaggatctcaggggctcccatccctttccacttggctaagagttattctcaggcctagagttttttcttggctaccctctttaccatccatgaactgctttctccttatcctgtagggattaccccaaagaccctacagtccagccatttggggttacttgtagttttctcccattcacatactcattcatgcagttccctcatccaagaattatttttttcttcttagcaaagtcatcctgtaacttaaatgccaatccttgtaagaagcccttcccagaagccctcctcccctcccacagtactttatgtatctatatagaaacttctgcagttcaaatgggcaagttacttgctttatcaatagaaaaatacaaataatattacaggctcggttcccaggaagcacactcttacatgactagtgtgcaggagatttattagggaatgctcttgggatcattacttgtgggagggaagaaaagctgaactgggcagaagttggacttcagtgaagtctcaatggaatgccttagctgatcctgcaagttgttctgcaggaggagaaaatccatcagaattgtaccaaatggaggtgagagggctgagccttttatccctgcattgatcagtcactggatgtggcctctctgagaacattatgactctgtgacactggcatgcctgaaaggggctgacaaccgatggctggctgtgggtatgactcttggcagcagcagctcagttctttattcctgaagtggggtctgaaaagtgcatctcaaggcctaccacaaatagtatatatctcataggattgtcagaagcctaaaatagggtaacatagaaaagtacacagcatttggcctggcacataggaatcaaaagcatgctaagtatggttattataataggatttggctctataagtagaaagagcaaggtagggaaacgtgtttatttttgtatctctagtcttagcatagggcactagtatgttttatctttccttttttatttttgagacagtcttgctctgtcgcccaggctggagtgcagtggcacgatctcggctcactgcaacctccacctcccgggttcaagcaattctcctgcctcagcctcccaagtagctgggattacatgggataacaggcgtgtgccaccacacctggctaatttttctatttttagtagagacgaagtttcgccatgttggccagactggtctttaactcctgacacctcaggtgatctgcctgtcaaggcctcccaaagtggtgggattacaggcttgagacaccgcgcccggcctcccccacccccgtttttttttgacatactgccacccagaaacactagtatgttcaataaatacttgatgtgttaaaaacatgtaaccctttttcttgaagtagatgttactttgagttgaactcaaagctaaaatacaaaacaccatttaaaacatttaataacttttattagcaacataaaagaaggcacaacacgtatccacttgcccgaaaaaaaaaatagtgttgcaaaggaaaacaaaagtaatgaaacagcactggacaattgtcaaagaagagccccagttaacggcttctaccactggattttatatttttggaacataatctttatagccacggaaggaggtttagctgtttttccacagctcataaatgatgaagttatttatcttcattaatgtgtgttgggctttattttcctacatgctcaatatagttggtagatctgttttgatattactgagcactgctttgtgccagacacaattctggggatacagcaatgagcaaaacagtttactaagtccctgcttttaaaaattttacatttctggtggtgaggatactgacaaataaggtctggaagttgtaactgttatgaagaaataaaagcaggtgaagagttaaagcaatggtgcaggtgtactttttttggatacagtggtctgggcagccctctgagaagggacctgaaatatgcatcgaacatcgaggagttaaaaaaaatctggaggaaatgttctgccagagaaatcggcaagcacaaaggcccgaagtggttcgagcctgcgtgctgtggtacaagccagaggtgaacgaggcgaggcagaagcacgatcataaatacatgtatggatgttctcctggcttgagaccacagtgctaagggaggtggggtttacaaatctctcaggaggccacaaagggcaggatgaagccgatttccaatggcggagctacgaggacgcctttcctctgctagggccaggttggacggttgcaagggatggactgcaacccgccctcggaagaccaaacttcgcccaggggcagggactggccggggagggcctcggcggcgcccgacccgcgggcgctgcacgggccgcggttaccagcaggcggtgtagtgagcgcgcctgcagcagcagcaacagcagcagcagcggtcgccgccgccgccgccgcccgccagtcccaacgaggagaaaggaggggaccggaaggagccgctggtgctgcgggaagtggcaggagcgggaggcggggacccacctggaagcgccgcggcgccgctatcgagcttcctgcagcggtggccacccgagcaagtgccgtggcgggggcggagagcggccacggcggcggcgcctccccaagtggcccgttgcgtccgaccccgcgtgaaaggtgagcaagagctcgggacacgtggtgagggccagacacgggggagggagaatgaagggggagggaatgggggtgggaaacgatcggcttgggacccggatttggagccaagtaccgggagggggtgggctggaggcgacgactgcgacggctgcgacggcgaagcccccacgtggggcgggggtgcgcgcgcacgtgtgcgcgggcgaaagggggggcggggagggcttttgggagggcgtcgggagcgcgctcgctcagtagcggcccacgtgacgggcacgccgaaaatgtttccacgtgacagggaggctgcctggggcagcgcactgcgctctgtttatgtagtataatcgtggtaatcggaggtttttaagatttctgcttttctgtacaaggggaaaggaggagacgtataaagcggaaagacttcctactgtctcagtgttttaaatgttcactactccgttagtgaagtgctttttaagttccgaaatactgatttttttctgtaccgccatgttgggtctagtggaagctcgcgagatgcgagtgggtttgtatcgcgagatctctcgattctcgcgggacctcgttggcagagcagttgtcctggatggcggagccttgggttccgggggcctgggacctgcaactctttctacaaggcaagtcgttagggaggggcccggggcgagtgcctcttggtgccgggatacgtgctgcatcagcttcccatagtcttgaagggaatacagtaaccccattgaggcaacactgccctccccatccccctgcgggcgctccaccacctgcaaaagcatatgcacccctcagccaggtccttctccccacgcagtgatagttccaccctgtcccactcactggaagtccgggagccgtgctcgcgcagacctgatgattccattggataccgttcctcttactttaagatgttcttgtcagtttttcccttcttgccattttctaaagtattccagaccggttaactattgtgtcgcgttttctgctgcagtacctgactccagtctcctgaaacagaactcctcccatctattttctctgggtgtcatttactcatcaccctgacttcgtattttcagtaacttttggcagtatttggagggcccattatgtctctgacaacacctgtggtcagaataaaatcctgcttttcatcattttgtacgtgcctattaactcagttatcggtagggttttaattactactgtgttactgaggttgccatctttgaagtttagggatggttgttttaggttatatatttaaggtaacagactgtttcatgtgattttttttttttttttttttgagacggagtctcgctcttgtcgcctaggctggagtgtagtggggcgatctcggctcattgcaacctccgcctcccgggttcaagcgattctcctgcctcagcctctcgagtatcgagtagctgggattacagtcgcgcttcaccacgcccggctaatttttgtgtttttagtagagacggggtttcaccatgttggccaggctggtctcaaactcctgacctcaagtgatccacctgccttggcctctcaaagtgctgggatttcagcactgtacaggcgtgagccaccgcgcccggcctcaggtcaactttttagtaaagagcaaactcataaattttggcatcagagtttgagctttatttttcttaaatgagtttgaaatcaatttaatatttctctccaattccctaatgtctcagaagtgaatttacagtatacctttgttttttcgtattcttaagtagtatttggattttatttagtagttgcagtactaaataaggagtggggagttaattacaaaacgaatcaggtgactagttaatttattcatagtttgttttttaaaactacaaaagtgtttttttttcctatacataatacagagaggtatatagtatagagtaacacagtgcttgtttcacggtaccacaaagttccattcctcagtcttaaatctctgtaaccagcctttgtggttgctgtgtatcattccagatatttccatattttggtttagtttttgtttcttaaatgaaggggagaaagtgttgttttaatggggtaccaacacaatattggcaatcagtaaacattttttaactaaattaaatttttatttagtgatatatgcctgtttgtcaagacttacgtatgcatacttacgcagattttttttgtttgtactgatttttttggtagtataatcttgtgaaaatatcacaagtaacttatttttgcagtaaagttgatttattgtgcttggtagctttgcacagaaagaaagtacatgtaaaacaagatttaaataaattaatgttttatcacttgagttttatatttttatctttaatgtgtgttatgtatttaactttatatattatatattctaaactgtaacctaactatataggagtttttcagacgttttaaaagtttatcactgtgattaaaatgatagtttgaccatgcaacttagtgatctcaattggagagtggtagacattagtagttagtacaaacaaaggtatatatacttgaagttgctaagcggctatcattttgtaagtgttgtttttgtaatttccccccgccaaacctaccagtaataatatttatcagaccagtcacataagagaattgtccactctttgggcaatgtggttttttgttgtaacagtgcaagtagaaatgttgaggaatagaagtgagtgttgagaggtatgatgttggaaagaggaaaaggggacattgggagtgtagaggttgatactgaaatggaattggacaagttggggagaaaagaggaatgtagaaggttgacagtgaggcaagagccatggtgcaagaatagtcaggctcataatagttggaggacagcccgagtcggtatttgaggcaactttctcctcctattcttttttagatagttctgggtctattcacagaattgctagatatttcctgtcataaaagtcagcagcttaaggttatacttaattgaaaccttgtgaattctttactttagataaagctattctgttaaataacatttgttaagtacgttttattattatttttagaagtgggaaattgtgaaaatgacaatgagtttgaaggtcacagttctacaatggcctttgcaaaggtatctacataagtttagcttggtaactgggcctttaatagtccacgtgcatctgatctatgaaataatatatgttccttgttcttagaacttttgttttataaacttttcagtattgggtcttgggaaataccagtcttttacagacacgaaattatttgaggtacttggtagaaatatactgagaaaaatccaaggaagaggaaaaatgtatttttacatggtttgtgtttggttgagtaaaatttaaataaccaagaaatttaattttcacttttctcaattattacggtcatataaatgatgagagctaatgaacttcagtgatcagaggaaactattaacagtgataatataataatactgatttattctcacttgagttttttccttaaggtctgacaccatgccaatttccacagacctgtaactttaagttaccttaagctgggcctggtggctcacgcctgtaatacaagcactttgggaggccgaggtgggaggattgcttgagaccagcaacaacatagtcagaccacgtttctaccaaaaaagaaaaaaaattagcctggtagtgcacgcctgtagtaccagctacttgggaggctgagaagggaggattgcttgaacccagaaggttgagactgcagtgagctgtgattgcaccattgcactccagcctgggcaacagagtgagtgagaccctgtgtcaaaaataaaataaaaacacctaaatttcatatgaaaattcagtttggagtcacctacaagaaatagttgctagaagagtttcatttttatagtagtatttactagagatttggtatatactctggtgcaaatttctgtagttaatgctctgataaccactataattgtactctgaaaaccactctcagtaaatatttcccaaagtccaaagtcttgattattttgtttgaccctttcgttctcacctttctgtttttcttttcagctgatttttctcatttatgtaggtaatttttgtcttattagagaggagtgagttgactaacttgccttgaggagaatatcactttgtgattaatcaaactattcagatattattattactgttgttttggaacttcagtatatttgtaagttagaggcagtaattcagctgacatttattgctaatgacctcagccatttgaaacataacagcaatcctggacataaaaaaatctctaagccttcaaaatgactgcaaccaagtataataagccattagcctttattaggaaactactaattggaattagtccacagataaaaatcttcagtgttggccattggagttagggacattggcagctgaaatgtcatctacaggggaaaaggaagaactattaaaaagtaggtggaactatagtagaatagtgttttaaggccattacataaatacatacactcctataatcattaacttctgaaggaatgacagtatcgtagagcagcctagtaagttgatgcatcacaatgataactttaataatgaacttttattctgtgtactatgtttaaggaagtaagaaattggtgtcttttgagattgctataaaagtaaccattttcaaaactctgttaattaaatgttaagtttcaattttctggaaaatttacgtgtagatctctccttatcagatgacaccaaataaaaatggtgctactgtgtatggaacttcctttgttttattattttaacctatttatctttctacttaatatttcaaggaattactcccaaacaaggctctattacatttaatatttgatatcagtaatgaacaaccaattgcctaaagattagcacatttgctaatggagaagatagtaaagcagataattagaattagtaaatgacctatgcatatgattcagttgtatagttttgaatcctggtattgagtctattagcccaagtgtcctaaggtgccaggtttttgtagtgagtttttttcattgcattgctggcctcctctgtctcatttactatgttaatttaaaccttatgcttccattagtggtaaagtagatagtctttgacttgtgtataaggggtgtgtatgtattttaatgattttgaaagctggtttgaggaattagatyttgggaattaatataacaattattagcattttgatatatttcttccattattttaatgtatattttttatgtatttgtgggtraaaacatttaatttcatgtcctgctttttaacctactgttaggtaccactttcccattctcacaatgcatcttaataactatcattataartgattgtaaaatgttctgtgcagtgaacatatgttattcccctatgtgaagaacatatttatacatgtttcttgtatatagtattatctctctcttgtatattgccagaattgattttttaggtacattttgaaggctcttaaaacatactgaacaatattaatcaaaagggataaatttgtattctctttcgagtggttgttaccctatactcatcaacatttaacattttttataaaggtttaatgggggtgtatgacatattgtgctttatttatttaattactgaggtgaagcatgtttatagatgtatttatcttgtgaactttgaagataaatagattttaacattattgcagtcaaacatctttttgtttgtttgttttgagacagaatcttgctctattgcacaggctggagtgcagtggcaccatctcggctcactgcagcctctaccccccgggttcaagcaattctcctgcctcagcctcctgagtagctgggactacagatgcacaccaccacgcccggctaatttttgtatttttgtagagatggggtttcaccatgttagtcaggctggtctggaactcctgacctgaggtgatccacttacctcggcctcccaaagtgctggattacaggggtgagccacggtgcctggcccaaacatcttgatataattttgttctgctgattttatgaaattcctcccttttcagaactgtaataaacaatattggtttaattctgtttgtttagtttttctaagttagatttaaataaatttaagtttttacctcatctggcattggtgtgaaatgagaatctaaatgttttcytccaaattggtaattttctcaactctgttaaataatgctttatttaattttttaatttttctcatttttttgttatgcttcatttttacattttaatcatttttattttaaattgtttatttttaccccaagccttaagaacattcatattgtttttagatgattctgtgatatgtttaatatcttttgccttggctttcttattgtggtgtttgtttccttatttatttttaagattactgtaagttgaggataataaagtttattttttaacaaaacaatgttttataattccttttcttgtcagccagaatttgaaataagatttttccataccacataatttggttgcattaaatgaaaatttcccccttyttgaacagagataaaatgtgaaactacttaaaagtactatgctggccacagtggctcatgcctgtaatcccaacactttgggaagctgaggtggaaggatcgcttcagcccaggatttggacaccagtctgggcaacatagtgtgacctcgtctctacaaaaaatacacaaaattagcctggtgtggtggcgtgcgcctgtactttcagctactgtggaggatgaggtggaaggatcacttgaccccaaaagattgaggctacaatgagcccagattgcgcccctacactccagcctgggtgacacagtgagacccttgtcaaaaaacccccaaccaacaagtacagtactagagactgtaaggagtaaaactactttggcagattttggggaattagagaaattaactcctaagattaacagtttaggatgtatgcttaaagtgttaaacagcagtatacaacttgatatcatatacctctaagatatttagtgaaaaagtttcatttaacagctgtaggactcaggttacagaatcacaataccttcttcaaatgttgagatagcaatatgatacatttactgaaatttaatagcatagacattcaggtaagctttaggaaggtatctatgtcaaagagcatttttaatactgagagtgcttactgtttactatgatgcctttttttctgttatgaaataatttgtgatctcaaaataattgaaaaaaggtatttatgtttgtttacattttgaaattgtgatggctacaaagctgttaattttattaaatggctttaatgttttctgtttacagatttttctggttacaataatgctagtaagaaaagccagatttaagtaactttgagtgtgaaaaaataataaatatttgaaaaaaaaaaaagtgtgtcctgtgcttgaagaacacctacagagaactgaagatgaacaattcgatgtgatgtaatttccttctgtcttgggttatggtgagatttaaagggattggaacataacttaacacctttttttcctactggaattcggctgccacatgagagatgagttgctttttcaaaatgtcactgaaattgtccaggaaatagcgttgctaattatattctggcactatttaccctccttactagtttttaaagttttttttttaattggtcagaagttaaaggaaaatagatcctgccgttgttacacactttcccgttggaaagcagattgatgtgtttcataaataaaatgaaataatgcttttaggtggcttggctgtattatagagggaactaccaagattatttctcctggcaaaggggtgtgtgtgagatttatccactaatagcccttgaagaactttgtaatacttctctctttttttatttacatttttttatttccatagattattggggatgtaatacttctctatattaactctccactctccaccccaaacctatgattcttacctgaactgtcttcactatatgtagatttttatggtgtttttgcagtaatgtttctttttttttttttttttgagaccgagtcttactctgttgcccaggctggagtgcagtggtgtgatctcggctcactgcaacctctgcctcctgggttcaagcaattctcctgacttagcctcctgagtagctgggactacaggcacacgccactatgtrcagctcatttttgtatttttagtagagacggggttttgccatgttggggagactggttttgaactcctgacctcaagtgatctgcccacctcggcctccgaaagcgctgacattacaggtgtgagccactgcacccggccaatgtgtcttttcctaaggagaaatctcctctttttccttctttttaaataaagataaatacaattaaagtataatacacacagaaagttctcataaatgtacacctcagtgaattttcacagtgtgagcacactggtgtaatcgtcactaagaagaacactgtcagaactccagaaacttgtgtgtttattccggtcattaatggtccctaggtgccacccctcaccaagagaaatcactcttttgatgtctagtaccacagaattattttatttgcttttgagcctaggatttatacagtatgtattgtttttgtgtttggccttttttgctcaatgttatgtttgtgagattcagctgttttattgtgtcttcatcctgttctgatacgagtaacctgagaaatcctataactcaacctgatttgtaccttgagatctcaacacttagacrtttttctcatggcattcatggttttcaagaactcctaggaggggacatcaaataaaagccttctttgttttaaactctgtggtagacctttttttgtgttttaatgaccttttttgtgttttattgctatttgggtaaatagtagattttaaaatttatgtcactgatggcttatgcagtacctcagctgctttttttttttttcctacttaaaaattttgttttaaaaactatggtacaggattcctggccagctaatggctttttggacttttatgacttggtagcttgcttttcattctttgaattcctcaagcagtgattcccattctaatttttatgataccatgtagtatcttcagttatttcaaagcatgttgtgagcctccccaccaagaaaaagattccartttaagtttaagccactttactttcaaaatacttaacatttatgaacagtacaacttttatatttatgaacagtacaacattgtggtgtgtagattataaaatcaaataggctggtaaaaaattgggaatcagctaagagacttacctgcttattaacccctttcaagctagcttcaagtgtaaagtgcaacttttatttgtgtgtgtgtgacacagtctcactctgtcacccaggatggagtgcagtggcgcgatctcagctcactgcgacctccagctcctgagttcaagcaattttcgtgcctcagactcccgagtagctggaattacagccgcctgccaccatgcctggctaatttttgtatttttagtagaggcggggtttctccacgttgtccaggctggtttcgaacccctgacctcaggtgatctgccctcctcagcctcccaaagtgcagggatcacaggcgtgagccaccctgcctggccgtaaagtgcaactttcttctcaggagttctccttttgtattttcytctcatttcactttcttaattttaaggaaagtcatagtgaaagatttatgactgtattcctgcacataatttttctttcatataagtcctatggttatgatatgcctggatgatatgcttaatttcctttttaagtgaattttagttatttcagtcagtaagtgttagggccagaatattataaatggccaatagttgttgaaattaggtattttggtcatgattaagagtgacgtgtatacttagcagtcctgtacttcagtcatcttttatttgctgagcttttgtggaaattaaatgattgtaaagttttagcctactttctaaaaaaaaatcacttgttttttaatctggagagtttaaatgtctgactttggggaaacatcatgcaataggggaacattatctcctgaagaatgggggagagatgaactaacttttgtaatggttatagagttacttctaaatttgaataaatgctgttctacctagtgaactagtcagagcattttccactttgacctaagccaagcacatgggtagctacttctctttctgtagttaagagaatttcaccaaggatattttgatttatttgtagctatatggcagtggttctcagtatttatcattcatcataatcgcctgaaagttgtttgttttaaataatagatttctgggctctgcccttagagtttcagatttagtacgtcaggagaccacactttgagtagcactacttgggtatagtcaggacttctgcattaaaaaacaaaatgaacagacaaaaaccctrcaagtgattctgttacatatcctagatgagagaacctttgatcaatagttctcaatacagtatatggttctgggcatagcagcagagcatcacttgggaattttacaaatgcagattttctccaactctggagatggaacccagaaatatgtgttttaaactaaaccactagaggattctggtgtgtgctaaagtttgacaaccatccttgtaactttatagttccctggcacctatcagggaatttactagaaattcaaatttcacactgcactcggagctctcatataacagattctgaatatcagaatctcattttacagtagtctctactgcactcttcagtttcgctttccttcggctgaacatactaaatgggaaattcaagaaataaacaattcatgttttaaattgtgtgcccttttgagtatcctgatgaaatctcttattgtccctctggtcgtgcctgttatgtgaatcatccctttgtccagtgtgtccatactttgtatgcttcccactggttaatcacttaatagccatctcagttatcagattgaaaaaacatagtatatatctggtttggtactatcctcatattcaggtatctactggggatcttggaatgtatcgcttgtggatgtggggagggaactactgtaactagattcataggtggtttgtatgtatattgaagattgaaaagagctgctttaggtgattttaaaaactcttatagaagtaatactaataactaaaatttattggatatttgctgtgggccagatacatgctagatactctattcattatcattagtactccctacaaccttatacagagggttactgtaaccctcattctataaataagcaaatcaaagcagaggggtttcatatcttgctcggtgtcacacaggtgctaaatggagggtttgggatttgaacctaagcactcaaactgtggagttttggagtttgaggtgctatcttcatatgtatcttcagtactgtttgtgtgcatgtatgtccttccttgtttcagtgccatagattatattctaatgaatttttttggtatcacattttacagtgacatttgaattttctttcaagtctcatattcatcagaacaatcagaagtggaaatagctgtggtttgaatactttgatcttgtctacctaaataacaggctttctaaaagaaaataatgtttatttgggaatagggctttgcagtgggaattctgttgttacagtaaaccatgtgcatatacagrgaggtaaaagaagaccaaagtttttaaaggaaaaatgaggaggatttcataattattttgagataattattcttggctacaagggtcaataaagtgcctccattctgaggttggaccggcagttgctggcagatgtcctcacagaagtttttttttttttaaaaaaaacaacccccaccacccccccaaaaaaacagtgttactgtgttgcccaggctagatgtaaactcctgggttcaagcaatcttcctgcttcttgggtagctgggattataggtgtgtatgtaycatgcacctggcttgtttttgtttcacgttttgtataaggttgtagtttttgcagagtcttttgtgatagtttttatcatgcatacccgcatgacagcccttccttcatagccttccctggctgtttgtcagggtgttttttttttgttttgttttktttaaaaaaaaacagaacaaacactactactactccagtttgattctgataactttcatataagtctgttcatcaaggtgttgttatccatccaaactctttgttgccttaatagattttgtttttgtgtgtaatttcagtaaggcagctcttactggttaatgtttctggtaaaaatttgcatgctaggccaggtgcagtggctcatcatgcctgtaaacccagcactttgagaggccgaggtgggcggatcatctgaggtcaggagttcgagaccagcccagtcaacatggcgaaaccccatctctactaaaacaaaaaattagccaggcatgctggagtgtgcctgtagtcccagctactcggtgaggctgaggcaggagaatcgcttgaacccaggaggcggaagttgcagtgaaccgagatcatgccattgcactccagcctgggtgacagagcgagactctgcccccccccaaaaaaaaaaaaattgcatgttgtatgttcaaggacagtactggtttattaaagaggacaacaatgcaattcagtatctggaggctcccatgtactaaaattatgctttggagtttaattcaagtaaaacatggagatttgcttgataatagacctaaatgctggtgttaatttcaagggagtaatatggggggggggggtcacaatatttattatattaatargttttttgggggaatttgttagtcatattaattctttttaagtgcacaattcagtgctttttagtaaaattacagtgccatgcaactattacctcaatcccgttttagaacatttctgtcacaccaaaatgatctcttttacctgttttaagtcattcccaccttcagcctattacagttttcttttcttttttttttaaatcagctggtgcattttagaagttcttagtaataaaaccaacctatagactttaatctataaacctttttaaacttttaagaaacggagaggccggggcgcagtggctcacgcctgtaatagtagctctttgggaggctgaagtgggtgcatcgcctgaggttgggagttcaagaccagcctggccaacatggacaaaccccctctctactaaaaatacaaacattagccaggtatggtggtgggtgcctgtaattccagctactctggaggctgtggcaggagaatcgcttgaacccagaggggcggaggttgcagtgagctgagattgcgcctgttcactccagcctgggcaactgagcgagacgccatctcaaaaaaaaaaaaaaaaaaaactgagaaagaaagtttaatggtattctagctcttaatttctgttcatttaacatcagtttaatttgttgataggattaaagtgatgtgaacagtagtgtttagggctaggaaatgttctttcattcacttaatggaccattcacaatctatgtaatgtatgaagaggaaatggggagaagagaaagagaagataagagaaacttratatctatagttccatgatgatactgacaacctcagagttcttgtctgtggtggttatttggattctggaaaactactgtgtgtttctgttgtcttgatctgaatgcctctcaagaatgacactttcttttaagagctttatctctacaagctatgtgttttaagaactctggggatgaataatcacacagtgtgctgacttaggatatcgttgtgcataaggctgtttttttttttttgtaacacaaaaatatctgaagaatatgtttggcatagtttgatacagtttttggttttgattaattaaataattcactaataataaagatcagagcttctgataaattcttgtttttgctggtagtttaatctcctaaaagttgaagagaattgctgatatgaaattgattcttaccaacaaggaagaacacttagatatagaattaaccattatcgaacatctgttttgggcaaatggactgtgtttatagtcacttttttgtggtgtggtaaaaagaacatggacttggaatcagatagactttgatttaaatcctggctctagcactgagagcactgtaactttttttttttttttttttgagacagggtcttgctctgtcacgcaggctggaatgcagtggtgcgatcatatgagctctataattttaagcaagttacttatttctaagctttgttttccttattataaatagatatggtactttctacttatatagagagtatataatgtacttgatataaaatagatgctcagtaagtgctctttgttattgatgtggaaacagaggctcagagaagtttgtcacacagctagtaactgacaaatatctgactccaaagcccatgcttttccatgcctcccagctagaaattgaaatgatgggaatcaaaagacagtgatcattctatgctgtcttggagtttaccttaggtagcaattcccagaaaagcaggtttcagaaagttcagaaaagaaactggtaatgaccacagatagtttaagcaatcaatactgataggctcttaaaaatgaaacctgttatttaaattacaaaaaaaattccattggggaagaaaaacgtgagtaatctaaagaaattaatatgacttcctcataagtaaattttttcaaaagaaaaacatatcaaggatacccattagccaggtgtagcggctcacacctgtaatcccagcactttgggaggctgaggtgggcagatcccctgaggtcaggagttcaagaccagcctgaccaacatggcgaaaccctgtgtctctactaaaaatacaaaaattagccgggcgtggtggcaggtgcatgtaatcccagctacttggaggctgaggcaggagaatcacttgaacccagtaggtggaggttgcagtgaaccaatgtcatgccactgcactccagtctgggcaacagagcgagactctctctcaaaaaaaaaaaaaaaaaaaagaatacccatttaactaatggtatataagattaatttaaaaaatcatttgacttattgataggatttaaagtgatgtgaacagtagtgtttagggctaggaaacattctttcattcacttaatagagcattcacaatctatgtaatgtatgaagaggaaatggggaggaaaaaaagaagataattaggaatgtaggtaggctagatagagctggaatgaggtaaggcttgtaaaaatgcttaaggacaataaaaaggactagtcaataaagaagaaagaaggcttttgattagggagataacattaaataatgagaaatacccaaattctgttttacttttaagtgtaggagaagggttttcatactgsaagggagacggttaaaaaaaagctgtctaaagacaaagttttattccttggtatgttacatgataaaaagcatctactttcattaaagaaatttagagctccaattccagtaaaatacttagagcaatgaagtgtcagtttgagtttattgatgtcagtggctgcttttggttgtagagctgttcacagtgtttgcttttctaaaataatattgagtaattaaaatcatcaatgtaaaaacttgtcttcaggttcaacttatatattttcttattctattaactagcacattgtaaactaagaatgctttttctgagtgagagaagactttgattaatagcctagtaattataattgaacagtaagtctcccttaaaatatccttgagtaaaatggcatttatacttgttttattttcctggaatactcttctcaaatattttcatggcctgttccctcacttctgtggttcaaatgttacctcagctagaaaggttttccctgagggagtttttaagggacatcatttacatagacttcaatgtkaatggtgctctttggtgtgaacctcattttactacctaaaatagtatcttcttccttcactttccctggtttttcttaatagtaatgatcatacctgatgtttattgtctcttctaagaatataatatccatgaaggatgggattatgttttttctgctgcagttcttagagcctggaatgatgcctagttcatgggagatggtcagtgaatacttgctgaatttatttatttatttattgagcgagatttcaacacatgaatggggacacacacgtttagtccatataagtatttatattattattattctttgagatggagtctggctctgtgtcgcccaggctggagtgcagtggcacgatcttggctcactgcaacctctacctcctgggtttaagcgatcttcccacctctgcttcccaagtagctggaattacaagcgtgcaccaccacacctggctaatttttgtattattagtagaggcagggtttcactgtgttggtgaacaggctagtcttaaaactcctgacctcaagtgatctgtctgccttggcctcccaaagtgctgggattacaggcataagccaacgtgccagaatgcatgaatttatactgtaaagtgttggaacaaggttgtgagccctaggaacattgcagtgtgaatattagctattaccactgctactgctgcttaacttaattacattccgtatatacgtttgatatactgttttagttttaagcactattccttgtggagtaaatttcaacaagtaggattttcccaaatactttatttatttttgagatggagtctcgctgtctctcccaggctggagtgtactggcgcaatctcggctcacggcaccctccgccttctgggttcaagcgattctcctgcctcagcctcttgagtagcggagattacaggcgtgtgccaccacgcctggctgatttttttatcttagtggagactgggttttgccatgttggccaggctggtcttgaactctgacgtcaggtgatccgcccgcctcggcctcccaaagtgctgggattacaggtatgagccaccacacctggcttcccaaatactttaaaactttaaaattttatattttctctagctttattgagttataattggtaaatataaaaattttaaatttaatgaatgagacagtgaatcacaaattttcttaaacattccagtattcttattaaccaagctaaatattcatacacttttaaacttaaaatcataagcgtgaagtcagttactattttaaatttagaaactatcattgtctataggaacttaaaaatatttaggatagttttaaaccacacagtattagtatcatgagtttgatatacgtaatttcaatattctaattaatcatggacgttgggcagtcacttaccttcgggaacagttttgctgtcttcagcaagttgagattcctgtgacatactttatgtccacagttcagttaccatctcttgacaggctgtttatcagcttgacattggccttggaagctgtctttgtctaggtggtttttctcatgtcacagatggacataatgaactgtcagtaaaaattgtctgtatggtaacagtggaactctaagttgatgttggtttcttctgaattgaagtttaagaccttttgtaattgttttgtaattgctttttaactctattgccagatcaagttttgtaaacctcacccagattatttcaccacttgattggattccaggaatccattttctgtctggctgatagcacaggttttagatcatttaaagacattaaggaactgagaggtattgatagcttttgttaatttgttgtaacaaaaagtatgccagaagactagaaacagcataaggtcttatttttaaaaaggaaaccagtagttttggagattgttttcctaggtatgccttggagaagaggcagagaagtacaggcttagctcatcagcattaagaacatttcattaatagtgtaaaataaactttcttaaatactgttagaaggaattaatgtcagactttgagagaagtatctaaaaaggtactttttgttgtccatttttaatattttcattaatgttttgaataaatgtacagttgtgcttataaaatgtcagaacaatttagctggcaaggataactaaaacaacttgtaagttctgtctgaaactacaggcagaaacctatagtgtgagctgcttaaaagtgtggaattaaaaaaatatggaattcagatagaaaaarttacatgagtaaaattttgttcaattaatgttaaggcactgtatgtactaagagaataaaaaatgtattgctctattccttcgaggagcctataattgaatggggaatatagatatatcaaactatacattgtaattttatgataggattattaagcattatgggagcaaaggagagagtagttaattctgatggatcattgaattggcctttgaggaataagagttttctaggaattgaagaggggagaaagtcatctcctttctttccctccccattcttctttaaggtactgaaaaatcagattcaggacagtgtttattaagacagatatatttgtgggcaaataaagagtaaattggaatgagagattaattaggctactacagttgtttaaatagaatgatgatggcctgagctggagcaataacaatagaacagaaagagtagatagtttgtttttttttttttccaagacattttggtgatagaataagtagggtttattagccgggtgccatggctcacacctgtaatcccaacattttgggaggctgaggcgggcggatcacctgaggtcaggaattcgagaccagcctgaccaatatgatgaaaccccgtctctactaaaaatgcaaaaattagccaggcgtggtggcacgcacctgtaatcccagctactcaggaggctaaggcaggagaatcgcttgaacccgggaggtggagggttgcggtgagccaagatcgcgccattgcactccagcctgggcaacaaaagcgaaactccgtctcaaaaaaaaaaaaatagggtttactgattgtatattattaggagtttagttttatatagtctcagacatccaactggtgagttgcttaaaaaagaaaaaacaaatgaagtaccaggctgcagtaataggattttgtccataataagggatatgatattcattccatgttggttaggacacatttacaatgttggccttatttctgaaagctacactttaagaaaagtaaatgaaaagatagatatgtcaagaggagggtaacccatgagaacctttgaaggaattgagagtgcttattgtggagaaggaagacttgacaggaatgagtgaaggagggaaggggacagttgttttcaggtaatgcagggctgtaatgagttgttctacagggtagaattagatccaggataccaccagactttttttttctgagaactaagatattctcttaactgcagttacagtgatcaaaattaggaaacttaacattaataccattatctaatttacagtccacaatcaaattttttcaattatcctaataattatttttatagctttttaaaatcgaagatcatacattgcatttgatttcatgtctctccagtctcctttaatctggaacagttagtcaaatttttttttttattaattttttttttgagaccgggtctcactgtgttacccagcctggagtgcagtagcgtgatcatggttcactgcaacttccacctgccagccccaggcaatcttttcacgtcagcctcccgaataggtgggactacaggtgcgtgctaccatgcctggctaatgttttgtttttttgtagagacggagcgtcactatattatccaggctggtctccaactcctgagatcgagggatcctcctgccttggcctcccaaagtgttgagattacaggcgtgagccacagcacctggcctcacatttctttattttatgtatttgttttttgagacagggtctcactttgtcatccaggctggagtgtagtggcatgaattcggctcactgtagctttgacctcctggactcaagtgatcctcctgctttagcctcccaagtagctgggattacaggcctgagccaccatgtccggcctggcctcaaatttcttgacattttttaagagattaggccaggtatttagtgtccctcagtttgaatttcttgtggttagattcagggtgagtacactgatacttccaattctagtcactacagggtatgttcaaatttcccacccttccatatttgtgatatcttaagtttttttgcttcatgtttaaaaatacctgttgggtgaggtgcattggtttatgcctgtaatcccagcactttgggaggccaggggaggaggatcccttgagcccaggagtttgagaccagtctgggcaacatagcgagaacttgtctctacaaaaaaaaagccaggctgggtacggtggctcatgcctgtagtcccagcactttgagaggctgaggtgggcagatcatgaggtcaggagtttgagaccagcttggccaatatggtgagaccccgtctctactaacagtacaaaaattagccgggtgtggtggtgtgtgcctgtagtcgcagctacttgggaggctgaggcataagaatcgcttgaacctgggaggcagaggttgcagtgagcctagatcacgccactgtaccagcctgggcgacagagcaaaactccatccaaaacagaaacaaaaacaatggtacagaaaaaccaagtaaaaaaaaaaaaaaaaagccaggcatcatggcttgtgcctgtagtcctagctactcaggagatttaggtgggaggattgcttgagcccaagagttcaaggttgcagtgagctatgatcgtgtcactgcrctctagcctgggcaacagagcaagacctcgtctggaaaacaaaaaaaattccttgttagcaatttgaaactataatcaagagatgaaaagggggtgtcttgtgatttaagagactcctctaacttggaaaaagaaagcaattttgagtgcccactttatgccagacattccataatctgatatggaatgataattattcaagattggtgtgcctttttctttcatggaagagaaaagtagttaatctctcctcagagaggttgtaattttttaccaggtatctaactgcaatgcccttaatcattcctctgtgattagggcagctaagtgtcagaaaagccagtatggtatgttttctaggctaaataacttctgagggcccttttagtcattgcattggaaatttacttggtttttctgtaccattgtttttgtttttgtttttgttttggttttggttggagttttgctcttgttgcccaggctggagtgtaatggcgtgatcttggctcactgcagcctcggactcctgggctcaagcgattctcctgcctcagccttccaagtagcaggtattacagttacccgacactctgcctggctaatttttgtttttttagtagagacggggtttcactatgttggctagactggtctcgaggtctgacctcrtgatctgcccacctcagcctcccatagtgctgggattacaggcatgagccactgcgcctggcctctgtaccattgttaactgtatggtgttctgagtgattttcctaaagggcattcaatgatttttttttttttttttttgcgttaaagcaattaaagctcaatttaatgatggcaaattagggtaacaaatgcacttagagtaaattaggaatttgggtttgaagtttcctagaaaaatatttataaatgaaaaatacgtgtttgtgtttattgtgtgttcataaatgtgtgattctttttagatcaactatttctgtatataattggaagaaatagaaattagtccagaatggtagaaagcttgaatttggtcatgatggtagtatgaagtgtagagagaagcagtctgagagttggggcctaaaataataggatagaagtaatgtggccttctgcaattccatatctgggttattcctgaaaggattgaaggccgggtcttgaagagagatttgtacacctgtgttcatagccacactgttcacaatagttaaaatgtgaaagcaacccaagtgtccattaatggatgagcaaaatgtggtatatgcatagggaatattatttacctctaaaaaggaaggagattctgacatgttgccacatggatgaaccttgaggacattatgttaagtgacatgagccagtcacaaaaagatactgtatgtttccacatatatgaggtatttagagtagttaaaatcatagaaacagaaagtagaaaggtagttgccagaggctagaggtgggggatatgcggagttaatgtttaaggagygtagagtttcagttttacaaaatggagttttggagatggatggtagtgatgattgcattatgaatgtattggattacactgaaccatacacttaaaaatgattaagatgacaaattttatgttatgtgtattttaccacaataaaaaaaaatattggggaggggagaagtaacttacctctcactaacgaggcatactcttctttacctgctagaaaatgaaatgtcagccaggcacagtggctcatgcctgtaatcccagctctttgggaggttgagattggaggatcacttgaggccaggagtaccactccagcctgggcaacatagtgagaccctgtttctataaaaatttaaaaaatagctgggtgtggtggcaagcccctgtagtcctagctacttgggaggctaaagcaggagtatcgcttgagcccaggaatttgaggtggcagtgagctattgtcctgccactgccctctagcctgggtgacaagagtgagatcctgactcaaaaacaaacaaacaaacaaacaaaaccacaacaactgagctctgccttcccccaatcctcactcctctagtaatactttaaaaggaacttttttttttttttgggtaatcaaaacataggattcaactggtttctttctttctttttctttttttttttttttgagatggagtctctctttgtcacccaggctgctggagtgccgtggcgtgatctcggctcactgcaacctccacctcccggattcaagtgattctcctgcttcagcctcctgagtaggattacaggcacgtgcccccacgcctggctaatttttgtatttttaatagagatggggttttaccatgttggccaggtgggtttcaccatgttggccaggctggtctcgagctcctgacctcaggtgattcacccatcttggcctcccaaagtgctgagattacaggagtgagctaccacacctggatcaactggttttttaaatttaaaaattgattaagtatattagaaaaattcaatgagataataaatcgaattaaactaaattaaacatttttctttcattagtaatattaaaacacttaaagctacattgagtgatagcaaattagtaaagcctattaagtcttctatgtaaagtatgattcagaaatatatattttatatatatatgcatgatctcggctcaccgcaacctccgcctcccaggttcaagcagttctcctgactcagcctccctagtagctgggattacaggcatgtgccactacgcccggctaattttgtatttttagtagagacggggtttctccatgttgttcaggctggtctcgaactcctgacctcaggtgatccgcctgcctcggcctcccaaagaagtatattttaatgaactttcttgcatagtcatttaaaaatgcatttagaatttttaacaaatgaagctttatcttaaaagccacctgacagtgtccttcaaggatggaaacatttatatgctgtgacccaataagtctgttttaaggtaataatcaaatgcagacatagagtgtacaagaatgttaatcacagcattttaaataataaatagtataatatcagaagcagcttaaatgtcctaacagaatggaaatggtcaaattataaactatttatacagtttttatatggccattaacaattttaggctgggcggtgtggctcacgcctgtaatcccaacattttaggaagccaaggcgggaggatcgcttgagcccaggagttggagatcagcctgggcaacatagggagaccttgtctctactaaaaagaagaagaagaaaaaaaaaaaaagccaggatgtggtagtgtacacacctatgactataggtcccagctacttgggaggctaagctgggaggttcgtttgagcccgggagatcaaggctgcagtgaacagtgatctccccattgcattccagcctgggtgacagagtgagaccctgtctctaaaaaataaaaaaatcccagacaatttagcccttaattatgtggcttaagtggggaataaatgccaggatgccaaattaagtgtgtgttgtgtgaattctgatttttaaaattcacattgaaataagaatggaagagaatacactagtatgttgtgttttttttttttttttttttttttgagacaaagtctcgctctgtcgcccaggctggaatgcagtggcgtaatctcagctcgccgcaacctctgcctcctgcattcaagcgattctcctgcctcagcctccctagtagctgggattacaggtgtgtgccactgagcctggctaatttttgtatttttagtagagacagagttttgccatgttggccagactggtctcaaactcctgacctcaggtgatccactcaccttggcctcctaaagtgctgggattacaggcatgagccaccgcacccagacctacactagtatgttaagtggttgttgaaatggggtaagctatatttgtactttatattgtggatgtgtctaaattattgtattttgtataattgtccattcatttaacatttattggatactatatgcttgttaaataatttaacaattatttattggatacctatacttggggtcctagaaccaatcccccccacgtatactgagggatgactatagtctgttctcattattcttggattccacgtttgtgaactcatttactggctaaaatttatttgtaacccccaaatcaatatgtctggcactttcgcagtcatttgcggacatgttcagagtggtgaaatttgagttgcttgatgtacacatttccaaatgaggttaaacaaaatgactctctgctgccttgttctagctctcttgtctatttacttagtgctacatctttcccacttttttttttagaggtggtttcactgtttaaaattgcccctaagtgtagtgctaaagtgctgtctatagtgttcctaagtgcaagaaggctgtgatgaaaagttatagtgctgttgactgtgagttccgtgtttatgaatcagcaatataaaagtgtttttaggctgggtgcggtggctcacgcctgtaatcctagcactttgggaggccgaggtgggtggatcacttgatgccaggagttagaaaccagtctggccaacacagtgaaaccccatctctactaaaaatagaaaaaattagctgggcgtggtggtgcacacctgtaatcccagctactcaggagsctgaggcatgagaatcacttgaacccgggaggcggaggtttcagtgagccgagatcataccgctgcactccagcctggacgacaaagtgagactgtctggaaaagtaagtaaataaataaagaaataaaagtgtttttaaataaaagtacagataaaacaaggatatgtgttgttaggctgttgaaaatgttttagtcagaggctagcaggaacttcactctgaatttctcttgtattgagtatttgataattcagtgctcatggcaactttatgagaatcaaytatatatgatctgttatggcacttagggattttgaaatactgaaactagcttgggaactgctttacctgtcctgtagattcttagaggtgacggagagtccagcttagaggttggttaatatgctggtaaaaatttttgtgccctctgaagacagtacaaattcaagaatttagagcaatggtgcatatctgataagattcaaggtctcaatattttgatattcagaccttgactttgatatcaaaagatatttcagggaggactctgtcccatgagaaatggtaaaatatcctaactcattgtgaatctttaccttgatccgtctcctttagattattttatttgcttttaagacttttcctagtctttttgattgttgtgttgacagaaaccattgagaattcttaagacagatggagcatggcttttagagaggattaagtagtcatttatttattacctgtcactggccttaaaaaaaattgacattaaataacatccttaaggataagtatcactaaataaaattaatggaaattttgacttttttcctaaatttaactgacaaatttaaaaaatatttaaagcaagccaagaattaaaattttttgtaagcattttcaaaatgcagtatacagttaggcagctataaaatatattgttgtgaggaaaactgtaagttgatgaaagggaaacatttgtaaaaattaaatatatagatggatctttacatcaggcatttcacctaggccttgctgaattatttatgcttcatttatgaatgtccattgaagatgaatggctgtccagagctgagattatgtcttaatgataagtacatagtacactgtgtgtgctaaactaatgtatcttgaaatgaatcagtcttgctagtccaataatcattttcaagttagtctgttccaggatttaacaagctggtttggacctaagaatgatatatggtgccttctcatctcatttcttcttctaagtcatagatcaacaaagggattttttggaactgaaaagtccagggtgtttgtctggttcaggctgagctaagtcagtacgtttaaatgatgtcatattagtgctctgcttctgttgctctactgctgacaaattcagctttatttgttgctacctgaaggagagttttatctatctgccttgtctgtttgtctgtctcattagctattgtcttagtctgtttgggcagctgtaacagaaaaccatagactgggtagcaaataaacaacagccatttatttctcatggttctgaaggttgaaaagtccaagggcagattaagtgttggcaacggcccagttcctggtttataagtggccatcttctcactgtgtcttcacatggctgaaggggcttaaacttgactaaacccaatcaaagtaaaggtaattctagaagaaaattaattttgatcttaaaaaccctttacttgatcacattatataaatattaactcttttattggcttatcatatgctatggtttgaatgtcccatccaaaactcatgttgaaacttaatccccagtgtggcactattgagaggtgggacctttaagacgtgattggatcatgaagtctctgccctcatgaatggattaatgggttaattggttaatggattaatgggttatcatgggaggggaactggtggctttataagaagaagagagacctgagctagcacattagcacgctcagccttctcaccttgtgatgctctgtgctacctcaaatctcttcagagaatcctcatgagcaagaaggctctcaccagagacaattccttgactttggacttctcagcccctgtaacagtaagaaataaatttcttggctcggtgtggtggcttatacctgtaatcccagcactttgggaggcaaaggtgggaggattgcttgagtacaggagttcgagaccagcttgggcaacatagaacttgtctctatttaaaaagaaagaaaggaagaaatttattttccacaaattacccaatttctggtattctgttataagcatagaaaaaggagtaagcttcatagagatggaaaagatatccatctatctatggagaggcgtgggtaccaaacataaggcaatatgtaaggcctgatgtcaaaagggccagttatgtttatttcctattttttcttttcggttttgttttttcagtctgttaatatagagtgaattgcattgaaccaaccttatgtacatgtaagccagtcttacattttggggataaacatcatttggtcatggtgtattattttaaaaatattattakatttggtttgttaaaaagttgtttggagttttacatctatgtttatgaggaatataggtttgtagttcaaatttcttgtaatttttttgtctggttttgaaatcagactaatcctggcctcatggaatgagttgggaaatgttcctcttcagttttctagaagagtttgggtagaattaggattatttttttccttaaatgtatatcaagtggcatagttaaaatttaccagtgaactcaccttggcctggaatttatttttgccaagtttttaactataacttcactttttttttttttttttttttgagatggagtctcgctgttgcccaggctggagtgcagtggcgccatctcagctcactgcaatctccgcctcctgggttcacgccattcccctgcctcagcctcccaagtagctgggactacaggcgcctgctaccacacctggctaattttttgtatttttagtagagacggggtttcaccgtgttagccaggatggtcttgacctcctgacctcttgatccacccgccttggcctcccaaagtgctgggattacaggcgtgagccaccgtgcctggcctagcttcactttctttaaggatatttaagaaataatttcttgagtgagttttggggaatttgcagtttttcatggaatgtgtccatttcatctaaatagttgggtttattgacatgaagttatttgtaatattatcttttttaatttttttttgagacagagtttcaatcttgttccccaggctggagtgcaatggcacgatctaggctcaccgcaacctccgcctcccaggttcaagtgattctcctgcctcagcctcccgagtagctgggattacaggcatgygccactgcgcctggctaattttgtatttttagtagatacaggatttctccatgtcggtcaggctggtcttgaactcccgacctcaggtgatccacccacctcagcctcacaaagtgttgggattacaggcgtgagccatcgcgcctggccgattctcttatcttttaaaaacattgagatatacacttaaccataaaaatcacccttttaaattatacaatttggtgatttttagtatatttacaaagtaggacaaccatcagtagtacctaattgcagaatacttgcatcacyctaaaaagaaaccccatacctatagcactcactttctaccatttcctccctcccacagtctctgcaatcacttatctcctttttgtctctatggatttgcctattctggattcttcctgcctgcctgcctgccttttttttctttcagaatcttgcccttttgcccaggctggagtgcagtggcacaatcgtggctcactgcagcctcaaactcccaggctcaagcagtcctcttgcctcaatcttctgagtagctggaactacaggcatgtgcaactatacctggctaattttttaattttttgtagaaacaaggtcttaccatgttgcccaagatggtctcgaactcctgcagttcaagtgatcctcctgtctgtctaggcccctcaaagtgctgggattacaggtgtgaaccactgcacctggcctattcagggtattttatataaatgggaattttacaatatgtaaccatttgtgactgacctctttcagttagcataatgtttttaaggttcatccatgttacagcatttgtcaatacctcactgttttttatggcttaagtgtatttcattgtgttgatatgatattccttgttttgtttattcactcagcagttgatggacctttaagttgcttccactttataactattatgaataatgctgctatgaacatttttgtacatgtttttgtgtggacatatgttttcctttatttttgggtgtatacctaagaatggaatttctgggtcatatggtaattgtatgtctaacttgttgaggaactgccaaactattttccaaagcagctgcaccattttgcattcctaccagcaatgtatgagggtgcaaataactctacatctttgccaacacatgtttttgttgtcttttttattatagcaatactagtgggtgtgaagtatctcactgtggttttgatttgcatatccctgagggctaatgatattgagcattttttcatgtgcttattggctatttgtatattttatttgcagaaatatctgtttaagtcttttacccatttttagattaggtttatctttttattaagttgtaagggtttttatagatagagagataattacaaatattttctcccattctatgggttatctttttattctcttgagttcttggaagcacaaaaggttttaattttgatgatccccatttatctgtatttttctttggttgcttgtgctttttgaatttttatgttttaattgtggcagaatatatgtaacgtaaaagttaccattttaaccttttttttttttttttggagatggagttttgctcttgtcgcccagactggagtgcagtggtgtaatcttggctcactgcagtctctgcctcccaggttcaagtgattctcctgcctcagccccagagtagctgggactacagatgcacgccaccacgcccagctaattttttctatttttagtagagacggggtttcaccatgttggccaagatgttctctgtctcctgaccttgtgatctgcctgccttggcctcccaaagtgctggaattataggcctgagccaccgtgcccagccccattttaaccatttttaaaggttacagtttagtggcattaaatatagtctcacattgtgtgtaaccatcactgtggtccatctccagaatgtttttcattttgcataactgtaactctgtactcattaagcaatgacgtgacatttccccctcccttagtccctggcaaccaccattctgttttttgtttttattaatttgacaattttagataaactcacgtagtaattggaatcacacatttgtccttgttggttatgcttttagcatcatatgtaataaacttgtttaatccaaggtcacaaagatttgcacctatttgcacaaagatttgttagtgtttttttatttttaaagacagattctctctctctgtcgcccacgctggggtgcagtggcgtgatcttggttcagtgcaacctcctgggctcaagtgatcctcccacctcagcctcccaagtagctgggatcacaggcacacaccactacgcccaactaatgttgtttattttttgtagagatggggtctctctttgttgcccaggctggtcgtgaactcctgggcccaagctattctcctccctcagcctcctaaagtgctgggtttayagggatgagccaccatgctcagcaagaacattatcattttagtgcttacatttaggtctttggttcatcctaagttaatttttgtatatggtgtgaggtaggggttcaatgtcattcttttgtaggtggatatccagttgtcctagcagcatttgttggaaagattattatgtcctcaatgaattgttttggtacccttgttgtgaaaatatctatagaaccatctttttaaaacatctatagaatctatagcaacatctcttttttctttaatattgataattttgttcctgatgagtctgtctaaagatttgtcaattttattgatttttcttaaggaatcagcttttggttcattgatttttctctattgcttttttgttttctatttcattgatttctgctcaytgttattttttcttctttttctgtggattatagtatcctttttttttttttctagtttcttaaggtagaagctgacatcattgagaccttcctttttttctaacacatgtttactgctttggatttctctgtaaatactgcttttgctgttccccagagattttgatatgctgcattaattccctttgatttcttctttgacttatgggtcatttagaagcatgttatttatttccaggtatttgaggattttcgagttgtattttttatcactgatttctgatttaatttcatcgtggtcacagtttaaatgacttgaatcttttaatgttcatttgttgttattccttccaagtaactgcttccaaataactaaactgcttgaaactatttttagactatttataattgaaatggctgtatgaaagtgatttttgataaagtttaaatctgtcaccttgctattggctttttattttttctatatgctttttgttccctttcttctcttatgttgctgtcctttggattgagtgttttaaacatgttctcattttgtttcttttgttagcttttttactattactttttctctgttcatctgctttttagtggtggttttaagatttatactatacatcttaatttatcttagcatactttgaagtgctgttataccactttacatgtagtataagaatcttacattgtatgtcccctttcccacatttgtgctattacatttactcccatttatgttataaactgtacagtatattggtatattttttgctcgtcagttatttatgtttaaaaactaaggggaaaagctttttttttttttgagatggagttttgttctcgttgcccaggctggagtgccatggcgcaatctcggctcactgcctcctgggttcaagcgattctcctgcctcagcctcccgagtagctggtattacagacatgcgccaccatacccggctaattttgtatttttagtagagatggggtttctccatgttggtcaggctggtctcaagctcccgacctcaggtgatcygcccaccttggcctcccaaagtgttgggattacaggcatgagccaccatgcccggccaggaaaagttttttatagttatcttcatatttaccatttctggtgctctatattcctttggatatatctagacttccatctagtgtcttttccttctgcctaaagaacttcttttaacatttcctataatgcatgtctgtctatgataggttttttactattttaagtttgaaataatttttatgtcaccttactttttgaaacacattttattgagtatagaatttttggttgacaacttttttcagtacgtcaaagatatacctcactgttttctggcatgtgcttccaccgagaagtcrgctgtcattcttatttttctctctgtgcctgtaatgtgttgtttttctctgcttttaagatattctttatattattgatttttaagcagtttggttatgagctggcttactgtagttttattcatgtttcttgtgcttgggtttattgagcttctttgtattttgtttttttgagatggagtctcgctctgtcacccaggctggagtgaagtggtgcaatctcggctcattacagcctctgcctcccatcttcaagtgattcttgtgcctcagcctcccaagtagctgggaccacaggcacacaccaccactcttggctaatttttgtatttttagtagatatgggatttcactatgttgaaccccacccaatctcctgacctcaagtgatccaccttccttggcctcacaaagttctgggattacagcactgagccaccatgcctagcttattgagcttctttgatctgtgaattcgtcatttccatcatatttagaaagtttgggatcatttcttacagtattttttctgcttctctttcagtcttttggggacttcagttacccatgttttaggcgtcttgatgatattctatatctcattcatggttttgtttccactcttgtttctctctgttaggtttctattgctatggcatcagattgattgaccttttctttcagtgtctaatcccagcatatttttcattccaaactctgtgtttttctaagtagaagaatcaattcacattaaaaagacttacgtatctctacttagcttgcttaatatatccatctactgctttgaacataagaactacagttataactgatttagtattcttatctagtgactgtcatgtacagttctttttctgtcgattgctttttctcattttaagtgatattttcctgcttctttatatgattttttttttttttttttttttgaggcaagatttcactctgtcacccaggctggagtacaggggcatgatcgtggctcattgcagcctcaacctcctgggttcaagcaaaactcccacctcggcctcccaagaacctgggactacaggcatgtgccacaacatctggctaatttttgtagaaatggggtcttgccatgttgctcaggctggtctcaaactcctgggctcaagcaatcacccaccttggcctcccaaagtgttgggattacaggtgtgaaccaccacacttggcctgtttggtaatttctgattggattccaggcattctcaattttaccttgtttggagctggattttttttaattcccataaatattcttggcctgtgttctgggacacagtggagttcactggaaatggctttatccttttgaggcttgcttttcatctttgttaggtgagaccagaatagtctttagtctagagctcagtttgcaccactactgatgcagtgtggtactgagcattgtacttcatgtcccacaaattatgaggttgtctactgtggctagtaggttaaccagttgttcctgactatatgtgagccacgtgtggtgttatgccttgagctggctcatgagagccgattgttaaaatatcaggaagtttgtgagctagcttaattcttaagataattaaattatataagcataattaaatcacttattacgaacaaaggtagtaaatgctcagaactcattacctcatataattatattattttatattactgtttttgtgcactcatggtaatttatatctattgggtattttttttttttttccttcctgagacagagtctcactaggttggcctggctggagtgcagtggtgcaatctcagctcactgcaacctctacctcccgggtttaagcgattctcatgcctcagcctcctgagtaggtggcaccacaggtgtgcaccaccatgccctgctaatttttgtatttttagtagggatgggttttcgccatgttggctaggccggttttgaacccctggcctcaagtgatctgcctgccttggcctcccaaagtgctgggagtatagatgtgagctgctgcagccagccttattatgtccttatggtagaaacactatgtaatgtataatgtgttgccatgtatttttttccgattcttattcactgatatgtcagtagcttgaaattggctgtggtggaagtatatataccacaaacattagtaaccctataaactaggaactacatactacttacccttcagttattacatgttttctggcatacccttgcctatggatgtctttccctgttttactgatcaatactcagctcaagatttaaggaggtcccctgcagattatctgagatcttgcctctcctttctgctctctcctctgtggtactatgttctgggagactgtagctaccttggcctcccctaaactcctcacttcattatcttaactccagaaaaccactgagcttgcttgggacaccttcctttctctgcagcttagaaattctccagtaagtaaactggggacaattgtaggctttacctcatttattttttctctttcattgatcactgtcctgtgttgtcttgtttcttttgtcagaaataattttcatactttttttggtccagatttttagttgtttcaggtgggagcataagtttcatccctgttactctatgttggcaagaagcataagtctcttggaagaattttaggtaggagaatgacatatcattctgtagagcatgcatttttaaaggataagacttaacgaaagcagagctgggcgccataactcatgtctgtaatcccagcactttgtgaggctgaggtgggaggatcacttgagcccaggagttcaggactagcctgggcaacatggtgtgaaaccctgtctctacaaaaaatacaaaaattagctgggcgtagtggcatgcaccagtagtctcaactacttgggaggctgaggcgggaggatcatttgagcctgggaggtcgaaggctgcagtgagtggtgattgagccactacgctccagcctgggcaacagagtgagaccctgtctcaaaagaaaaaaaaacaaaaaacaaaaaacttagactaattagaaggcatttgggttagttcaaatcagagcctaaggttggtcatgggtgatgatactacagaggtaggaacaatttgagaaatatttaggaggaagaatctagtttaggatttctaaaagggtgtatcataactcatttacatctgaatctcctaaatgttgataaatgaagattgtatgctccattccaagtttattgaatctgaatttttttttttttttttttgagatggagtctcgctctgttgcccaggctgaagtgcagtggtgtgatctcggctcactgcaaccaccacctcccaggttcaagcaattcttctgcctcagcctcccgagtagctgggaattacaggcacacaccaccacacctggctaattttgtatttttagtagagacagggtttcatcacgtttgccaggctggtcttgaactcctgacgtcaggtaatttgcccacctcagcctcccaaagtgctgcattacaggcgtgagccactgcgcctcgcctgaatctgaatttttaagaatgaggtttagaaatttgtattttatttcattttcttctcattttgtttttaagagacagggtctgttttactcaaattggagtgcagtggctgttcataggtgcagtcccactactgatcagcatggaagtttagacctgctctgtttctgaccttggcccattctgccgtccttaggcgacctggtcataccctgctcccyggagatcaccatattgatgccgaacttaatgcagacacctgattgacatagtgcactacaacttagaactcctggactcaagcgatcctcctccctcagcctcccaagtagctgggactataggcatgtgtgactgtgcccagctagaaatttgtattttaaacatgtacctagatttaatgcttatgaacactgaagttttatttcttttaattaattgattaattagttaattttttagagacagggcttcacttggttgcccaggctggagtgcattggtgtgatcataacttactgtagcttgtagccttgaactccaggcctcttgcttcctgagtagctaggactacaacaggtgcacaccaccatgccccactaatttattgtgtgcattttttttttctgtagagacagggtcttgccaagttacccaagctggtctcgaactcctggcctcaaagtgatccttctgcctcggtctcttaaagagmtgagatgaccagcgtgagccattgtgcccagcccgaacactaaagttttagaagaaactgatgtagttttttcaaagtatgatcatcactgggagcccatacattggaatgacctgaagtgcttaattgaaaatgaaaatttatgcatttgtcttcaggccttctgaatctgaatttatgaggtgattgggtccagggatttcttagacacactaaaatttgggagtcagtaacctgaagtacttcacagatgtgatctcttttgaacttcacaataaccctgagaggtagtaggcaggtattatgtgtttcattttatagataaagtacagataggcaaagtgacttgctcatggcgaaataattattgatgacagagaatcacatttctgtctccttccaccaaatcctatattcttcctattgtctttctattggctgtgaaataggcttatctttgaaaatctatagaaggcatccaagacactgaacatgtggttctgagcagaaaatgtactcttctttgattattgtaccaaatgaaaattcggttcagctctttatagcaagtagctgtgaaagcttaattgtctaggaaaggtgtttctgggctgggcgtggtggctcatgcctgtaatcccagcactttgggaggccaaggtgggtggatcacctgaggtcaggatttgagaccagcctggccaacatggcaaaaccccatctctactaaaagtacaaaaattaaatgggcgtggtggcaggcgcctgtaatcccagctactcaggaggctgaggcaggagaatcacttgaatccaggaggcagaggctgcattgagtcgagatcgcaccgttgcactccagcctgggcaacaagagcaaaacgccrtctcaaaaagaaaaaaaaaaaaaagaaagttatttctgtctttgaccatatctttatgctttttacaactgacgttgaatgtctctttcttataaaatcatttaaaatcatagtatagtgcctatatgtgatactttcacttacaacaagtgaagaatcaggtaataaatatgactctgttgtatgaccttccttttgaattttttccaagctcttataaaactaaaaaataatttgcctgagaatttagggattgtgcttaactttgaacttcattgttttattttaatagtaagttgtgtggcttataccctggttatatcactagggctgtatcttctagtgagatttacgtagtcttttgaagtgattacatgtgtgctgtgaatctgagatcacgtaatctatttaacacagtagtaccagtgttaagactgcaagaagtaggaaaagtaattcttttcagtgaagattggttttgggtttgctttggaatgcttgaatagtcaatgaattttattagtacatgaaaacaagcaaagctctgttccaagggaataaataagatggctttaggaataggacttggatagtttgttttctattttgtatgctttttaaaagacaaaatgctgttttttaaacttctagaagtaagtaactgtagttaaataattcaaatgaaaaaattactgtgtattgtcataattcaaagcagtgtttctgctgcaaaaagcatataacagttttgcagaatgcttgagtttgaaatgtatattgaatgaggtgaagaacacaatacaggggctacaagagttttggctagtttaatttccttgcttttttgttacaagagatgtcatgacaatttttaaacttaaaaaatacttagatcggttttttctttttttttttctttgttacccaggctggaatgcagtgatgcaatcaggtctcactgcccctctaaggatcctccctagcagctgggattacaggcgcacaccaccacatgtggctacctttttctatttttttgtacagatgaggcctcactttgttgcccagggtggtttcaaactcctaggctcaagcgatccttctgccttggcatcccaaagtgttaatttttttatggtgttacttatatagttttaatgtttgaaaacaagtgaataaggaattgtgtttgaggatagatgtttcttaatcgctctattgttaatgaaacttctcactgagaatatctgaatggttgacacccctaataacaagttttatccagaaagcatgtgtaaggttatctgcattttcattaaaaaaaattttgtttttgagatagggtttactctgttgcctgggctgtagtgcagtggcacgatcatggctcactgcagcctcaatttccggggctcagatgatcctcccacctcaaccaagtacttgggactacagacacacacaaccacgtctggctaattttcatttttttttttttgttttgtttagagaagagggctcactatgttgcccaggctggtctcgaatgcctgagctcaagggatcctcctgtcttggcctcccaaagtgctgagattacaggcatgagccaccatgccttgctaggttatctgtattttccacgtagatttgtactctttttactgtgtaatggagtggtacagcatgatgaaacattttggaatgccattcatacgctgctttctttgatatgtatgaatgaacattcttttgtagctcctttttttcactgataaactggttaaaatgacttaaaattctgtacggtgcttttggtcatcaatgtaagtgtgtagatctatttctccaacttgtaaccgtcaaccaagtctgtttttaagaagcttacctttarggaatgtttgtatacctacatgtcagtttattttaaataacatttattttctgtttacttccaaaattacttaagaaagatatcagatgtttaaagtgacatttaaaggaccgtcattatcttttttttacttcatttttaattatagatttattccctaaaatataaaacacacaaaaaagtactttttctattaatggagagtaattgtagacttaaggaaaatgacatatgtctatattggtggtaagaaaaggaacctgaggagctcttcaatttgtaagggtttaagtatggaattaaatttagaatgtttgtatgtgggtactccctgagaagaacttggaagtgttagccaatcatcttagtttgttgaagacacatatttcacagctaaatgtaaggaattacttgtgaagtttagtagaaaatgaagtgtgctatataagtgtttggaaatattaccaattttattcacaaatttgtaaacggtaacacatctatagtgactatattatggtttctcttcacagatatcaagttattctagtacaaccatataaataaataatacctgaagtctcagtgtaacatggacaattaacagtgatgacagataaatacagacgcatggggatcaaatactaggcaaaacgctttttaaaaggtaagaaataatgtaatcttaattaaggccatgtggggtttagttagaagtaattgattgaagtttctttttcagtgtatcaggcttttaagaaacactgcaggatcctgtctatcttaatgctgatagagctcagctgtaagtatcagttctgtgaaaataacagttgcagatgttcttgcctgctaaatatcgtagtggataatcttcctatagtgaactctattcaaatagagtagttatgtggttgattagaacttgatagagtgctactagggcacattccagtatgctcagagatatactttaagttgtagatgttctttgcttttgatgattgctactaccatcacacactgtaaaacgtaatgttttgccatgtttgtgaaaggcttcagtgtttggtacaaaggagttgtcacttggagtctgttataagaagagtgggttttcaagtcaagggttactttatgtaggatcatgttttcgctgagcttctccccatgttaacttagaacatttcttaatgtactgtagtattaaatggttattagacaattttcctaccttgtgctttttaaagcatttccagggcatgtttgggagaggtggcatctatagatattagatattactatccctattctctttctagctgactagagcagtaacctatttttattatgcagtaagtctgcctagtaattacaagattttgtaattatatcagtctttaagttgtaatgctttccccaaaatgtatcactattataatatctagttttatgcttataataaagcgacagtttctgtcataaacatctgctggtcgttttcttagtcctcttccttgttttcagatgggcactcatagtaacccatttagcagattgtacattctctctttttttttttttttttgagactgagttttgctcttgttgcccaggctggagtgcaatggggtgatcttggctcactgcaacctctgcctcccaggttcaagcgattctcctgcctcagcctcctgagtagctaggattacaggcgcacaccaccatgcccagctaattttttgtatttttagtagagatggggtttcaccatgttggccaggctggtctcgaactcctgaccttgtgatccacctgtcttggcctcccaaagtgctgggattacaggtgcgagccactgcacctggcctgtacattctttgaaaaggatatcataataaattattatatagtaaaaattaaccagactgttctaagaaatggaatgtaattagattaattaaattgtctggctaattgggtactaaaaccggaaaatccttgttgttcttgttcttgttaaaaatacatatgccaaaaataatagaaatgtccttttgtaattgaattttgtagcacttgaataagcatcaaggttttcctataggtatagaagatttggttgattatttgtgtgattcttttatgcataacctaaatggttatgtatacttgatgtcgagaatttgggaagtcctctaggacaagagtacgagatgatattataaattctgttatgagaaatgctatcaagggcaacctttatcaccgcaaaaaaaaaaaaaaatactcccttagagcaatgtctagaaaagagcaagtcacattttgactcagttcaaactaatattgagttgtaaggatttggtatattttagtatctttttggtttgcttttgttgatttctaaaaatcctatttcagtttcttagtattcttgaggctacagagttaccgagaagcatgaaagatgtcactatgaacagtttctgtacctgtatttcttcttattatagaaggagtaaatctattagcataagttcatcatcttctttaatccttttttttcattattttattttaaagaaaaatttaggaggttctagtattcttcatggctgaagctgagagagtctgaaaccctgatgcttaagctccattctagatcatagctccaactccttcaggatataaggaaaagagattatatttccacaatgatagatctttggttgtacaggtaagttatttagttttgcagtagtgaagacagctatagtttgacttcttcttcttttttttttttgagatggggagacttgttatttttccatacatcctctgggtggcaacttgtagtttggctggctgtttataggagtatggagctgcagggaatgggttaggaatgaaatatttccctccctttttttttcaatggggtataaatgaagtgactgattatgttggaattttttactcaggaggcattgtgaaattccttgacttccttttcctgatygtcttttaaagtgtgtgttcatttacttttgtctatctgtctgtctgtctgtctgactgtccgcttatctgcctgcctacctacctacctacctacctacctaccgaccatctgtcatatatcagtttctcttaatgggaaagaaataagaagtctctttatgtaaaacaatgcataatagagttcccagacttcaaagaggtgactatttaagaaccttaagttgaattgcatgggtgggttaccagccaggttttactcttctacttttaacattatagatatggtggtaattgcactgctgaggtattgtcttaaaataattatatgacaaacatggcctcaacgttattaaatagtttatgtttagacaactagaaaaagaatcatattggttacactttccagttgcatttgctcttttttccttttactttggtttgtctatgtgaatatattctggtatcatgaccagtttactaaaaatttttcacttaataaaactaaatattatgataataaatatcagctaaaccattggtgtgatggaagattgccagctgctcaattcccaaaataaactgtaccactttggtgattatagtaggaacaaaagcttataggcaaggtctttgaaatatctttttgaaatttctttctcttaagtaaatagctggagaagtgtgtcattaggtgggccttttttgtttaataattattatctgttttagttcttatgcgtacagttctacaggtatgatcataggagctggaaatttatgacctgaaatgtagctgataatgcttcaaagagtgtttttcagaatcctatagttatatttgggtaacagtagattcaaatttatgagagggcaattcagcagcaaatatgtgggtaggatatgtgaaattataggtaggattgagggcttaatatgaatggacaagttgaaattcggttgactagtccttctcagatatggcctccaagaggatgagaatttatgaaggtggggaagagagggagggagtctggttaattctagttactgaccacactcttttttctctgaattctagaaagtgcaaccattcattatttggtagataacatataggaaaaactccagtgtagttgttagttagattgcgttttgcccatatgaatatgttaattaatggcttcccttatttctaaaactagattgattgcatttctaatttcagatggatgctggctaaggtttttaccatatacctcttattttgttagccaacagggttatttcctgagataatttgtaaataagttcatttttattccttaacaatatttggcagaaatataattttgtactctaagcttctttattgtaktcttaagaaacattttgcaatgcagctaaaatgaggaaaacaactgctttagtctataatattttgctaagcttggcaaaacaatgttgagacttggttgagataatacagactttttattttttattttctaacagaaagggtctcactattgtccaggcagttctcaaactcctgggctcaagtgatcctcttgcctcagcctcctgagtatctgtgactgtaggtgcccccacttccctgcccctgcacctggctaatctagacatttttggtccctttttattaactgaattttgcactcagtttattagataattatagaaagtgtgtacctttatatatgcctatccaaaatagaaaagatatgaagaaaaaggttagaacagaaaaaaatgatcagagggaagattagcaaaattttgtttaactctgatcttaataattttaaccagtttattacctcaagtgcacatcacatgttaatttcaggtaagattttttatagtcttccatttggtgcttccttggtcttatttataaatttttttattattaggatccagtaagaaattaaagggtattttataaatagttctaatttagtttgaaacttgatgactattatcttattagaattctgtctgggttcactagcctaaggcagtgcttctcaaaccctaatacatacatgaatcacctaggagcctaattcgttggtaggtctggggcggagcctcgtattctgcatttctaacaagcttccaggagatgcccgtgattgagctgcaagagcctgaggtaccacaaggatccttgttataaaacaagttctctttcaatacagcccaatagcacagaatttgacaatcctagcactagggctttgttctagttattgagtgaaataaaagcatttttagggtacagaagaaatggaaagaaccttaatcttttadattaatcagtgttttcatattttatttaacttttgtattaatcagtgttttcatattttaatcagtggaatggtgaaaaattaagataggcctyactawacgtgwtttttttttttttttttttttttcaagacagggccttgctcccatcacccaggctgaagggcagtcacatcactacacccytgacttcccaggctcaagtgatcctcccactcagcctccctagtacctgggactacaggcaggcttcactacacctggataaattttttgtatttttagtagagacagggtttcgccatgttgcccagtttggtctcgaattcctgggctcaagtgatccacctacctcggtttcccaaagtcctgggattacaggcctgagccaccatgaccagcttataggtgatattttatagtaaagaatatatgtataaaaaaaaggtttttagtactactaataataggttcatttcatccaaaatagtctctctttgagaagtttgtactgcaaggcaaattttgctcccattcagattggtgtggaaagaaaaggttaaggaagtcttattattggaataatttaagaggtttttatgcccttaattgggattgcattttaaaaagtaaagactaacagattcttttgtgtgtttataaagtatttctattgtcagtattatttttgaaccataaattatgagtatagttgaatttacattaaagataatatgtattagattttgtaggcattttagttattaaatttaacttagccttatgctttttttgtgcatttacatacatatttaatatttaaaaataagtaatcttaaccctttagagtgccagatttggatacatgaaacaagtaagttgcttttcatgtatttcagtttgtgttcttttctttttatttttttttgagacaaaatctcgctctgttgcccaggctagagtgcagtggcgcgatctcggctcactgcaacctttgcctcctgggttcaagcgattctcctgcctcagcctcccgagtagctgggattacaggcatgtgccaccatgccctactagtttttgtatttttagtagagacggggtttcaccatgttggccaggctggtcacgaactcctgacctcaagtaatccgtctgccttggcctcccaaagtaccgggattacaggcatgagccactgcccctggccagtttgtgttcttttaaaacatcatttgaagtttaacttaaatgttttacaattaaaagtggaaaattatgggacactcagtgtttgttacccatgaaagaaacagattgtaatcttcatgataatatattagcaaacgataattaaatgtcagctgttcttttaatgaatcccccaaacaatgaaagtttactactgtaagaaatgtgtttctaagttctgatttgtgtcttgtacttattgttcacttggttgctatgaaattctgtagaacatataaccatgctttaattccagggctagttttgtgattcttataagatttaaaaaaattgttaattaaaaatttaaaagtatgccatactttgagacaacactaaactcaggcaacttaaatattttacagggtactttctcacttaattcacttgtcagcaggcaggaacagggagattatttcctgtagtgtttcttttttatatgtggtagcatgttgctgtgtcttctataattcttccaaactttccactgttagatagttctagttgaagcaaggagaaattgtgtttgatttttaggggtaggagtcagaatggcatttggaggtttacatgagaagggagactgttgatgaccaaaggcaggaggaagggactgtgaaactttgcactattgccaccactggcctctttctctaactaatcatcctgcatctcattcaaagttaggaaataaaatgacagggtaccttgtgaaaactaaacagaagaggagtcggggaatagagacttcaaatattaacagctcctttattctgcttgatgggagagcctctggaaaatatcaccaaatcactagtttacccaaatggatcaatcaaggcatttttctatatcccttacatttctgtcatataaacctcaagcatccacaccagaatacctgctcatctcccaaaccacacattaaaactggcactggcatatgctatacacaggagttcaaagaaggaaagggtgggattacaggagtagtcttgatttcttaaatgtaagtatttgcttcagaggcttcttccccattttcttttctggtctttggaacactccctttcacttgctaatttatggctttatttctagagactaggaaggcttgggtttgctttgttttgttcttagccaatgcaagctagcattgtgatttttgtctatttagttatgaaaaattatactgcaataaaaaatttttggatgccagattattattaagggatttgatctgaaactcattttagcaaaagtaaattaaaaagaggagagcctgcctttctgtataccgggaacattttgaaagaacacgagaaatgattggaatagttttttgaaagatagctgctatataagttcaagattattattttatttattttatttatttatttttttatttttttgagacagtctcactctgtcgcccaagctggagtgcagtggcatgatctcggctcactgcaaactctgcctcccgggttcaagtaattttcctgcctcagcctcctgagtatctgggattacaggcgtgtgccaccacacctggctaatttttgtatttttagtagagacagcgtttcaccatgttggtcaggctggtcttgaactcctgacctcatgatcctcccgcctcagcctcccaaagtgctaagattacaggtgtgagccactgcgcccggccgaagattattattttaatgaccaaaatgaaatcacatctttaggatagatctcttctgggtgttttatgcctgagaggcagatacacagtgaggcagttatggtctctagagccctgccttgctacttactagagttgtgaccttggatagaatattcagagtgtgctttaatctcattcgtgaagtagggatgatagtagcacctatctgagttgttgtgagacttaagtgagttaatgtatgtaaggcatatagaaagactcatggaacatattaagtactgtatgcttgttagctataatttatatcattattggaaacgttaaagaatttttatcacataatttaatattggcagttatatagatagttatagactgtaatgtccaagtatacttggattaaaaagttatagctttatactttcgttctgggtatattaactattacctttttctcattattttgtttacatttttgaaggtttcccaatgagtggatcatgatgaccgtattgtagggacttgccatagtatggctgcttcccgatctactcgtgttacaagatcaacagtggggttaaacggcttggatgaatctttttgtggtagaactttaaggaatcgtagcattgcgcatcctgaagaaatctcttctaattctcaagtacgatcaagatcaccaaagaagagaccagagcctgtgccaattcagaaaggaaataataatgggagaaccactgatttaaaacagcagagtacccgagaatcatgggtaagccctaggaaaagaggactttcttcttcagaaaaggataacatagaaaggcaggctatagaaaattgtgagagaaggcaaacagaacctgtttcaccagttttaaaaagaattaagcgttgtcttagatctgaagcaccaaacagttcagaagaagattctcctataaaatcagacaaggagtcagtagaacagaggagtacagtagtggacaatgatgcagattttcaagggactaaacgagcttgtcgatgtcttatactggatgattgtgagaaaagggaaattaaaaaggtgaatgtcagtgaggaagggccacttaattctgcagtagttgaagaaatcacaggctatttggctgtcaatggtgttgatgacagtgattcagctgttrtaaactgtgatgactgtcagcctgatgggaacactaaacaaaatagcattggttcctatgtgttacaggaaaaatcagtagctgaaaatggggatacggatacccaaacttcaatgttccttgatagtaggaaggaggacagttatatagaccataaggtgccttgcacagattcacaagtgcaggtcaagttggaggaccacaaaatagtaactgcctgcttgcctgtggaacatgttaatcagctgactactgagccagctacagggcccttttctgaaactcagtcatctttaagggattctgaggaggaagtagatgtggtgggagatagcagtgcctcaaaagagcagtgtaaagaaaacaccaataacgaactggacacaagtcttgagagtatgccagcctccggagaacctgaaccatctcctgttctagactgtgtttcagctcaaatgatgtctttatcagaacctcaagaacatcgttatactctgagaacctcaccacgaagggcagcccctaccagaggtagtcccactaaaaacagttctccttacagagaaaatggacaatttgaggagaataatcttagtcctaatgaaacaaatgcaactgttagtgataatgtaagtcaatctcctacaaatcctggtgaaatttctcaaaatgaaaaagggatatgttgtgactctcaaaataatggaagtgaaggagtaagtaaaccaccctcagaggcaagactcaatattggacatttgccatctgccaaagagagtgccagtcagcacattacagaagaggaagatgatgatcctgatgtttattactttgaatcagatcatgtggcactgaaacacaacaaagagtatgtgtaaatatggtaaccatgaattctgctttgtttattattccccaagtttttcagtatctattcgtagtgtttttattacagccaaaattaatgttttcactaaaattttaggtttaatatgattttctcaactcttagaaaaactccaaaaaaagacttaaactcaactttacacgtgtgttctatgacaacatggtctttccagttctgatatttcatgtctcaattagaaaagacatggttggtagtgtttttgtttttttaatatgttttatatcatttttagttaatttatacaatggaaacacattgagttaccacagtatgctttgatttatagttctagatagcataggacaattaatgagtgcttagacatcatccagatatgtgaagtctggcaggcttgacatctacttttatcttacttacatttaattcccaattaaaattttttattaaaaaatgtgctttatgcatcatctttgactttgacttagagaagtggatattactattaacactatgacagtatattgtaattagcatattagcaagggttagtctactggatagtttacataaaacatttgacatagcttttcctgatactaaatataaaggaagactatcttaaaatattatcagctctcaacctttgctaagtcactgttgtaaataaagaattctgtatccaaatttttcacaatatttcttgcctagatttcctataaagtattcagggccataacacaaaagatttggagcttactatgtctagataatcctgaaaagaactagaacacacagtgctcatcataaatatcatgattagcaacaataaaagacagacttatgtaataagttaattacctttattgctacagggtaggcttttgaattaatatcacaaccagattatatagactgtacataaatactttgatttgaggaacatttctagtggttttgttgtgacaattgccagaccctggtatgtgtcagatcaaagtatcaaatcctggttgtgggacataatattttttttgccatgcattgtagatagtgtagatttgtatatggtaatacagtggtctttcagcataggccccttctgaaaagttttcttctgctttcttttgaaatactatcttaatattgtatttgatagttcatgtcatctgagcattttacaattttgtgaaaatgttaggagtctcgagtatttggaatatttgaagtccagttttagatagcaaaacaactcataaatgaagttttttttgtattagaaataagttgagttctgctgttcatatatactgtcagtttttttgtttgtttgtttgtttttgtttttcgttttttgagacagcatcgcacttgttgcccaggcttgagtacacaggtgcaatcatggctcactgcaaccttgacttccctgggctcaagcaatcctcccatctcagcctcccaagtagctgggactacaggcacatgccaccactcctggctaatatttttttgtattttgtagaggcaggttttcaccatggtgcccaggctcgtcttaatctcctgggctcgattgatcctcccacctcagcctcccagagtattgagtataggcatgagccactgcacctggcctagtatcagtttttaaaagtagacctgtttatctgcagtgcagggaaggagagcgtatgtcttaggaaaataccaaaaactaaagaaatgtgaatttttataaaatgatatatgttagttctgttctttgctttttattgttttagtcttgactcgttattgattgtggaaattttttttctagtaattcactacagtattactttttgtaagagattgcccgataataattctgaaggatgatgttcacataaaacagttacctaaagatacagtcataacattgatattccacattcataaccctttgaggatgagaacaatacagcttaattggtgcttttatacattttatatagtgtgcttttatatgtttatttttcatgtgttccttaagatatagagactcctttggaatttggatgctagttgctttgttagaacagtgttttcaaattaatgcctcattgggtgacattggggaaaaaattactgattcttgcctttttgccttgctccagatcttttgaaggatagcactttttttgtttgtttgttttttgttttggagacagagtctcactctgccacccgggctggagtgcagtggcacagtcgtggctcactgcagctttgacctacctcccaggcttaggttatcctcccacctcagcctcccaagttgctgctgggactacaggtgtacgccatcacacctgtctaattttttgtaattttaattgagacaggggttcgccatgttgtccaggctgatcttgaactcctgggttcgagcgatctgcccgccttggcctcccaaagtgctgggattacaggcatgaaccacctaacctggctaggatcgcacttttgagacttttctcttttttcttttttttcaaaggaagcaaatcagaaatgagatggagtatcatgattagcatctcagagctaatttaaggaaaattgggagagggtgtttgatcatgtcagatctaatctctttcagtaaagtctctttcctcccccataccttcattgtctagagccaagagatggttggatataatgttggctctttttaatccaagttgccatcrctaaaagtagcatcatgacacctgtctggtgctttcaagtctcaagtaaatttctggcagtttgaaaatgatgttaaaaagcacttgggttttaaaaaaaggcacttgaaggagatggtttattctcctcctgtacacacatatgtacataccttgtcaaatgttacttctcttccttattctccctgtgctagaaacgttctccaggtaattgctttttgaaaccgaggttgagcattgcccagcctaaatatgaatatctctaccagtagggaatgaatacttcttgatagccagttttaaaagtaagttgttaatagaaaatactgagcatggcataattctttgtctagagccaggaggacataactctgtgttattctagttgaaacttttcctctaacctaacagtgatcaacagccttctatcctagtgttcagcttacagtttatctgtcttgtgtgcaaagatatcccatataaggtcatccgatcacttgtaaatgtttgcgaaagtattgtgtagaatcctagtcttagatgtgatttatagtaaattaggcattagaccagggaaacaaatctgtggatgttctgggtactagcttgatgcctctctagatgccatccctcttctctagcgcataaatccacagtgtgcttttatatatttatttttccaaatggagaaccccactgtgagaaagggaccagagaatatctttttctctggcaagattccatctgtggattattttattagacatgccttctgaaagattaggggtggaggatcaaaagaaatattctttatctgaaggctctttgatcttcagggttgatagaatctgttaaagtgttagataatacagtacctaatgatttctttttaggcttaaatagcctcactgaatgagattatttacttaactgtgattgccctttctgtttcggaattgaccttgctaatttttgaatcaggagcactgaaacagatctctaaattttgaaggtctggctctaggaagcacaagtgtggaagattttaggtcttaggttttaatgttcagagcgtttcttccaattcaaaacgtaatcactggaaaataaacttctaaatgaaaatgtgctttggtcagctgcctctgaattatcattgtgcaacattacttaaataaatttgtgtttgaaagaccttgggtatcttcatttaaggatctttggtattataacatttcatgaacagataagggggtgaaaagtcaaatttagggattctagattcttgagctcttacaaagattaactcattgataacagattgctaacatttataccagttcttaagtttctagataatgaacctgtaagatagttattgctcatctaagagtgttgctcaggtactctgcaggtgagaatattattttcaagtcacgtttaagagtttctaagaattgtgttaaacttggattttggaaaacgttaatgatagtaaataattataatatgtccttcttattgcaccatgcttatttcatagttgattaaacaaacatttgatattttcatcaattttggaagctgcatagagaaaatcttaatcagttcttggagatttacttattgagagtctacttttactgttggtcaaagtaatttctttcaaggggccagaaaaactccaggatcttgcttaaaaatcactagaggagtcatcctaccctgaataagataattttacatctgtattgtgcttcataatttacaaagcaatttcattagtttctcatttgactatcatgacagtttgaaagtagacaggataggcaccgttatacagtccccatttcctaactcgtaattaagaattttagattattaattttaagtaatataatgaattactaaataggatcaaacttctatcttttaattactagtttgaactatacttggttacctcatccagtgaggacttacttcatgggcttttgggtttctatgttgagaaccctcatggagcagatcttggggactcagttgtcaggaattctttaccctgaggttaggttctgtaattgtagtcatgattatctgatttttatttgttacagaatcagcattataggtaagtactttgctttatttattgaatgaaatactttcatgttcattattttaaagaacatcttatttgtgaagaataaactggtgaaataaaactatggctgtagcttgatttcaaatagaggatttgaataatatgaaaagaatactctggggtattttagaatgcggtaggtatattaaagtcaaagattactaaggaaaactcatgcttggtgtaccttctcaactcaccagaaaaggctgtagaataatagccggatttacccctctggtctggcacaaagattaatgggaagagagaggtagctttctaaaacaggggtccccaaccagtccatggcctgttaggaactgggctgcacaccaggaggtgaacagcacctcctgtcagatcaacagtgaaattagattctcataggagcacgaactctattgtgaaccatgcatgtgagggatctaggttgcacgctccttatgagaatctaatgcctgatgatctgtcactgtctcttatcacccccagatgagatcgtctagttgcaggaaaacaagcttagggctcccactgattctacattatggtgagttgtataattatttcattagatattacaatggaataataaggataatagaaataaagtacacagtaaatgtaatgtgcttgaatcatcctgaaacaaccccatcacccagtctgtggaaaaaattgtccttcatgaaaccagttcccagtgccaaaaaggttggggactgctgctctaaaatatgtaatttttgcttgtaagtagagtaagccattgactaaccaaaacattaagtgaattttttgctttttcctttgaataccaacttgttttgtttcaactactgtagatggtatctaaaagtgattctctgctgtaatccaagtatatttgtacccaagtataatttaaccttttcttttttttcttttttttttgagacagggtctcactctgtcacccaggctggagtgcagtggtgccatctcagctcactgcaacctctgcctcccaggttcaagtgattctcctgcctcagcctcctgagtagctgggattacagacgtgccaccacacccggctagtttttgtattttttttttttttagtagagacagagtttcatcatgttgaccaggctggtctcgaactcctgacctcaagtgatccgcccccctcagcctcccaaagtgctgggattacaggtgtgagccaccatgcctggcttaaccttttctttttgatttaggttcatctttttgacagaggttatgaagtaatacttttctggcatcattgccagaataggtctgtttttttcctgtgrtaaattattttgggctacttggttttttatgttcttataatctgtttcttttctatgttcttttctaagttctgtgactttttattgttttcttcatttttgttggctttcatgagtcaccttcctttagtaactaagactttccttctaattgactgcttttagttttctctgaaattggatatcagaataacacttgtcagaattatgtctcatgattctttagtgattgatacattgaggagtttatctttgaatgaatatgtgttagtgtgtgggatgtttgattgtgttttcttgtttgtatgctttccggtttaggggctgtgtttcatgtaagttaccagatctaaattctgaacagagaaacaataattatttccttatatatatggtaagaaagactcacttagcaataaaccccatctaaaacaattatttatctacaattttgacactaattgaagcttagcttttagttgcagaaacttaattttggtaattttttatagaagtgtacagaaaacccaactwttttccttctatactcactctgtctcagtacttcacttctgacaccagatctataggaaacctcaactgtttttctctctactcacactcaacacttctgtgaccagatttgtggtggtttttcccactgaccaattctctgactcagttgaatgtcctatgattccattcaatattctgacactaactggagttagtgcagaccccacaggttaaggtctccatcctacaagactgcctcccacttcagaagccaatcacaaatggtaggtcctcaggttacccacagtttcggtctgacttggctacaaattggagggtcccaccaccccctcctcagatttgataatttgctagagtggctcacagacctcaggaaaacaatttacttattacggctgattaattacaaaggatatttcgaaggatccaaatgaagagtcagatgaagagatatgtatgtacggcaaggtctggaagggtcccaggcacagaagctttttttcctgtggagtttgggtcagcaaccctcatagctcgtagatgtgttcaccaatctagtagctctctaaactttgtctttttaggggtttttcaaaatggagcttcatttctcaggcatgcatgattattaactcaatctccagctcttctaacctccccagagcacacaagggttggggcttgtaagttgtaatgatggcttgctctttgtaatgaccatcctccacccaggactccacccagagtgactttattagaacaaaagggtctcctatcatccaggaaattctaagggattcaggaactctgtgtcaggcactcctgtcactcaggaaattgtagaggtcttaggagctctgtgtcaggaactgggatcaaagaccaactattaggaacaaagatttttctagcatccctatttacaagagttttaggagctctatgcccagaactgggagtagagaccaatatatttactttttattatttcacaagtaggcttaggaatgttgtatttttacatattagtaagaagagtataccatatatgctattttttgtgttgtttcatgttatcagatattgtaatgtatagtaataaatgggaagatctgtgttgtgatctacttctctctttttttttggtcttacttttcagtggaatctttttgtttgtttaacttttatttcttttactgtggaaagctgcttttgtttgtctctttattctctgattttaacatagggaaaatctgaatgtggccagaggagactaataatttgtgcaggaccctctcaggcaagattttctgtggtgtgctgtgattgaattttcacatgtctactaatcttgggarttggattatagacattgtacatatgttgctgagggtcaggattttgttttctttccttaaaaaatgttgacatttgttctgacaggcagttaatttggggataaacttggtcctgttaaggcttatgcttacctttgttaggggaagtacagagtagcctgttctctagatctcggttagccttctatagtatggtcttagtgatatcttgtttaaagaggtaatttactatggttgatagaatcatgaatgtttctagccttatgaggacactgttagttgttctttatatagctccttggtagttgttctttgcttggtttgtggagtctcatcttatgtgtgtgcagcattatattcagccagactcaagaggacctctatgcagatagcattgtttgtctttctgtgttgcttcttcctttttgatactccgtcccacaaattctagccgcttcagcttccccaaactgttttctgtctctctgctgagcaacacacctccctgttctatagtactgacagtacttccaagtagaaagagagggtgataatagggcttatttcatctgtttgccttctctcacagatcacagttacatgctgtctgttgtctaatgtttggaaatagttattatttgtatattttctccagttttgtagttgtggatggcaggatggccattctgtgtcagttactctgttatgactgtaagtggatgtctctgatgtaattttagtatgcactgggtatgttttcttcctataatactcaaacccaagcctgcagtttgattatctggggattactgtgggcgagcttttacttataccttaaaaaatagtttcagcaacttcttttttttaaagaagttgaagtcagaaattgtaacagtaagaattttaattgaagaatgatggtaacttctacctacttgttttagttatgattaggtattgctgaggttggaacagaaataaaaattaggttactggtgagataaagttcttgaggatgggtaaaagagagaaggtgacatacaaaaagatatgaaacttttttactaggtttcaaatggtaattctaagagtctaagaaattacgtatttgttagctatttttcacagatatttcaaggatttttgttgtaccagatttgctgtataatattttaataaagccatggtgaatatgttctttttcaatccagtttctagtagatggttttctttttaaataaatttaaatgtaaagtattttggagaaatctatttttccttgtactttaatttttaccatttgtgttggaaaaatttgattcaggttttttttttttttttttgctatttttcatttgttttacattatcattccttttagtttattttgtttgttttgtttcttttgagacaggttctcactctgtcacccaggttgtagtgcagtggcacagtctaggctcactgcagcctcagcccctccggctcaagcaatcctcccacctcagctgcctgagtagctgggactacaggtgtgtgccaccacacctggctaatttttttttttttttttttttgtggagacaaggcctcattatgttgcccaggctagttttgaactcctggcctctttcctcggcctcccaaagtgttgggattacaggcataagccagcacacccgacccttcagttattaacgcattcatatattttaactaaaggttctcaaaacataattaagattatgcttaaacttttagttggagggaaggatcatgttaccgtcttaacatgtgagatgtgagattgaaaaagtgtaagatgtcagttaagattacaataaaaactggaagtatattcttttttcttttatcgttattatatttatattttttcaagacagggtcttgctctgttccccaggctggagtacagtggtgtgatcatgccttaccgcagcctcgatttcctgggcacaggaaatcctcctgccttggcttcccaagtagctgggactacaggtgcgtaccaccacacgtggctaatttttatattttcttgtagagatggggttttgtcatgttgcccaggctggtctcaaactcctgggctcaagccawccgcccaccttggcctcccaaagtgctgggattgcaggtgtgaggcaccatgcctggactttttttttttttttttaacttaaatttaaatttaaatttttatttcttaaattttttcccaaactctttcttcactggattttttttttaaagggagggtctcactctgtcacccaggctcaagtgcagtgacacaatcatggctcactgcagccttgaactcctgggctcaagtgatcctcccgcctcagccttctaattttatttaatttttttgtagagacaggctccttctgtgttgcccaggctggtcacgaactttgggtgtcaagtgatcctcccaaagtcttgggattacagttacgagccactgtgcctggccagtagtgttttttgagacactaattataactagataatgtttttattttcaagatgcttatattatttagatctagaatctcactatattgttaaactttatctttaaattatttaccaaatcaaggtgattgggctagatttgaggaactctacaactgccttccaattatttttcgctggcagtatgatgctaagcttttgtttctacaaaaaaactttattttgatttctgtagttataattagtgtattatatacatggttttggactcacttctttctgtgttcttgcccttatttttggcactgcttaggcttcagttactggctttgttcttcctttgcatcctctctctgggtgttcccactcactgctgtggcttaaattactatctatatactgatgaattttgaaatgcctatcaccagcttagattattcttgagtatcagaccatttagtggatagctgcatttccatgtcccatagtatacccagtggaacatgtctgaaactgaacttactgcttctttcatactcacattgaatattcacgttttttccttgatttggtggagtcttttacttgcccaatccagaaaaagcaaagtattcttcaactacttgtttactacaccttcctctcctactgttcttactgattcagctcagtttccttccttccttccttccttccttccttccttccttccttccttccttccattctttcgttctttctttctttctaatgtaggccactgtcatctcttttctggattacttaacatacttccttatttgctttctgtggtgctagtttactttgccaatgaattcttatactgtagctggagtaaatgtcttagaataaaatcgactctttaaaatgaatcattgcatgatttttaaacatgtcttttactgtctgcctctcactctacattctattccaattgaatcttgatttccttagttccttaattatgttctctcattctaggccctcctcatatgcctaactgcctgctctaccttttccctgttttcttgattattgtgctacttctacaaagcctttctgaatttagacatcatattctctgagaaatcttatctttaggcctgattattagttgctccttgtgtgctgtgttgtagttataattgcctgtaaatgtgtacaagagaccataagctctttgagagaatcatgtctgtctggttggttgatgtatcggtggtgaaatttcaagcattatactgctttgaaaatgtcagagaaaaatttagcatgcttttcatagtagaaaaatttaaataccattatttgactttcaagattctgaattttatatagtgttagtgattttttaacatttaaattttcgaaagaaaaatatgcgatatcatcattcatatggttaatttaactcagctatgtggagacatataagaggagtctcatgtttacagatgagttgtccgagtttgttacctagtggtaaaatcatgtttttacatggtcatataagaaatgtaagttcagtttttaataataccagactcccaaagagaagtcattgtgttataaaataaatttaggtttggtattatcagaatgttttatatgattgtaaatacaattttacaatctagagttttgccagtaggcattagaagcctacagagtggttaagaatttgattgtggttgtctttactgaattgaaggacttgaaagaaaatgtgtgtccttgcctttttatgtgtgtctgttctattaaagattttcagtagaggatagtactcaactttcttggttaaaaactcataattttgagtagatgctacaattaatttaaaatgacatgtgctgtgtctttgcagttactatgaaatgatagcctacatatagtttaacatacatgtagtttgggctatatttgaggtatgttgtttgttacagtattagtttttaactagaagttactaacttgcctctgttatatgaaacttttatgtatttgtaatactagaataagaggtaaacattttagattttacagtggattgtttcatagaataggtaatctaaaattctggagtagggaaatatcaagggaatcttgatctgactggttgtcaggggtttttttctagakgattgtgaaatttttattctgttagctataatatagttgcatttagctttctattttaagagagaaaactcaagaattctgtggcatatatttagaaaagcagaacctagggataaattgaaaaggtcatcttttaaggtctgttcccataagaatctttgagtcttcaggggaaaaagaccattttttgaaggttataataatgtgattaaaaaacactgacagattgttttaaaatttcctatacaagttacttaaattcagtgactagtaaataacttctttaagctatttaaaactaacaaggacaataaagttaaggtaatcagaacttgtttgcagcttgttgcaggaatcagaaattcactcagagtatctcaaacaacaaaggggtttattttaaataaatgatagcaaacaatcttgcgaatactcatgatcagaaaacaaattcgaggcagacctcatgaaattataacctgtcagtattcaagattatatatactctctcaccactgcttgtctttgtacagtacargctagtttttcttattttattaatgttttttgcacactttcttcctttcccctgaaatttcattttgcagatggcattggcttcctactgtgcttgtcatgatcccaactttatatgacattttattcccagagcctcgtcacagtctctaaagagaacctggttcttgactatccaatagattggcttccttggtcagtccatccctggccgaattatcaattgtcaggggtgggattattggtccaaaaaaaaaaaaaaaaaaaaaaaaaggctgcattggtctactcttctagagcaagggtatatcttccagcaaaaaggtatgtgggcaggttggtaggctgccaaaacatgcccattatagaccatttagctttttgggtaaaattgtactcttggtcaattgtttataaaatgagatatggaaacactaatacattgctggttgcagggtaaaatggtgcacccactgtggataacagtttggtggttcctcaataagttaaacatagaattaccatatgattcagcaattccacatttatttatttattttttgagatggagttttgctctgtcacctaggctggagtgcagtggtgcaatcttgtttcactgcaacctccgccttctgggttcaagtgattctcttgcctcagcctcccaagtagctgagactacaggtgcttgtcaccacgcctggctaatttttttttttttttttttcagtagaggcaggttttcacgtgttggcttggctggtctccaatgcctgacctcaaatgattcacccacctgggcctcccaaagtgctgggattacaggcatgagccaccacgtctggctcagcaattccacttttagatgtatactccaaataatgaaagataggtgtttaaacatgaacttgtacacagatgttcacagcagcacaattcacaatagccaaaaggtagaaacagttcaagtgtccatcagctgatgaatggatacacaaaacaaggtatatcaatacaatggaattgtattcaactgtaaaaaggaatgaagctacaatatgaatgaatcttgaaaccattgtaccaatgaaagaaaccagacacaataggtcatatatgtttctatttatatgaaataatccagaagaggcaaatttatagagactgaaagcagatgaatggttacccagggggtcggggaagggtagaatgaggactgactgcataatgtgtataggatttccttttggggtgatgaaaatgttttggaactggataatggtgatggttgcacaacattgtgaatgtactaagtgccactggattatatactttaaaatggttaaaaaggtaaattttatgtgatttttaccacagacagatgaaactaaagcgtggggggattagtgcataccagggtatgcacaagatcatccactgggagatagaagaaaatactacttagaggttttttgctcattttaagaatgtctgggttttttgaaatacattataacatatatttgtaatgcatttaagtatagtagaacatatagtttataagtaagtgtacatatattgggaacatgcctgacaatttttatttttatttttattttatttatttatttattttagagacgaagtctcactctgtttcccaggctggagtgcagtggcgcgatcttggctcactgcaacctccgcctcctgggttccagcgattctcctgcttcagtctccctcctgggctgggactacaggtgggtgccaccacccccggctaatttttgtatttgttttagtagagatggggtttcaccatattggccagactggtcttgaactcctgacctcgtgatccacccacctcgacctcccaaagtactgggattacaggcgtgagcctccgcgcccggctgacaattttaattttttaccagtagagatgcatagagcaaaaagtgtgaaaattgttgtttttaataaggaaaagccacctattgctcaataattttttacttcagcatttaggggaagtttttaaacacagtgccagattctcttgaagtatataggttacagaatcctagtaacacatttagagaaactacagggttcaatgsacatttacttaacagtcttgaaaataacttgggttgcttttaagcaaatggtgtcatcttttaaaactgcactgacattttaaatgtggcaggtgttcctaagaagagcaccagagtgttcttgggcattagaaacttgttaatgttctttatactcagaaactatgaagccaataacactaatgataataagtatgaacatttggcgtttaaagaaaaatcaacgattgaggggggaaagagtcatgatttcctcaagagcaggggtaagaagcgtgtctgactaattaatgagaattctttaagagacaaattattagataaaaataactcagtgtataatgtgtataaacattatacacagtgtgttccatgtcattgtggttatttccttttaaaattgtgattaaaaagaaaaactagttaattttgtgtgtgtgtgtgtggtgggggggccctttgacacacaggaattatgtagtggttacattaggtagcatatgcctgtaaggtagcactactgaattaccaagttttatctaaaaaataaaaccaaatagaatgttttcctctttataagaatcagtacctcactttactggactcaatccttgttgttcaaaatatatttggaactcaacttttggaacagtttgcagaatatcctcagtggtggcagttccttttaaaggatatttaatttttactagaatttttaattatgcagaaatatgtaacatggagaaatatattttttgtcaaaaataaaattataagtagtgaaacttatgtcctttcatgtctcactaacctgaactaaatgtgactcataaatttggctctaaagaattckagcagaacaactccataggcattttgcatacgcaccatatagcatgtaacacttagtggactgttaatttaaccatcttttttcctagattgtgagattgttgaagctagatgccaagtttgtttctatgatgtactttctccatgttgattttaaccgttgtcatacttgtttaaagattcagaatattgtgtggatattttttcccctctgtgtgtctttttctaaacatattggtaaaaagcattctgggaattcatactgttattgataaccttctttgattatattttgtaattctgcatctgttgaaattcgaatgacccttggctatccaaaattcatttactgtgatgtcaccatttttgttgttaggtaggaagaaagcttccttgaattgtttggtctattgatcatcaattgtaaaagcatagagaaaagagtgagcagttgtaccagtgtggaggcagtgattgctctggattcctccactcttgctgccaccactgtgtcatctgcactactgctaccccattcagttaatgcttctctgaagaatgaatttttatttttttttaaagcctaccactcctgaccctgctttgcttctgagatcagatgagattgggcacattcgggctggtatggccataaacatgaatgttctatttatattttcttcattaatattagaaatagattttaacatctggtttcatgaccatggttagaacctgaagtcctgttttgatttgaaagtagataaatactgtgtgggatttggaacctttagaacaagaaatttatctagtaacatattcccctgtatattgatttacagtatattwaacttattaaaatttattttttctcaaagcttaaaaaagtgatatatagtgttaggattattggaactttatttcttttcatgtttyacatttttgcactgagtttgtcttgtaatataattagaaaatatttaaataatgaaaaacaaaatttagtctcataaagatattataggggatttaaaaagaaaccaactttagttttcttgtgctgatgaggaaacagaactaagytacagaatcaagagacgttaatgggggtcttagcccttagctgggtaatcatgaaggagtcaatctctttgaacttcattttttcaattgtgagatgaagaggttgtgtttatccttgaggtggtaacttctagccttgttactctatgattacgtggcatctgtagttgctgttccactagagtcggcttaggagaggcatccggttttacagcattggatgtatcttgataagctactgtcagaaacattctgtggctaaagtaatttaagggttgtgtttaagtcttgatagcaatctgcatatgtttaaaaagcatatttaaaaaatattttacattagtgtcatgtcattaatctgtatgtattactggaagaccttagctgagagatgcatttaaaataattttctatttattgtttatagctatgttttgtgggcttgctatgtttttaaaaagatgtcatgcagtctgcatcagaggtagcactgcagagctttaactgttttgtatttgttattaagttattgtggcattcagtctaagggccctttgaaatttttgatatattaaaaatgtattatagactatgcttaaagagatcctagattttcaaattttaatatatattcgacataggggaaaagtcaatatgtaggatataacttgtttagtttatcaggtaggaatagcactcttggtatgtgtgtggcagggaatggagaaggtcaggagaaaagagaaaggtccttggctggatgtctttattttattctaataaatggataatttaatttatttcctcctttaaaaaagtctctttacttactctctcttccttacaattgcatagcaacactagagaggagacattttggttcctcagtctctacctaccatataaacatataccaagaaactctttaatgatagatacctgagaagcagcgtttaaaaatagatgcttttttttttttttaaaggcgtggaatagcagtgaagaataatgagttttatttatcttggttctaataaataatgtagtaaatatcttgctttttaagacctagtcttcacaggttaattgtgtggttaggatttgaaagtgtaactcaactaaatgcaaatgaaaacaaatttctctttcagagaaatctcaattatgattacattttttctgcaaatggaagagtaatccctgtattctatgttgttagtgtttctgtggttcatactaaagactaataatccatgaagaagttaccaacatctatatgatgtcttaaatgatttactgaaggcaaaatgtgtcaactacaacctaaagaattggtggaagtaaagactatcagacactttatttacaaaataataaattttattgtgtagatttgaagttagtaatatgttataggatacatataggtagtaagtggttactatagtgaagcacattaacatatctatcatctcatatagytacatttttggtgacaagagcaactgaaatctgcttacttaataaaaatctctaatataatttattaactttagttttcatgctgtatattagctctctaaacttgatcatcctaggtatctacaattttgtatcctttgacctatgtctcctcatattctctttccccacccccctgccagtggtatccactgtttcattatctctgtgtattagagctctttttcttttctaatattccacatatagaccagatcacgcaatatttgtctttctgtgtctggcttatttcatgtagcataatgccctctaggtctgttggtgttgtggcaaatggcagtatctccttttaaaaaattgaatagtatttcattgtgtatatatgtaccacatttctttgtccgttgtctgtcaatggacatttaggttgtttccatatcttagctattgtgaataatgcttcagtgaacatggtagtgcagatatctttatgcctctgggcatctcctttgggtaaatgcccagaggagggattgctatgtcatatggtagttcttttaaaaatgtctttaggaacttccatactgtttggtataatggttgtatcaatctacatttccaccaacagtgtgctaaggtttcctttctccataccctcaaccagcatttattatcatctgtctttttgctaacagccatccttatgggtgtgaggttatatcatatagtggacttaatttgcatttccctgatgattagtgatgttgagtaccttttcatatacccattgaccatttttatgtctttggagaaatatctgttcaactcctttgctcatttttaaattggattatttgtctttaaattttagatactaatcccttatcagatatttgatttgcaaacatttttccttctttgtaggttgcctttttattttgttgtttgtttcctttgccacgctgaagctttttagtttgagctagtctcatttatttttacctttgtagctaagctttttgtgtattacccaaaaaatcattgccaacaccaatgttgaggaactttcctcctatgttctcttctagtttatggttttgggtcttatatttaggtctttcactcgttttcatttgatttttgtatatggtatgggataaaggtctaattttgtccttatgcttgtggatatccagtttccccagcatcgtttattgaactgactgtcccttattgtgtgttttcgccacctttgtcaaagaccaattgactgcaaacacgtgggtttatttctgcactgttttacttcattttctgttttttatgtcagtaccatcctattttgattgtaatagctttgtgtagtatattttgaaatcattgagtgtgatgcttccggctttgggttttgtttttgttttttgctcaagattgctttggctatttggagtcttttgtggttccatacaaattttaggattgttttttctatatctatgaaaaatgacattggaattttgatagggattgcattaaatctgtaggttgcttcgagtagtatggacattttaatagtattaattcttcccatgtatttctatcttcctgagttgctttcatcagtattttatagttttcagcgtagagttcttttaccttcttggttaaagttattcctaagagtttttgtgtttttttgcatgtgggttgttttttttttttttttttggtaggtatttttaaatgggattgttttcctggtttcttttttggataattcattgttagtgtatagaaatgctactgattattgtatgttgatttttgtatcctgcaacttaactaatactaaatttgtttattctaaaagtgttttgggtagagtctttagggttttctatgtataagatcatgtcatctgcaaatggtgatgatttaattttttcctttccaatttagatgctatttatttctttctcttgactaattgctgtgtctaggacttctattactgggttgaatggaagtggtttggggatccttgtcttttttcagatcttagaggaaaaacattcaacttttcacccttgagtatgatgtcagctgtgggcttgttgtatatggcctttattgtgttgagggtgttgaggtacattccttctgtatttaatttgttgagagtttttttttttaatcatgaagggatgtcaaactttgccagtgctttttctgcaccaattgaaatgatcatagtttttgtccttcattctgttgatatgatgtatcgcattgatttgcatatgttgaaccatcctttcatcccagggataagtcctaattggccatgatgaatttttttttttaatgtattgttgaattttgtttgcttgtattttgttgagggtttttgtttcaacagtcatcagagatattggcctgtagttttctttttttaacgtgtctttgtctggtttgagtatcagggtaatacttcatataatgaatttagaagtattccctcctcctctattttttggtatagtttgagtaggattggtattagttcgtctttaaatgtttggtagaattcagcaatgaagccattgggtcccagggttttctttactgggagactttttattatggctttgatcttgttacttgttattggtctgttcaggttttggattttttcatggcttagtcttggcagattatatctagcaatttatctattccagattttccaattagagcaattagttgctctaatgatcctttgactttctgtggtgttgattgtaaagtctgctttttttttttttatctctgattttatttggagtgctctttttttttaagtctggccaaagtttgtcarttttgtttgtcttttcaaattgatcatttgtattattttctttgtttcaatttcatttacttctgatctatatgatttcttctaattttgggtttggtttgctcttgctttaagatgcattttaggttatctatttgaagttttttgttttttatgtaggcactgatacctataaacttcccttttagcatggcttttgctgtatcctataggttatggtatgttgtgttttcattatcatttgtttcaaaaagtttttcaatttccttttaaatttcttcattgacccacgggtcattcaggagtatattgtttaatttgcatgtgttggtattgtttccaaaatcctctttttactgatttctagttttattccattgtgatcagagaagatgcttgatattatttttagtctttttgaatgttttaagacttgttttgtgacctaacatattctgtcctcaaaaatgacccttttgctgaggaaaaggatgtgtattctgcagacattggatgaaatgttctgtatctgttaggtccatttggtcggtctatagtgcagattaagtctgctgtttctttgtttatttttctgtctggaagatcagtccaatgctgaaagtggggtgttgaaatctccagctgttactgtattggggtctatctctctctttagctctaacaatatttgctttatatatctgagtgcttcagtgttgagtgcatatatatttctaattgatatatcctcttgctgaattgatcccttcatcattacatagtgaccttctttgtctctttttatagattttgtcttaaaatctattttgtttgataaaagtatagctattcctgctcttttttggtttccattggcaggaaatatcttttttcatcgctttattttcagtgtatgtctgtctttataggtgaagtgtgtttcttgtaggcagcagatccatgggtcttgtttatttttcatccgttcagccagtctgtgtcttttgattggagaatttagtccatttacatttaatgttattactgataagtaaagacttactcctgccattttgttatttattttctggttgttttgtggtcctctcttcgtgtctttttttagtgaaggtgattttctctggtgttgtgatttaatttctaccattttattttttgtgtatgtgttatatgttttttcatttgaggtaaggttaccatgaggcttgcagagactatctttaacccattattttaacctgataacaacttcacactgcctgcataaacaaataaacaaaaacaagacttaaaaaaactctacactttaaccttgtccctctgctttttaactttttattgtttcatatctttttgtgctatgtcttgaaaagttatagtcatttttgactggttcatcttttagtctttctacttaagagtagcttacacaccacagttacagtgttatattattctgtgttttcctgggtacttactattgccagtgagttttgtaccttcagatgatttcttattgctcactaatgtccttttctttctgattgaagtacttcctttagcatttcttgtaggacaggtctgatgttgatgaaatccttcagattttgtttgggaaagtcattatttctccttcatgtttaaagcatattttcactgcatatactattctagggtaaaatttttttccttcagcactttaagtttgtcatgccactctctttgggcctgtgagctttccactgaaaagtctgctgccagacatattggagctatgttgtaatttgtttcttttcatttgctgcttttgggatcctctctttatccttgacctttgggagtttgattattaaatgacttgaggtagttttctttgggctaaatctccttggttttctagaaccttcttgtacttggatacctttctctaggtttgggaagttctctgttcttatccctttgaataaactttctacccctatgtctttctttgcctcctctttaaggctaataactcttagatttgcccttgtgaggctattttccagatcctgtagtcatgcttcattgttttgtattcttttgttgttgtttcctctgtgtattttcccttccctccttcctttttttttttttttttgagacagagtcttgttctgtcgcccaggctggagtgcagtggcatgatctcaactcactgcaacctctgcctcccagattcaagcaattctcctgcgtcagcctcccacagctgggactacaggcacgtgccaccacacccagctaatttttgtatttttaggagagataaggtttcaccatgttcgccaggctggtctcgaactcctgaccttgtgatctgcctgcctcggcctcccaaagtgctgggattacaggtgagccactgtgcccggcctcctctctgtattttcaaatagcctgtcttaaagctcactaattctttcttctgtgtgatcagtttttctattaacagactctgattcattcttcagtatatcagttgcatttttcagctgcagaatttctgtttctttttctttcaatctctttgttaaatttatctgatagagttttgaattctttctcaatgatatcttgaatttctctgagtttcctcaaaacagtttgatatggtttggctgtgttcccacccaagtctcaccttgaattgtaataatccccatgtgtcaagggcagggccaggtggagataattgaatcatggggatggtttcctgcatactattcttgtagtagtaagtctcccaagatctgatggttttataaatggacattcccctgcacaagtccttttgcatgcccccatgtaagacktgactttgttcctcatttgccttcagccatgattgtgaggcctccccagccatgtggaattgtgagtcaattaaaccgctttcctgtccaaattacccagtctcaagtatgtctttattagtagcatgagaacagacacacagctattttgaattctctgtctgaaaggtcacatatgtctgtttctccaagattggtccctggtgccttgtttagttcatttggtgaggttctgttttcctgtgttggcttgatgcttgtagtagatgcttggacatctactacagtgtctggacattgaggagttaggtatttattttagtcttctcagtctgggcttgtttgtagctgtccttcttgggaaggctttccaggtatttgaaaggacttgagtgttgtgatctaagctatatctgtattagagggcatcccaagcccagtaacattgtagttcttacagacatactaccttggtggtcttggataagatctgaaagaattctctggattaccaggcaaagattctttttctcttcccttactttctctcaaatagagtttctttctctgtgctgagctgcttggggctgggcatggggtgacaagcacccctgtggccaccaccactgggactgggcttggttagacttgaaggcagcacagcactgagtctcacccaaggcccgctatatccactacctggctacagcctatgtttgctcaaggctctagggctttatattcatgtagcaaccccagccaggcttgtgtccttcccttcagggcggtgagttccctgagactctggggaggtctagagatgccatcccggagccagggactgaagtaaaaaactttagatatctacctggtgttctattctcctgcagccgagctagcactcaaaccatgagacatggtgcttcccacctttccctgcatgccataggcagaggagcctcaccccatggccaccatcaccacaggcccgtggggagtactgtcaggctgccactaattttcactgaaggcccaaggcctcttcagtcaacttgtagtcaatgctgccaggttggggagtaacacttcagggtagtggacccccttctggctcagggcaagtccagaaatgccatctaagagctaaggcctggaattggggaccccaagagcctgcttggtgctctatcccactgtggctgagctgatacttaaggtacaagacaaagtccactttgcttttccctctgcttttcttaagcagaaggagtttctcaccatagccatcatagctgggaatgtgctaggtctcacctgaagccagcacatttcagagtctcacccaaggcccatgatgtactacctgcgtgtcactgctggttattcaaggtccacaggctctttagtcagcaaatgatggatgctgccaggactggttccttcccttcaaggcagtgggttcctttctggcccagggtgtgtctagaaatgttatttgggagctatggcctggaatgggggcctcatgaccttgtctgtttccctatcctactgtggctgagcttataaccaagatgcaagacaaagtcctcattactcttctctcctttcctcaagtgaaagaaaggggtcacgagctgtgttgcctgtggttaggggaagggtggtgcaagcactcccttaattgctctggctggagtctcagtaggtcacatgccccccatgtctcctggcttcgagcccagctgacaactagaacttgcctaggaactgcagttgtggcctaggctgcttttcaagtttatttaatgctctagagcactttagtccaggtggccagggttgctggaactgaatgaacaattgccctctggctagggctggtgtgagcgggcgttagctgcctggttttgctttctactgtgatggcagcatggaatttgatgtagtctcatgatgagtgccctctctctcattaatcatagattttctctctgtgccttgtggtcactgctgggggatagggaaggggtggcatctgcaactcaagactgtctttcctaccctcttcagtgcctctttcagcaacatgaagttaaaaccaagtactgtgagtgttcacctgatttttggatctcatgaaggttctgtttttttgggtagatagttgttagatttagtgttcctttttggggggaccatcggtggagccttatactcggctatcttgctctgcccctctttaggatttttttcagtcaaaatcttctaagtgaaaaattttctcctacactttgcagttaaaaaaatttgtgtgttggcagggatacgtgtataaatggataatggagctggtctataaacaatgacaagcattcttttagaaaattttatcagatacaacataggaaactttggaatgtggttaagtgtattttgcactacagtggcagagaaaaaaaggaaaaagaatatggttaagtgtaaactgatactatcaaatgcttattgaaatattttgaggtgtggtaagccttaatttaaacatgtttacattcaaaagtatacagccattcaacaaggttatcgatctaagggaatggatttagaacataggggatgcttgagttgcctgttctcacgtagtttactagaaatattacttctagtagatgatgctggtaattcttgctttcttgatttacgaagattttagaaatctagcctgcaaatactttaaaaaaattgtgttgcaattatatattatctttgtaccttaatgtttagagttatttcattctttcattttacttatgaatagcagtttgttctctattactagtaattcttaatgaatctatttctttttaagaatgatacagtgtagtggttttcaaatctagctgcatattagaatcacttgggatgttataaaaatatatgaatgcctagccctgccttagagaatctaatttaattaatctgtgaagcctcagtcatctctattaccaattttttttaaaacggcgtcccactacaatatctctagcctaggctagagtgcagtggctactcataattggagacatagcagcctgcagctttgaatcctgggctcaagcgatcctcccacttcagcctcctgagtagctaggactaccggtgtggaccaccatacccagtaatttttaaatttttttttttgtagagatgggttctcactatgttgcctgggctagtctcaaaatccaagcatcaagtaatcctcctgcatcagcctcccaaagtgcttggattataggcatgagctgctccacccagcctgcttgatattttagtttaattttgttgtcggaaataataattttgttgttaaaagttttatgtcagaaataagatctgagatctgaaatattcctctttttttttaagaagctcttcgaatcagtggctcataatctttatataaaacttaccttatgtattagaccttgagtataaaaaaattttgccttgtcctgttaaaaatgtagattcctaggtctgcatttagagagtgttttagtagattagggacaggaaatgggcacccggatgtttaactttgcatcttggggatattcatgcacataatctagtccttacaccgctttgggaaacctgacccttagaagctttttcttttattcttaagagattcccatgaccctacttttgcaggtggaagagaaatacaatcttcactttgcttggaagaaaattattgaggcaaagaaaacataggtatggttttttgtggtatgatttctattgtattaatagttggggccaggcatggtggctcattcctataatcgtagcacttgggagtccaaggttaggaggatcacttgagcccgggagtttaagaccagtctgggcaacatggtaaaaccctgactctacagaaaatccaaaaaatagctgggcattgtggcttgcgcctgtagtcccagctacttgggaggttgaggtgggaggattgattcagcccaggagatcaaggctgcagtgagccatgatcgtatcctactgcactccagcctgggcaacagagcaagactctgtttaaaaaaaaaaagttgacaggttcttaaagaaataggtatgttctggttttcagaagtttttttttttcactgctagatatggcaatttttatttaagttcagagtcataggtctgactaattaatttaaaactgccttgaagatagagtgaaaaaaattgcagtaccctgttcatcatactcataactcatgtagccgagcgtggtgactcatgttgtaatcccagcactttgggaggccgaggtgggcagatcacgaggtcaggagttcaataccagcctggccaacatggtgaaaccccgtctctactaaaaatacaaaaattagccagatatggtgatgcacatctgtaatcccagctactggggaggctgaggcaggagaattgcctgaacccaggaggcagatgttgcagtgagccctgatcacgccattgcacttcagcctgagcagctgagcaagactcagtctcaaaaaaaaaaaaaaaaaaaaaaatcagtaaaaataatggttgtgtctggacctgcatctgttttctcttatttagtgttcttaatgataattgaaattctggttggtcactggcattatgatttaggattccaagtataatatttcagtgctagagtaattacctgtggtcaaccccaatgctttagattatagagtctttaattttatcaatcaaacaaatatgcactctgtactgctgttggtttactctgaataggtggacaagtaataattgagagataaatacatagaagaatacatgaagttatttattttgttacagctgcaccttttctgtatttccccttacctatacttgcttcctttacttatgtggcttagatggcctgttctttaaagtgcatagctttcttgccaacagtttttcttcctttctcccattgtctttgctcttgttgaggaaaaatcacatatttctgcatattgctacaactctaaaggcatggtttccaattatagttgggagcctctcaggtgccctgtaccttccatgtttctcttacgtagctttttatttatgtttatttaaaatctttttcactttcattaagctgccatatcctcattcagcagattagcagagcggaacttccttagccaacatcttgccaccaaacctaatttgtctgtatctgtccccatccttcctgagagtatatagcctattgattatgctcttggcagtcaggcttaggtgggttcaaatccacccttgaaaccttaggcaaggttagttaaccttcttgaagtttggtttcctaatctataaagtgagggcagtaatacttataggactcctagaggttgtaaagggcttagcatagtatcttataagtactaaattttcaatgcaaaatgatgatgataatgtaaaccgtcttttaaacagggaaatgaagggatctctttctctcttttactctaagctaagcctactgccagtgaattgggtcctatcccttttgggaccttgctgtattcttactcttcactgatttttcaaaatcaacctttctattggccctgttcctatcagcatttaaacatgatacaattttttcttatttaaaaaatcctcttttttatatcctgtatacttttgcaactactgttctatttactttcttcccatcgcaatttcttgaataacttgattctattttctatttctgttttgttcatctttcacttactcttaccattgaaatctaggtttgaccctcatcactccactgaaatgacttactagtgatttccttgtgtgaagtccagtggagacatctcattgttttaccttagattcttcattagtagtcggtttggtaggtcataccctccttcttgaaacatttttccagtttctgtggtattatttttgtctagacagtcaccaagttctatagggcctatcttacaaagctctcaaattcaccctacttaccttttctatctccatccccactaccttaatacagtccactttctcttggattatcacaacagctccttaattggtctttctctagagtcttgttccattctaatccattcttcttgttctgatgtgaatgatctttgtaaaatgcaaaacttttgtgattctccaggttaaaactccatcctagtctgactgaaaactcaggttaaaactcagtctagtctgagtccagtcttggttttatagagcactgtgtaattgattcctgtctttaaaactccgtcctagttagtctagtctgagtacagttttggttttatagagcactgtgtaattgattcctttcttcctcttgagtctcaactcttttttcactccaagtcacgccaaagctgtttgtggtcctaaagtcctgtgctttgcctaaaaacgtttctgcatgttatctcttctgtttggaacaaccccgggaaccctttcccttttactaccttttcttagctaattgtctttcttctgcctggtctctgttgaacttcttttgggaagccacccctgacccttagagatttttgtttgatgccctcctaaattatgtgcttctctctttttagcacttaacacctcgtattttatttacttaactgtgcaaataaatataattttctcagctttctcccttgactgatatcctctgttaggaaaagttctttgtctatttgttcactgttatatctccagtgcttagtaccgtaccttagcttaataggtaaaaatgaattaatgaataaatgggtgaaatcttgctggttcttcaggtatttagaactaagaaaaaagatattaaacatctttactttagcctgagtatatgtttggcttatttaagccttctatgtaaaccacaccaagtggctaatcttttcttacagttttaagccaaataaacaaaacaaggaaaatatagcttagctgtcaaacatratttttttttttaagtcttatagggacatatacatattgtgcactctaatgtggatgtagtctaccttccaaattaggatagattctgggaagagaaacctggtaaccattgtaatagaggccattgaaagaatggctatattttcaggattgttgatgaaacctttcatgcaaaagaaaataacatctgaaacacattagaaaatatacttctttctgagggctaacatagataacatatataatgaagactttttggaaagaggcaggtgtttttgtacaattgtttgaggttataaaaacttttaaattatggatgacatgttttgttagaagattgtctactctgatatatatacatttaatttttttaaaaatctagtactcttctttctctgcctttgtattctgttactgaattagtatttgtactagcagatgaataagagcaggaagagttgttaaacagactaatttttttactcgttctgctgtatttaaaagtaaggcaataaattaaggcctcatttaggttttggatcatttctgagttttagatgtaggttaactgtcccaatgtataaaatctgagctcagtattacagataaattagtatttgtaaataattatattatgaaaagaattgtatggcaagaatcttccacccatacttaacttttctgaattttgtttatgtcatctgtaaagtggtaataatacctatttcaaagggtttttcatcaagtataagtatgattacatatgtaatcataactaatgtatattcaataaatatttgtggaatgagtgtataagttaggtaataccagtataaagaataaaattaatagaattgtaaaagtataatgaataatataaggtagcaaatagctatataataatttctttacaagttttaattttgtcttgtgattttaaaatttatataaactgagcctttaccagatgctcatatacctaaatactacttttactatttatttatttatttaaatactctttaaaaaccactgtcatgtaaatgcttaagttggtctaatatgattctataaaaggactaccattactaaattgaaggaactgttgcccttgaatttgtcgtctctccagcctcctcatcagaatgtattaagaatatatagtagctgtgccagatataatggggccggtttaactactgtgctaaagcactaaaattgaaacagtagaagtgtacttacttaatagctaaagttatataactacagtaggtctaaagattagatttgttggagaaaggttttacaacatgggaaatgctttagcaactgtcactcttaagtaaaatagagataatatctaaaaaggtatttcgaataaatctctccattgagtctagatagcagctgagaattatttacaaattgttgagttccggaactggtggcatgattgcactatgtcttaatgtttaaccagaaataaatggcaataaatttgctaacataaaaaggtaaattttaaattaatcagacrggatctcttaaattgtgatatttcaactggtgcaatcttaaatatgtaccttaactaaatactttctcatttgctgttccaagataaagcaatagtggctacaaggaaggttgataaatttatatttacagtacatgggttcaaactgcgcaggtccacttatgtgcaaattttgtcctgcatctgacacccctggaacagcaagaccaacccctcctcttccttctcctcagcctattcaatgtgaggataatgaagatgaagacctttaggatggttcacttctacttaatgagtagtaaatatattttctcttccttatgattttctgaataacatattctgttctctagcttactttattttaagaatatagtatgtattataggtatcatacaaaatatctgttaatcgactgtttatgttatatggtaaggcttctgggtcaacagtagtcttagtagttaagttttcgggagtcaaaagtattttagactgcagtgggagcatctgtgctcctaacccctgttgttgctcaagggtcgactgtatttatttatttttaaaaatagacttttaaaaaagcatggttttagatttacagaaatatctagaacatattacagggttactgtatactctatacccaatttcctgtattattactatcttacagtagtatggtatggttcatttgttacaattaatgaatcaacattgttattaactcaactttatacattattgagttccttagtttttacctaatgtcctttttgtgttccagaatcccatgtaggataccacattacatttagttttcatgtctcctgagtcttcgcttggctggagcagtttttcagacttgccttgttgttgatctgaacagttctgaggggtactagtcaggtattacagatgcctctctatttgaatttgtctgatatttttctcatgattagactggggttatgggtttttgaaaggaaaacaatagaagtaaaatgccatttctatcacatgctaccagggtgcatactagcaataagatttattgctattgatgtgactttaatcacccagctgagggtagtgttggtcaggtttctccactgtaattattcttttttcctccccttttcatactgtattctttggaaggaagtcactatgcacaggccacactgaaggaatggggagctgcgttccctattcttgagggcagagtgtctgcataagttatttggaattcttcaagggagactttttctctttttcctcatgtatttatttactcatttatttatatcagtgtggactgacagttttatactttggattataatgtggtactgctttattgttgctcaaattgttccagcttttggttgttgggaacctttctattggcttttgtgtccctgtgatataaccccatcaaggtgatgtctttttttgttgttttttgagtgcttcttactttttgacactataaaatacttgacgctcattttgtatatttcctcccttagttctagaatcggccatctgtccagggaaccctagttcctattggagaatggtattagaaaccaaaatttgggtgccaaatgtgtttattgttgcttttatttagctgtctcagctgatagagcaagaaaattgtgtatatgaacccatgtatatgcacatatctataaactgagctaaacctgagttcatgtaatgactcccaactctaatccatcaccacatggatcattctagcctccttcccttgtttatctgtacaattccactccagaagtggcaatcctggccacctgtcaactatttaattatttaatttcattatatatggacatcagtatcagaattgttaattgtgaattgtgaaaaactcttatcaactagaatacagtgctatgtacagttcctcttgcctttggtcttacagatgccactcatttccaattacataggtcagcgccttttcttcctgcccctcagtgaggttgtttgagacattcgtaatatagtcagattcttttattcctgaacttgtaaataacttttaaaaaatttgtatacattaaggttaattctttgtgcttaaaaggtttatgggttttgataaatgcatggtattatatacccaacattgcagtgttatatgaaatagtttcacctcaccagtctgaaaaaaaattccctttgcttcatgtatgcaatcctcctccaaccccattgaacttctaggaactactgatgtttttattgtctctgtagttttgccttttatgaattgtcatataatgagaatcataaagtatatgtagccttttagactgaagaaaaattttttaatgttctttcctagtatctttagaaacattgatttagaataactttgattaaagtctaatccaaactttcatctcatataccacctctctgcagcatcctttgatggtcagtcattcaatatctgtttcagtttatctagttctagggaattcactagcttatgaagtagcacataccattgtttgttataacagaaattctttacttggtattaagcctcaaattcctccccagaaattctacccagtgatttggatttgactgtgggatgacttgaaataggtctgttctcttttctacgtagcaagtattcgtatcttgaatgcagtttcagtataccctcttttgcttttcagtataccctcttctttaagttttctgcttttcagttagttaacaacttcggtgctaaataggatgctcagagtgtaattttatacgtcagctacatagctttctttgaagtttcctttgccattttcatctctctccaatttatcttatacattgtgatcatattagccttccaaatgcaaatgtttgcttgtatcatcatttaattgtttaaaacttacatttactccgtattgcattagaatggtacactttacaataatttgtgaagggcatgcttcacaataatctgtggagttttaaaaaatatatagatgctctacttcctggggattctggaattggacagagattttagagagtctcctattttgtagaagaggaaactaaaagcctgataaggtgtaatatttgatattctgtctagaatgtcttaacctctttttgcctttccttttgaaatcccatctatttttcaggattcaacttgctttttacttcttatatgatgcattgtttgtatctccctgaaatgatcattttgttcataacatgcttatgcattcatcatggctagttaaattttgcatatgtgtatttctcttagagtacattaatcattaaaactctggcaaattctaggaattcactaagaattttataagctttcttatttttcaatatttaaataaacaactactgttcacacagtcacatcttcttccctaaattgtaatgatcttgaaggtagtgctgcatgttggttatatgtgcctcctttagaatggttgatgtaacagaacatacagtgaatgtgcatggtaagtgtttgaatgggttgatgcaagttcaagataatattacaaataatgtttgttgagcagcactttatactttgcctcatagtaagctaatgatccagctgagaggaccacaattttttttttttttttttttttttgggcctgtcaaggcaagttcataccatcctatacttatctggttgttttgtaattcaatgccatattttttgtttatgtagttaaatgttatcttgttgttrgtctagttttctagcttgcctgttatttcttaatcctgatttttttaatctatagtatttgctatccttctcagcttcatgttcataaatttggcaagtttgttttttatgtgttcatttaagtgttaagtgttgaaaagaattgaggcttgtatgttcctttagcatacttaaagaactcccaagatgtcataaacagaatattaaaacagtgctctaaatatagtctagaactatatctgaactgtcgtcattgaagagtcatccatctgtataactactcagctcttattttcttttgtagtttctgttttcatttttatgagcactttctgtttcttgaaccttactatgctatgggacagcattaaagatgtagaaaaatggctttcctcttaaaaaatcacasaatataataaaataagacattcattttaaraactaaagggataggtgtacctaaaaatttttgccttcaggcagtatactgtttagtgacctagggaacagccagtctcttcataaaccagccataatattcctgataatttccttttagaagtgacttttgtgagagaaaagttattatgcctcatgagtagacactataaagtaggagaaacttatcacataggtctttttaaatattctcctctttgaaggcagtaactttgcatacttctagctgtgggcagagccaataagcccagttgtcagatacgattctgtatgaagaaagtggagacttaatgctgtatttgtgtatacaacataaatggaatccatttacaactcagaaagaatatatagtaatgagtgacctgagtggtacaagtatcttaggatccttgaatgttttgcttagaaaaaaagcttttgcaattatccattttgtccattttcattttaaagacaaagaagcaagacccaaggtttaatgacttgaataaagttccatggttagttgctggtagagctgggacttgaactaggactcttaaaaagttctaaagagtgcaggtgatctctttgtaacattttcttcctagaaaagttattttcccttaaaaaaaattgtgcaatatcttatgcatataagactaatgaagtatttatgcacagttatagagtaattatgaaatcaaatagcctatagttgtttaatcactatccaggttaagaaataaaatattgatagcactttacaagtctcctaggaatagttcttcagttataccttgcccctttcctcttcccagaggtaaatatgatcttacttttgagaaaataattctttgctgttttaaaaacttgtaaccacctatatgtgtatccttttaacaataaagtttagtttttcatgcttttgaaccgtactgtatctgttcatttgtaatacattatgtttgtgatatttgtatgtgtttatataaatagatgtccattttcattgctatattaagcattcgtattagatggactttggggttattaataaggctgctatgaacatatgtcttatactgtgtatattcaagagtttcttgaggtcgtacctaggtatgggatgtctggatcttagggtatgtacatcttcaactttactaattaattccaaactgagatattctagtctgttctgagaaagctgtttgtttcctgttcacccttagttctaaggtatagcctttcaggatcccaacccaagggctgggctggtttcaaagttctctcttgataggccctagactccaactctgatcttctactgttttaagctgtcaaaaggactgctcagcctctcagtcctctcttctggatcaataaattgctccaggcaaaagtgccccaaaaacatgttttatctttctggtttccatcttcttgtggatctttacctcgtaataactcacaattttgttagctctttgatgcttttaagaactttcaaatattttctccagctgtatattggttgtcttcagggaagagtttgttctgaatttgcctcgtctgttttccagaagtgaaaatttgaaccgactgaccttttagttttagttactgtatttttaaatattttatttgcttccttttagaagctacatgctcaatttttgtagtttcctatacctcataaatatttttgagctcagcttttattcttattctttgtgtcttgctttcttgcatgcttgataattttttaatgtgagcaggctgggcacggttgttcacgcctgtaatcccaacactttgggaggccggggtgggcaggtcacttgaggtcaggatttcgaaaccagcctgaccaacatggtgaaaccccgtctctactaaaaatacaaaaaatagccaggcgtggtggtgtgcacctgtaatcccagctactcagaggctgaggcaggagaatcacttgaacccgggaggcggaggttgcagtgagctgagatcacgccactgcactctatcctgggggacagagcgaaacttttttaatgtgagctattcactttctttggaaaattacttatggattatctttgaggcccaggatgaaaacatatttctctagacaggattgcatttgcttctgtgggtatcttgattcagggttggaggtgggagggagttgtgtcccagtccagggccattgacttaaactgtagtcatgggttgaggttttggggaccacccagctaatataatttggggcagtaaatatgtattctttcctcagtcccaaggcaactctccttgggggctggagtgagggatagggtcccagcttaatggggagagactatctatcttggtggctttgtcttacgttccttggccaagtgaagtctagaaaattgagctcaagcttgcatggttcagtacctgtcctcaagccaaaagcaattttagttctccttttgcccctgtcagtttattctttcacttagattttgggcttagtatcttgctgatttgtccatacttctgaaataaacaagtacctgtttttttctttgctcattttaaattcagggttttacttattttcaatacagagttgatctttatacctggaagacatattattgagagctgaggtattagtttatgtcttaacacagaatatcataaaaggcttttgatcaccattgacttctggagttttattgaaagtgagtgggcctggcttatgccttgtaatcccagcackttggtaggctgacctgggaggatcccttgaggccaggagttcaagaccaacctgagccacatagcaagaacctgtctctacaaaaatgtttttaaaattagccaggcatggtgctatgcgcctgtagtcccagctacttgggaggctggggtgggaggacaacttgagccctgagtttgaggctgcagtgacctatgattgtgtactccagcctgggcaacagagtgagacaccatctataatgaaagaaaagaacgaagagggagaaggagagagggagggaggaaaagaaaagaaagagaaagaaagtgggagattatttgtgagttactgaatttgcacttcctgtaaactctttgagcccttcattaaggaagagaaagcatcttattatacagctcttatttcactaaataatttttaaaattttgcgtgctgcatacatatatttatcgttacgtcaccttatgtcctctggttgttttcagtatgtttaatgaggctcagtgttcatagggaaatcaagctgctctttttgagtagcaaagtataatgaagactttttgttccttggtttttatttaggaaaagtataaaacttagaaaaactagaacagtaatatgataagaatctgcataaccttcacctaaattcaccagttgttaacaatttaacattttctaatgtattttctctccttttacccttattctccttcccatctggtacaatgtacttttaaaattgcttagtcatttaaaagtaggttgtagactcatcactcatacttccgcaaatatctcctaaaaagaagggcatttccctgtataactttaaataccattattatactccagcaatttaacattggtacaataaaattatatactgcacaatctatatttaaatttttccatttatctgcaaaaatgtcctttatagctgtttaaccccctggggggatctagcccaagattatgcattacatttgcttgtcatgtccttgtgtcctttaatctagagcatggcttggcaaactttcttaaaggaccagatagtaaatattttaggcttggtggataatgtggttctattgcagctcctcctctttgtcattatagctagaaagcagccatagaaattatgtaaacaaatgagtgtggctatgttccaataaaactttagttagactcctattgtaaaatagctgtccctctttttgttttttgagacggagtcttgctctgtcacccaggctggagtaagcaatggcatgatctcagctcacaacaacctctacctcccgggttcaagcagttctcctgcctcagcctcccaggtagctgagattacaggcatgcaccaccatgtccagctaatttttgtatttttagtagagacaggggcttcaccatgttggccaggctggtctcgaacccttgacctctggtgatccgcctgccttggcctcccaaagtgctgggattacaggcgtgagccactgcacctggccctcttttttgtttttaatgacactatttaatgagttttgaagaatcaggctgatattttggcagagtgtccttgatatggatttttaaaaatgtttctccattagtttttttagattacaaatgcccatggaatcttaagggttattaccacagtagaaatggaaatctagtttttttaaaaagattctgatgcagttgaatataaaatctttccttctgtttctgtctgcctgtctgtgcctccctcctgcacgccttccttccatccctccctgattattgtgtatgtaatattactgcctagaaattggacagtaaaattaacttataggccgagcacagtggttcatgcctataatcctagcactttcggaggctgtggcgggaggagtgtttgaagccaggagtttgagacgagcctgggcaacaaagcgagaccctgtccctacaaaaaaaaccaaaccaaaccaaaccccagagaacaaaattcgctgggaatggtggcatacctgtggccctagctactcgggaggctgaggcgagaggatcactttagcccaggagtttgaggccgcagtgagctatgattgcaccactgcccttcaacctgggtgagcgtgagactccatcaaataaataaataaataaataaataaataaataaataaataaataaaatcaacctccagattgctaattccttgatgttctcttcagatgtcaggatttttacctgtatactctttcatataaatgtttttatattcatgaatataaataattcaagaggacttgggtattgaaaagtagtaaaaataacttagataaggacttgaaggggcatttatactttggccaaatatataaagctaaaatgtctttctgtttgagatgtaaaagtaaaaacagttctggttgggtgtgggggctcacgcctataatcccaacactttgggaggccaaggtgggaggaaagcttgagaccaggagtttgagatcagcctgggcgacacagcaagaccctttctctacaaaaaatttaaaaagtagctgggcatggtggtacacacctgtcccagctacgtgggaggctgaagtgagaggattgcttgagctcgagaggtagaggctgcattgagccatgatctgacgttgcccacctgccagggtaacacagcgactccctgtctcaaaaggcgaaaataagaaaaccctaattctttgacacaagtaagttcactgttgttagcattgtgtaagatttagatttagacataaataacaaataattttaatagatttaatacaaagctatccttacggaaaaggtataactatgattttatccaggcaaaaatatgtgtaattttttttttgagttattctattctcttgcttggttcagtgagtagcaaaagtaaaagtaggatatttattggaattaaagagtttcaggtttttagtgcttgaatttcttttaaatatctgtctgaacatctatggtgattgggtgctatcctaccatcttttattagttttgactgagacaaggtttttcttcatattgtgtctttatcacaatttgctcctggtttgaccctttatactctataaaacaagtctatttttttttttcctgcatagctgtttgttaagtaaaaatggaagtggtattctagtggaggttttcatttcttgactaaatattctcagggtctttaaccattcctcacattgcagctccaccataaatagcttgtatgatcttggggagttacttaatctgtgcttggtttccttatctttaaaattaagaatgttggtactgggctcataaatttattgtgaggattgagttattacatttaaaatgcaacatttgtctggcatgtagtacgcattcagtaaatgttagacaccacagttgacccttgaacaacacagggattgggcatagacctcctgtgtagttgaaaatccatgtataacttttgactcccctaaaacttgactactaatagcctactgttgacccagaagctttactatataacataaacagttgattaacacaaatgttgtctgttacatgtactttatactgtattccttcaacaaagtaagctagaaaacagaagatgttattaagaaaatcaaaataaagagaaaatacatttactattcattaagtgaaagtggaccaacctaaaagtattcaccctcattgtcctcacgttgagtaggctgaggtagaggaggaagaggtggggttggtattgctgtctcagagatgtcagaggtagaagaaaatttgtgtataagtggatccacgcagttcgaactgtgttgtgttgttcaagggccaactgtattgttatttcatcttacattgtttctcatccatcttgtctatttatgaacctgtttgtctttcttaaagcgtagctgaatgcagtgacagctgtgatctgatcagcccagaaggagtagtacagtcggcacctcccccattaatatgggtcaaagggctgggcgcggtggctcacrcctgtaatcccagcactttgggaggccgaggcgggcggatcacgaggtcatgagatcgagaacatcctggctaacatggtgaaaccccatctctactaaaaatacaaaaaattagccggatgtggtggcgggtgcctgtagtcccacctactcaggaggctgaggcaggagaattgcctgaacccgggaggcagagcttgcagggagccgagatcacaccactgcccactccagtctgggcaacagagcgagactctgtctcaaaaaaaaaaaaaaaaaaaaaagggtcaaagttggagttgatttttaaacattcattgtggagaatttaaaacataaaaaactagatggactagtatggtggaccctcatacacccatcctccatccccagcaacacaaccaatccagccgtatttgtacttcatctagttcctccgtggtataattgtagctcctctattacacttagactccatgcctggtttatcttgataattactaatgcttttagtataatgctttgttttctaagtagataattgttgaattaatgaaaaattgaatcttgccttggatttatgcctggatcagcttctgtagtttgcttgtgtaggtgggtgagcaggattgaaaatagatttgtctatatttactgttttttagatgtcaccccagttttgtttaaataatttcttccatatctgctcatggatatatatggtaatcttactggtgcagtgtctgagtatgctgggaaataattccaattatctgggatagaagacttgaatttactattttcttagagtcttcattattttgagcttgaagactttaccaatgtttatcataggccttccaatctgataatcattttgtcttaactaaatggaagcagaattgaagaactgtactttatttgccatctttgttggaatttttttttaagtcagatttattgtggaaaaatttacatactgtaaaattgtggtaatttgttggcttcaaattagaggcccttcttcccagtgtctgtttgctccaaacctaacaaaaagacggctgccaatgtaattgactgtagcacctttttcaagcttgtttttttgtaaccctatttttacttgtgccttattagttgttactgtacctacagcatttactgaagttttaatagattcacagttgtttttaaagtgataccgaagtgtgtaactcctgcttaaaacagggatagaggcaatataagtctttggttgtattcagctggtgggataggaattctgaaggtgaagtatgacagttaagagtattatatagagaggacagcttctagcattcagatcactaccatcaccctaagattgagcctatgtgagcctgcttagtagaaacagccagctgagacagtatttgtacactgcatacacctcaaagcaaaagaaggcttagtgaaagtgaatttagatttaccctctgtaatttatccagtagtgacttagtatagctctacctttcccactcatagttctagttttaaatgaaatatctctagctggagaggagtcttgcccttcaatgttagcagttttaccttaattattaaaaatttcatcaaggattagttaacaaggacttgaaaacaagaataagatttgttttagagaggaggctgtgaaaagtattctgatagagaacatcatgttgccatgacggcctgtgaacttcaaaactgcagtatttcacctttgatacttctgctgtttgcttacttcagaacttaaaagattcgcagaatatctattcctttagaaaatatttattgaacatctatgtgctgggaagtatgttgcatactagctaaacaaaacaatgaacaaaacagatgaacttgccattatggagtttagtctagtaggaaacaaaatgaaagttatctgaagccatatagaaaaattgtgctttgcttatactttaaggatttaaccagttattttaaagtgaacttggagtgacttttccttgagttgttttgcaaaatgtatttgagcattcggagctttgggtttaatgtatttctctatgtgtattgataatgtgaagttaaatattagagaggcaggacaatttaaacagagggagaatattagaatagatgtattgtagtgagatttcaggataatgacatgtaatatatttgtgtgggtaaaactatatgtttgttgtgccaaatggacctttgcaagcaggaaagtataaatatctttatggcctttcttctctttaaatgattaatacttaagaattgaacatttgtctttatctttcatgcagaggaaaaaaacagcagatttgttgatggaaaagtaaacctttaaaataggaaggagggtataatagagcaaatggaaatcatgagactaaaatcacattggaattatgtgacagtgtcatgtgtctctgggcgagaaaacatacctcagatttccctatttcaacagagtacaaccaagtgcctgaattgagtgattcctcctagtattaagattttatcattttaattatattttttttatctagcagtttcttaacgactttgattgttggaagatcaaaatgctcttttattttggtacttgttcaggttcaagaattaaaaacttaagatgggggaagaaggctttgctttctctaactcttattttctgtaggtacttcgtaactcaggaagacctcatttattcccagtaatatgttttactaaactctttcaggtaactcttaaaagactgtgtgacttaatagtagatcatggcttgaactcagtttttatttattgttgttactagaaaatttttgtgaaatatttttctttgtctctgtagttatcagagactattacagacgattgctgtactcgaggctcagcgttctcaagcagtccaagaccttgaaagtttaggcaggcaccagagagaagcactgaaaaatcccattggatttgtggaaaaactccagaagaaggtatacattgaactgtttttaagatttactaagatctatttgggaatagcttaagagaatttggttaattcttttttatgggtatatactttttaaaatgtttaatttttttcgtctataattagccgtactacttaaggcaagataccaacttcttccacctccaccaggcacacaataaaatatatccaaatgaaaatagctagaagcttttattggatatttgtatgggaacttgtcctattccttagccattttttttctagcttttcctgttatcttccccttctttgagtatttttcctcctctgtttcaggacttagggattaataaagctaaaagaaaaaagtacttcagaattgattaactacttctgtttctgggctacttttgcacactagtacctttgtgcattttgagagagaaaacaatggtgatcaaaacaaaatctattttaaatatctttagagttacgatagccaagtccatgaggaagaagtataaattttacttaattttaaaatgctttttttaagtgggaaaattctccataattttgtttttctgaaaacagaactttcgtgtttaatacttaaccacttaaaagcgatacaggtttttataatgagtttcttggtgtgtaaatatggagatgatcttgatgtgcatttgtgctgtaatagggacccactaattgttcattaaatttgagaggtataatgttaatcagcattgtatgaaaagattaaaactgaaaaatgatgaaaaagaatcctcttcttaaaaaagaaacgaaaccttatcttgtatgacaactttagtatctttatgagttacctgtttttagtgagttacaaaagtggtctaccaggtgttaggagagcagccctggggactttatttcactagttgtgttaatttattatttgaattttcctaggtatattatttagttggtaaacatttctttctcttcatgcttttagaaaacattgaatatcgtaatagatatagagcctatatgttgatttgttaaaacttctaaggtttttagaattttggtgtaccttctgtgttaaaatgaggcccctttaagtgtttattgattctgcattgctgttattaaataatttactggtacaaaaagatataagacttataatggttatttacaatggattcaactaaaacagatggtgttagtaaagtaaaaatttgaaacgaaatttttactttactaatgaaaaatttgttaaccttaatttcatttcatttactttcccgggtaggcaaaaagatgcaattaggcatatttactagatttgcatgcagttgattatttcctgattcttcactttcaggtttagtttagaacggactttcatttctttcttttttcttttttttttgagatggaatctcactaggtcacccaggctggagtgcagtggggtctgatctcagttcactgtaacttccgcctcccaggttcaacagattcttctgcctcagcctcctgagtatctgggactgcaaatgcactgtactacacctggctaatttttttatttttagtagagactgggtttcaccatgttggccaggttggtctgaactcctgacccgaagtgatccaccagccttggcttcccaaagtgctgagattacaggcatgagccactgcgctcagcctagaatggaatttcttttcactttatttcagaaataaagatgtgatgttgaccatcttaataattttttatacaattacatggaaatatattaaattaagatattttaataaccatgaggttatcagtgtctgggacttaaaaaaaaaaaaaagaaaaaaattaccatgaaagtcctatgttctttggaaaaaaattttcctactaggtttaatttaaaagattgattcttctatttttctgggtttgctcatgccaactcaatttgcctattttatttaggtttatcatattagttatgttgttgactggtaacttgtttgttttagtggacatataaaaaattcctcctagttcatattaatgaaactggtgatatatattggtatatggaatgcagagaacatttatgggttgttagttttattttatattactatcattattttaaaagacactgccctccaactagaagtcgtacttaggttttgctaaattcatttctttacttatcatctttagcatttaatatttagactatattaattaactttattgtctcttggatttaaacatgaatagaaatgccccattgattatttggatttggagtcatctgaaaatttgactgtggtggattatttctttaattaaatttagacttttactttattttgttttttctcccctgcctccaggctgatattgggcttccatatccacagagagttgttcaattgcctgagatcgtatgggaccaatatacccatagccttgggaattttgaaagagaatttaaaaatcgtaaaagacatactagaagagttaagctagtttttgataaaggtaagaaatcatatgataagaatttaagtagaaaamtatctggcaatgttttgctttaacagttctgtatgtggtcttatttttcagtaggtttacctgctagaccaaaaagtcctttagatcctaagaaggatggagagtccctttcatattctatgttrcctttgagtgatggtccagaaggctcaagcagtcgtcctcaggtaagcagtgtgaaatattggagtaggagaatttgaattttagacaaaacaatttaacattttgctggtttgtgttcttaaaattaaagcagtctttcactggaagataaaggagataagaactttgaaattaagagaaacttaggttggagtcctaacttactagccgtgaaccttcagacatcatttacgttgaagtctctaagctgcagtttccttttgtataaaatgtagttgatattacctatcttgtagggttgttggtgagggttaaataggtagtatatgcaatgtgcctagtacagtatccgacacatagtatttactctaaaaatagtagttcctttgtgtgtagtgaaatgtgaccaggatttgagtcctggccttgccactcttagttagatgaacctcagtggacatgttacttttcaattctgagcccacatttcctttcccttttttaaaaaatgaagttacagtactattatgtatttcacaggattgctgagagtataaaaccaaacaaaataaaataatgtgaaggcattttgtaaacagttaaaaaaaaagcatatacattaaaaaacaaatttactcaaatattttgaaattaatttaaaaattccacaatttgcgtgttatttggctatatcaaaggataggtgttgttattttctctctgacaaaagccttgtcttatgtgcagatgataagaggacgcttgtgtgatgataccaaacctgaaacatttaaccagttgtggactgttgaagaacaggtaataaatatttcaaaatcgtgtaggcttaaaaaaacaagtaaacagttaacatcagagtcagtattatgaggccaggtccagtggctcacgcctgtaatcccagcactttgggaggctgatatgggtggatcacttgaagtcaggagttcaagaccaacctggccaacatggtgaaaccctactaaaaatacaaaaattagccgggtgtgatggcgtgtgcatatataatccyagctactcgggaggctgaggcaggagaattgcttgaacccaggaggcagaggttgcattgagccaggatcatgccactgcactccaggctgggcaacagagtgagactccatctcaaaaagaaaagagcctgtattttgagtcaggtgtatattgttgtatgtgatgcctgttagccatgagttttaaatatttaggcttatttttgtatacctttttgcatacgtcaagaattttggattttgagaatgtgtaaacttttgtttggggataattttaaaagaaggaacctgggttttgagaggggagtagaagtggatagaataaaatagatgtttttgtaatgtagctttgggagagagaaaaacctgaggccagtaaagctgagcttcaaagtgcattcttatttttgttgtcgaagggaggtgaggaagtcaagtcagttttggcatacagtttagaattgttttttggctaatggctagggttgttagtgggtgaagtttgaggcacatctttgtctcatatggctattaaccccacagctatacrtttaacagtttataaaaagctttgggaaatctatttatttcaagcatccagatttttctgcatctttaggactatgagaagatacaggagacaagaaggaatattaaaatcaaatatttgaataaaggaccatacaaaagaaggaaaagcctcttttaatagtcgaaatttaagtgaatttacacgtttttgttaaaactgtaggggaaagaaaagtaagaaaagattgaccatcttttcttggatttcagtggatttagtgatttcagtggaaatcactaaaatgtgtaatctaccaatttgtttacttattttctgttttcttatgagatatttttacttatgtgaatagaaaacttttctaagctctttcataagtttattctctaatttcattgttccctgtgaagtcttaagtttctaactagaaatttttcctaccatgaggatttctaattacgtaacccccaaaggtgggagagagtattacattttgaaatgaaatgtgaatgtatttatttagaaatycaatatttaaaattaaatacatattttcttaaatttggtcttgggtatggcttagaaaaagctggaacagctactcatcaaataccctcctgaagaagtagaatctcgacgctggcagaagatagcagatgaattgggcaacaggacagcaaaacaggtaattgaggagatgactgcagattgctggtatgcttttggtagttttttaataaaggagaataatgcagctgacattgggcgatctgccataacactttcagctacagagtgctgtagtatgtggtgtttttttaaaaaaattgtatatattttcgttgatttcagaaacaacttgagatacttctgctttggatcattacgaaatattaaaaaatgaacatataatggacttaatttctcttgaatgcttactaaatatactaattgtatactttttggttatactgagcaaacagatttgtttcattgccttagtgtttcctggttgtctttctaaaaatgtatcttgcagtttactccttcatattcccatctatattaatagatgtgtttttatactacaaatgtaagtgttcacaagttgaaatatgtgtttagctttagaatcaaatttaaatttacttgaataatttttgtttggcctagattttaaaatatatgtgtatttggtggcagtttattgttaattctagattcatgatgagtattgaattcttagcattcrttagatactcatgtacgttttaatttttaaaaacgactcaggtattgtatgtcatctcattgtgttaagagacttgtcatgtttccttaggttgccagccgagtacagaagtatttcataaagctaactaaagctggcattccagtaccaggcagaacaccaaacttatatatatactccaaaaaggtaaaagaaaatacatgaaagtaaactgtagattaaatttattaaagtaagaattgctatgtaaaaatctacacatttgacagaatagtgttgtattttaaaacttctgttcattctaagcatttccttatattgtgcaaaagtggagggtaaggactccattattgctgctcagtgaaattcatgattcttcattattttctttggagtaatgtgaatgagtgctacttgaaagattttagattcaaaatatgttagaaaggcctttgtgagggtaaagtttttaggatatttgattatttaataaatcaatcatttaataaatttaatagatcaatttctgttttgtagataatgctacataaatccaagaatagaaaggtttattatgatattctaaagccaggcacagtggtgtgcacctgttgtcccagctacttgggaggctgaggcacgaggaacacttgaggccaggagtttgagtccaacttaggcaacatagtgaggtcccgtatctttaaaaaaataaaatattgtatttaatcctttctacaattcttgaaatataagtagtcttatcatcttcactttactgacataatattaatagctagctgttatattgagggctctgagccagactctactgttctataaccttttatttggtaaggaaactgggccctcaggtatgttgagtgaattatctagttgcttagctgctaagtctgggaaccactgattctctcccattctgatgccacactttttccacttttctctgttgctttctacagtggagaagctactgtttctttcccaaacaggacactacattaaaatgtagccagtttcggccgggcacggtggctcacgcctgtaatcccagcactttgggaggccgaggcgggtggatcacgaggtcaggagttcaagaccagcctggccaatatggtgaaaccccgtctctactaagaatacaaaaattagccgggtgtggtggcacgcacctgcagtcccagctgttcgttcttgtaatcgcaaaaaataaagacacctaattggctgttttaaattttcttaataagttatcctgttacttttccctccccaccactgacatctttctcataaagagaagctaagagtatatctagtgctgttatccttccatactgaagctatttcatgtaattttacattaagaatattgtctatacagtttcatgttttacacattaaaaaaaaattttttttaaccgagctttggaagcttgttttaatttgccaattgttttaaatattttgrgtttcccaccaaatatagcacaacctgtgtagatttgtagagttcatcctataactgtggaatattggaaccttacattaacctgtgtttaatgtaagagctcttattttcatggttaatttctaagctaattttatagatgtaaccatgttttcatcattaacactggataatgataacaaaaggaatactggagaacgtacatgtgtttttttcccttaggtgtactgtattttggctgtgaagatctagtacagctatatttacaatgattgcttgccattgttagagtttaaatttggaaacaggtgaaatgatggttcttcatgtagctgagggtgttctttgtgactgtgctattgatcaagacaggcaggctgcatagtggtggaaagtgagaatttgggcaccacataggcctagtttataatcctggttctaccactatctagctgcaacacactgaacaagaaacttaacctccctgtcctcagttttctcatttttaaattagaggtgatgataactacgttataggaatgttgtaaggattaaatgacattggcatagagcaagcttgtccaacccatgacccacgtaccacatgtggcccacgacagctttgattgtggcccaacacaaattggtaaactttcttaaaacattacaagaaattttttttttgtttttttttttagtgttagtgtattttatgtgtggcccaagacaattcttccaatgtagcccggggaagccaaagattggacaaccctggcatagaataagcagtcaatcaatgttagataagtattttcagatattcataatgttatagaaattttccttttactttttactggatagttttatgtctggcataggccacttcatcctgtctgatcttctataagatgatcataagaattcagtgcagccagcatttgactgccaagagtatgataaatgctggggatacaaatataagctagatattaaacatgtggtccattttaccgytgttggggtatttcccctacatttaaaaaaaattttttaaagctagttatgctttaaaaacgcagaaaacagaaaaagcaacaacataagagtatgctaaaggatagagtgaaattcttctgatagacttgttggaagtaacatttgtatttttatatttttgattcttgtaatgatttttcactgaaccaattaaaaatttgttttcttacttagtcttcaacaagcagacgacagcaccctcttaatargcatctctttaagccttccactttcatgacttcacatgaaccgccagtgtatatggatgaagatgatgaccgatcttgttttcatagccacatgaacactgctgttgaagatgcatcagtaagttatacacatcaagttgttatatacatcaaggtatagaagagagtaggattttctaattatttccactcttcagagaatgttggtttcttttaatgaacaagtcaaatgtatagtttttaagtaatgtacttttgtgaggaaaatttcaaacatatacaaaaatagaatagtataatgaaccttaacaattatcaacatgaagctaccttattttaatctctactccctacccacctcaactctgctctggattattttggagcaagtcccagatattacacaatataattatcatgtttataaaaggtaatttgttatacagtgaaatatatagtcactgttcatgattttttttctaatttcttcatttgggtttggatccaaataaagcccataaatcacaataggttcattctccctctttcactttccttttttccctctcccaatgtttttgttgaagaactggttcatttgtcttatagaattttgcagtatggattttattgattacatcttcttgtcatttaatctgttcctctgttttctgaacttcctgtaaattcatagtaggtcaagagcattgatgagattcagatgtatttgtttgttagggtgggcaggactacttcacgtttactttcatcagcctggttgtctctttttttggcataacagccactgatcattgactaaattgattaattcattagatgttacagaatagtgattatgctatcatttcttcatttacttgctggactattctaaaagtaatccccctgccccctagtcaactatttggttactctgaggtacatatagaaaaggtgggataattgctcaattctcccttttttttctttttctttcttttttaggcagagtctcgctctgtcgcccaggcaggagtgcagtggtgcaatctcggctcactgcagcctctgcctcccaggttcaagtgattctcctgcctcaggcacctgagtagctgagactacaggcatgtgccaccatgcccggctagtttttgtattttcagtagaggcgggggttcactatgttggccaggatattctcgatgtcctgacctcgtgatctgcctgcctcggcctcccaaagtgctgagattataggcgtgagccaccatgcctggcctgttttctggtttttaaaataatgagttcattttctcatatccttcaaagatgaccaatgaggtttaaaaattttttgtattcttatgaactattggccctaaatgtatttaatgtatttcaattcattgatgttactgcctttgttagtgttcaaagtggcccatctttggtttgttgtagcctatttaagttggcttataagttcttttgataagactctaatagtgtttaatagcttaatacccatttttaacaaggaaaatccaggctcatcttgtatatttcctgcctcagacccagagtcagtccttctttttactgggaaatggtatttagagactatatcctgactgtaggaatgttacttgctgctgggttcatcattgtttgtaggcctgttaatggacagagctgggaaatatgatacatttttattttatttaaggatgaaagacatcattaagttcatattttaattgcaaattcaacttaagaactctaggacttttatctaccctaatcgatcttaaatatgtatctcctttctgcgggttaaaaatcatagttctcaatgacatcaatgtaatacttacttcctttgtctcacactgcccagaacaatctcagaatatattaataaccaacactactattaatatggttcctgaaaacagtttgtttttcagttctttattttgccatatatatagatatatctatataaatctatatatatctatatataaatctatatatatctatatgtaaatctatctatatatatatctatatctatagatatatatatatcccactacagaagtaaagtcaaattggtttttaaattatcttggaataaataatccctctcactgttgccatggttggatattaatttaggttaattcactttattttactttacatatatagggatttctttttgttgctgttaatattttttattatttactattcctgaaattattttctcaatacttaacctgattctgattccttgcttaaaaggacataaagatcaccctatatcttccttaatactctgattatatagaattggaaaaggatattttaatgaaaagttatcaaataaaagtaagctcctttgttctatagctagattaatcgaatactgattgtatactttggcatcaaactaccttaataactgtattcataaaaattttaaaatttccttttaaacttgtcttttgaaaaatgactactatcattgctgtgttttaaacagcatttgtgtataatttcatactttgtgattattagaattgtacatctgagaaatatttatttaaacttactatttatcaggctttgctagggattagatacgtagttatgaacaaaatatgtctgatctttgtgctcataaattttcgtctatgggaggagataaatgtgtaatcacatcagtaaatcacacatttaaaaaagtacttcagaccgggcactgtggctcacgcctgtaatcccagcactttgggaggctgaggtgggcagatcacctgaggtcaggagttcaagaccagcctggccaacatggtaaaacctcatctctacttaaaaaaaaaaaaaattagctgggcatggtggtgcatgcctgtaatctcagctactcaggaggctgaggcaggataattgcctgaaccygggaggcagaggttgccaggagctgggattgcaccactgcactccagcctgggcaacaagggcaaaaactccagctccaaaaaaataaattaaaaaatgcttcaaaggaaaaagagatgctaacataattatttaagaggtacttaatttagattgagagtttcagtggaagacctgagagggtgacagtgaagatggtacttgaagtatggataaaaattggccagatgaagagtggtggtggagtacttaaaaaaagtacaatttggctaggtgtggtggctcacarctgtaatcctagtactgttggaagctgaggcaggaggatcgcttgagcctgggagttcaagaccagcctgggcaacatagtgagaccccatctctacaaaaaagaaaaaagaaaaaattatcagcctggcatggtggtgcattcctgaagtcccatctactcaagaggctgagatgggaggatcacttgagcctgggaaattgggcctgcagtgaacctggatgacgccactgcattccagcctgggcgacagagggagactctgtcttaaaaaaacaaacaaaaaggccgggcgcagtgtctcacacctgtaatcccagcattttgggaggccgaggcagatgaatcatgaggtcaggtgttggagaccagcctggccaatatggtgaaaccccgtctctactaaaaatacaaaaattagccaggtatggtggtgcatgcttgtagtcccagctactcgggaggctgaggcaggaggatcacttgaacctaggaggcagaggtttgcagtgagccgagatcgtgccactgcactccagcctggaagacagagtgagactccgtctcaaaaaacaaaacaaaacaaaaaaacccaaaaccctcagaaaaacccacaaaaaacaaaacccaaaggtacagtttgacaaattggcaaaatataatagagtggattagatttgatgtaatttttgttgttgttgagtttatttatttaaaaatgagtgccagttcaaattattctgatcactttaaaatagctactcaagatgtatatttatgaagcatctggtggaaaagtttatagattttagtttctcttttcaaaaagcaatagatagaacacttacttacatgttatttacccgtggcttcgaaatctgtatacagttttagctccatttgatattagtcccctttaagtaagtttaaagtgattatgattaggaaatctatgaggctttaaaaaatttttcttttaattttggtgaaatacacataacatgaaatttaccatcctcaccatttttatagtatacagttcagcaatgctatgtacagtcacattattgtgcaaccggtttccagagctctcagcttacatgactgaaactctgtatgtattaaacatctccccagcacccctttttctagcctctggcagtcattattctgctttccatatctataaatttgactactctacatacctcaaataagtggaagcatacagtatttgtccttttgtgactggctcgtttcacccagcgtatggtcttcaaggttcatccattttgtagcatgtatcacaatttctttcctttttaaggctgcattatattcccaatattgtatgccacattttgtttatccattcatttgttgatggatacttgggttgcttccaccttttggctattgtgaataatgctactgtgaacataggtatacaaatatcctgctttcagttcttttgggaagtagaattgctagattgtatggtaattttatgctaaattttttgaggaaccaccatactgttttccataggagctgtaccatttacattctcaccaacagtgcataaggattccaatttatttacatccttaccaacactggttatttatttattttttttttcagtagtagccacctactgggtgtgaggtgatttaacttttcttaatcttagccttgctgatcacatttaataatatccttagcatttaaatgcaaatctaaaaatttaaaagtgtttacactctttgcatttgcaaaatatctgaattaagtaaatttcattaagacgtgtcttactatattatctaattattcgggtcacttatttattagtgtatagcattacttaatgttgtctttctcagtggtgacatagtatggtaataacaatcatcaaacttctttagttgacaagaatttgaaatggatagtggggccaggcgcagtggctcatgctgtaatcccagcaataagtgaggcctagatgagcaaatcactggagcccagaagttcgagaccagcctgagcaacatgacgaaaccccgtctctacaaaaaaaaaaaaaaaaaaaaaattagccaggcttggtggtgtgcgcctgtcatctcagctactgaggaggctgaggtgggagaatcacttgagcttgggaggtcaagtctgcagagagccccaccattgcactccagcctgggtgacagagtgaaaccctctctcaaaawaataataataataataaaataataaaaataaaaataaaataacaggaaaaagtgggagataagatagatgaagtgtgaaattgtgaagaatcttttattcagccaaagactttggacttgatgctgtagatagtcaggaaaccattgggaaattttaagtaatggtaaggggcaaaggagggggtggatactagaggaccgatttgaaagcgattgtagaaagtattaagaaatgacaggatttgttacattcgatataagacagagtgaataactgaggataggccaggtgtggtatgcctgtaatcccagcactttgggaggctgaggcaggcagatcacgaggtcaggagatcgagaccatcccggctaacacggtgaaaccccgtctgtactaaaaatacaaaaaaattagctgggtgtggtgacgggcacctgtagtcccagctacttgggaggctggggcaggagaatggtgtgaacccagaaggcagagtttgcagtgagccragatcgcgccactgcgctccagcctgggtgacagagtgaaactctgtctcaaaaaaagaaaaaaaagaaaaactgaggataacacttagatttctgacttgggctgctttgtgtaagcttttgtttacttgatataaaataaacatagcacttaatacctaatgtagcaggaggaatgggtggggtagggcttgtctggtccgggattgggaatttacagarcatggatcagagaattggggatgcttttaggaaataagtgagcacgggatcagtcataaggtagcaaagaaaagaaatggaacctgggtggcagagcacaaatgaattgggagaataggaagcagaatagtgattagaaatttcaatgaggttaaaaaaataagctgattatttggggtgagaatatgagagaagtaggaataacagtggaggtaggaaatctaagcttaatatttgggatgtaaaacacttatagttgaaggcaaggtccaaggtatggctgttggagtgggagactctgagaaggaatgaagatgaagattatttcagtagaatcagtgtaagattagaggccagaaatagcgagttgggcatctgtgataatcttgaagttgtctaggatgatgaaccacagtgttgtcagcaattttaaatagacaaattttgcatgttaatactttgagtagaaagctacttgtcaatttgggaggtgggggatggtcccgaacatatgtatctaaaagttcggaatcataaatagactttataccttgaaggccagtttattaagggatacttcaacttaatacatttattttattttttaattttgagacggagtctcactctgtctcccaggctggagtgcagtggcacagtcttggctcactgcaacctccgcctcccaggtgcaagcaattctcctgcctcagcttcccgagtagctggtattacaggtgcgtgccaccatgcccaactaatttttgtatttttagtagagacaggcttttgccatgttggctaggctggtcttgaactcctgacctaaagtgatccgtccacctcggcctcccaaagtgctgggattacaggtataagccactgcacctagcctacttaatacatttatatagtttttactgtttatgtctcttacagtccattctaaatagtcgtctttgtaactcagttcatcttgttgagtaggagagaaatgttctactttgatcattgggagtacagagcaaaaaacaagagcagaggttggtttgcttgttattaagaaagtgtcatgtttacaggagcaaatgtaaaaatctgttagattggagaagaggaacttccttaaatgagggagaagtagattacaagtcactcaagtaaccgtgaaaatataaagatgggattgggtttgcaatagtgtgtgacagaggtggtaatcatggccgtgcttcccttttacctgcattgaagtagtctgctacaattcagaattactgttgtgttaaaaaaaaaaaaaaaaaaaagtccaaaagcattagtggaaaatactgctaataacagcactaattttctatgagtactaagagatattttaaaaatgaaaaatatcagtagaaaaatattctgtatcagtattacttacacttaattcattttaattaccaaaccaacatttttttttttttttttttgataggatgacgaaagtattcctatcatgtataggaatttacctgaatataaagaactattacagtttaaaaagttaaagaagcagaaacttcagcaaatgcaagctgaaagtggatttgtgcaacatgtgggctttaaggtaagttctatttaattttaggaattcattttatttatttatttatttagagacagagtctcactctgttgcccaggctggagtgcagtggcgtgatctcagcttactgcaacctctgcctcccgggttcaagcgattctcgtgtctcagccacccaagtagctgggattacaggtgtgtgccactatacccagctaatttttgtatttttaatagagatgggggtttcaccatgttggccaggctgcagtattcatttaattttaaaagggtgataagagatactttaaagtggtttctgtagtgttaaactccagaattgctaagcatgtaggaaaaagttatcttttatcccattcatttatgcaaagcagtggtgccatcgttcctgatgtgaagagtttattatttagtagagtgaagacagacatacaggtagctatcaattgaggtaaaatgtgaggggcttttgtttagccgtttctctttttgttgctgttgttcatgggtcagaaatgggtttttttccctttctgattgagaggctaatagaaatgcatatactcattctgcagaattttgtaatacacattatgttccagtcactttgctaagtgctagagattcagcagtaaacaagacagactcagttcttgcccttactctgttttcattctcataaggaatttagagaagttaaacaaaatagttgagcgtggctagagtacatactagagagtagttagaggctgcttgcaccgccttataaattttgccaaggagctcacactatcctgagaggttggtggggggaaccattgaatgattttaagcagaaagtaacatgacatttacgttttggaaagaatcattctagttacttaaactattgggggtgatgatctttaggaaagcagtgggtttggaactgaccagcttttcccctcatcattttggccatagtatggaaacttaattagaggaaggcaagactagagtcaaggaaactggttagagattcttttgataatttagacaaaagaggagggtgtcctgaacttgactggtggccatggaaataaagattggcaagtttgagaagcctttaggcattagaattgacttggttggactggaggaagtaataatgagaccataaacttggtggtgttggtgggtgcacatgaaagtactgatgtgtgctgtgactggtaaaccaaattaaaaacaaagttatacctttgatcctctagagtagccagtaaccatactatattaaatgattttccctcttgatctttcagtgaccctgtttctccaatagagattttcctaactggcagctctggcctttcagaaaaacttgcttcacttctcctaattttgctgcaaaacccagccatggcttgtttgccattctgtcagccactatagttgaccagatgatcaaagaaactagaaatgatagatcctttgatttccaaaagtgcacagaacacactgaggactgtcacaatgccaccacgctgagaaagagctagatctgcctttttgacatgatgggcattggttattaggagtctttaggctttgggagagcgattcaataagagataaaagtttagacagaatttcattgttgcctgggtttatgttagccaagagaacctgctaaaacaattctgtatcaattaccaacagtgaagcactacaggaggcagctgtggcattgcttccttaaccagtatttggatagttttaactatggtattaactctctgtttctcaaccatagtcatcatacagtggtctgaggtacctttcaagyagatgattacaaataacaaaacacccaagttggagatgatttacttttaaaaatttttaaataaatttaagctgattgaagattatcccttccaatgttcctctcactcacccatatcttgatattgagtggatggaattttacctagtttgctagaaattgtctctaacacataaccatttgtgtgttayattactgtcctgtgcatggagagagaagagaagatgtctgtgtgcacatcatgtgtttccttgtggaaaataaaaaagatcgtggaacagtataacttaatacattttctctctgaatctgttatagtgtgataactgtggcatagaacccatccagggtgttcggtggcattgccaggattgtcctccagaaatgtctttggatttctgtgattcttgttcagactggtaagtgttttcttcattgtcagtcttcaacttagacaagaaaagagcttctcagccattagtgaatttgatttcyaaacatagaaaatattaatacccacacttagtgaattaaattttgttgttctaggcaattaatttttttctgtaatcataccacatgtcaagtaactttccgttggagattttgatagattaatggatttaaacagggagagctgtgaggaagctttgtaatacacagactaaaatgcatccactaccatgtaatgatgtgtgtctttttttctttacagtctacatgaaacagatattcacaaggaagatcaccarttagaacctatttataggtcagagacattcttagacagagactactgtgtgtctcagggcaccagttacaattaccttgacccaaactactttccagcaaacagatgacatggaagagaacatcatttactagtcctcttcaacacatagcaatggtatcattgttaattatgtgcacagtttggaaagattctctgctttcccagaaatgacactcacagcatgagagcttcctgagtgttctcgtcaagtacagctctgcaccgttgtggctctagatcactgttcagcagctgaacattcctggtgagcaaaggtttccctggtgaatttttcaccactgcgttttaggtggtgatcttaaatgggtgagatggaacgagagcacacattaaagagagagtaaattccaaaggtttcaaagaacttggtcataaatatgataatgagaagacaaagtatttatattaaaacagtttagtagccttcagttttgtgaaaatagttttcagcacagaaactgacttctttagacaaagttttaaccaatgatggtgtttgcttctaggatatacactttaaaagaactcactgtcccagtggtggtcattgatggcctttagtaaattggagctgcttaatcatattgatatctaatttcttttaaccacaatgaattgtccttaattaccaacagtgaagcactacaggaggcaactgtggcattgcttccttaaccagctcatggtgtgtgaatgttataaaattgtcactcagatatattttttaaatgtaatgttatataagatgatcatgtgatgtgtacaaactatggtgaaaagtgccagtggtagtaactgtgtaaagtttctaattcacaacattaattcctttaaaatacacagccttctgcctctgtatttggagttgtcagtacaactcatcaaagaaaactgcctaatataaaaatcatatatatggtaataatttccctcttttgtagtctgcacaagatccataaaagattgtatttttattactatttaaacaagtgattaaatttagtctgcacagtgagcaagggttcacatgcattcttttatactgctggattttgttgtgcatcatttaaaacattttgtatgtttcttcttatctgtgtatacagtatgttcttgaatgatgttcatttgtcaggagaactgtgagaaataaactatgtggatactgtctgtttatattatagaatgcttgttgtgacttccttttggttagattttggatttttttttttaccagtgttaaaaccagaaattggtattttttaaaatggtttgcttcacatatttaagagttttctttctgtcatttatgaagaataaggaatgtattatggaaaagagggtgatcttaagcaaccctgtaaaaaatggtaaagatttttactcagtgtgtgctgaaacactaaattaaactagcttacaaaaaggaaacacggaccatggttaaagaaaaaggcaattattaatgctcaggtgtgaaaactaaagttgaaaattttttttctagttgtgtctcatgaagataagcccccatgtatttaaacagatggcttttgaaaaatcaccttgtttcctggaaattactattaactataggaaaagatagtataaatattctaagattgattgttatatttgacccaatttttagaatcacctgttttttcctattttaaatcaagggaacattatttactagttctcttcagtacatagcagggtactaaaatcataccctgaattttttttaattgagaaaagtaatagaattttaaatatagaaatatgagaattttaaagtaatatattgattaaagatcactgatgatatagatataatatatcataacagaaggaaagtaaatggacttgagcttaacttctcaccctggaattattagtgggtgaagaggggaatcattagcattctgggcgtttttatattaaatgttttgtgaatatgccagaagatctgccttcaacttgtaattaggcaagatagtaatgcttgatggtaacttctatgtttgtgtagaaataataccagttagttttggaaagccattcagatccattcaaaaattccataaagtatgatgtatgctttggaagagggatatgagtgatacaattgttatataaatggaatagacaaaccatttgaatgcatttttctagggcaaacattttttgagatttttgagttaagaagatttttcggcttgagcagaagatgtgtttgttttgcatttttcagctccaaggaaacagcccccatggctttaaaaggccctgaagttcagatagtagtaggtagtgttttgttattgttttaatttgagagttgcaggaataatgggcagagctgtcatttgccggtaggctaccatctgcctacatagaattattggactgtaagctaaaacagactgtaaaagacctacttgctaaagcattgcttattcagtggtattcagtagataagatctatttcctgatatattgtgctcaagttatttgcacatcttaagaaacttttaatatctaaaaccattgttgtaagatttaggtagaggaggtttccttttgtgtgatgcataataatagaaaacactgatacagtgtttactatgtgccaagcaagcatatgataactaattcttaacaactctatgaggcagggtcatttattatcctgttgtcatatgaggaaatctcgccagagagaagttaattaacctgcccaaggtcgtatagttagtaaagtggtcatgcttggattttaacctaggcagattacttcagagtcagcgtctgccttactatcctgtttcctgagcaggaatttccccttgtgtcaggcaacactaggtgttaggagtggaggtgtgcagatgttgccttacattctgttttcctgatgtggtgtgcttcctaagagtacaaacctgagcatatgtccaggcttgcaaagtctcaggcaaagctgggactaaggcttgtgtttcctgccttgggtaggattttcttctatgcatgttgggtgcttctcacttaacctaatagtatgccttgtctgttttccccccttcccctttttgtttaaattgattcacagaacacaaaaatttactaggtatgaacatttgaaaaaatggaatagagaaaatggtacatcacatgtaataaagataaatattgttttgtgaaatgtctttttcaatcataaatatgtgttgtgtgctatataaaactatttcttattgtggatattgaagtttgaagcctgttgttcatctatagatgcactggatgggattggaagtcttcagatttcagtagggttttccacaagcttatgaagacattgttctgtttaggctgtaaactgtttttatttcttgatgaaaaatgttcttctatttatatgatcccagaaaaaagatacaactttttttttctacagttaatgtagctagttaactagagttttcagagttataatacatttagctccatgagaacagagacgatccatgtctgtctgtatctctagggcctggcatttaatagattctcaataaatatgtgttggttgtatgaccaacattttggtgagtttacatttttttcctccaggaacttgagagacaccacctatgattgagtgtgtctgtgagatccttagaggccttgcatcagaaggtcatcttgacagttctgtgagaggacaggggaattggactctatcttacccaaaggctgtgattcaaccctgggtggcagaggtggttttggttctctgtgggaccctagataggctgtgtatcttgattctcttccatgtttttaagagtagtgtaatggggctgggcatggtggctcacgtctgtaatcccaacactttgggaagccgaggcaggtagattgcttgagcccaggagtttgagaccagcctgggcaacatggcaaaaccctgtctttacttaaaatacaaacaaatgggcatggtggcacgtggctgtagtctcagctactcgggaggctgagtttgggggaatcacctgaacttgggacgttgaggctgcagtaagccgagatggtgccatggcataatagcctgggggagaacgctgtctcaaaaaaaaaaaaaaaaaaaagcaaggtaatggaaaggacactggagtgaaaattctgggtcttagtcccagttgtggaagtgaagcactcagtaagtgttgacaaagaactacctttcattgcacattaggagctagtaaatgattcgtgtgtcttactaacttttgtttaatcctcagttcctctatgaggttcattactattatgttctccattgtatacatgagaaaactggaggtgcagagagtatgttaaatatgttagctctcaataataattactgtgtgtgggactggagataccaagccgtgtccttatggaggttataatctaatgcagaagaccagcaataagtaagtaaataaaaactattacttcaattcaggcagggataaatgctttgaagataagtaatgctcagagaaaaataataatgggagaatggggaatagtctgccattttagatggaataagcaaagaaatcctctattggccagggtaaattcaaatagaaaccagaatagagcaagggaatttgctgcatgaataatctgtaggaaggggcagaaggatagcagtagcacacgggccctgagccagtagaccgtggcttgttctggcaacattaagatggccagagtagcttaagccaaatgagcaagaggagagtagtagttgatggcgtcgaagagggcacaagccagctcagatgtggccttgaaaacacatcattgtaaaggagtttagattgtgttctgatgtcttctacatacacacaggtctttcgctagacagagacctctaaggtcttttccagtattaaaatcttatgactttaaagtagtgatatcatttcaagccattcaaatcagtaatgtgttctagagaagagttgatttgcacttctagatactcttcaggggcaaagccatttacccttgctaaatttttcaaggtggctgtcagctacagccgtagaagcctgtaaaagatggctggacctttctgcccctctgctgtctcattttccttacctgtgcagtcagagctgtgctgggcatggactgtgtctgccagtatatggtatgtgtttcaagaatgtcaatccctacaaagagtcattttatgttttctggcacaactgatgattttcatcctgtaaccttttttttttccagtttgctcaggtacttattatgctccccgatagagagtgtgacaacttggggtagtattaaagtatttgacaactgttgggagttatgggaacatgcccctttttgttaatagaggcgtaactgtaaccaaagaaatttaatttcttctttagcaaacactaacatttctgtttcagaatgagtgctagagaaagaggaaatatgacagttaccatgtatcatgaatacattgagttctctctgtaataactcaaaactgatctatagctaaaattaaaaccatataagcgtatcgtaaatcatcttgactatttctgtgttcgcttctaattctgtttggaataaggcttcaaatgctttccagaatgatgtgagttacaaataaatagaaaaagagttatcctgtcttccatttattttatttgtacatatccatttcaagaaaaaaaaatgacttaaaaaatacaattctatcccagaaatggatccttatctgcacagccattgaagaaaaaaaaaaaaattcatgcaaactgaaactatgcttttttgtagtgactgagtggaagatgcagttattccagtagaatatataagcagctctgattttacaactgattgatagcacaaaagagaacccaaacttcactggtttaatgcaaggaaacacagttttgcatatgggtatgacaaggtttgcaaactcctggaaagggcccatatgaaacaaacacattgaacacaccacttactgacatgcccctcccacccacatcaggtttgttagggtatttttttacttgcttggcaacaaataaatacatgggtgaccatttaaaatcaaaattataatttgatatgtgcccaatgaatgaaatagcaaatatctcatgcttttaagttacttttggtcatttatattaatttataattgctgaaatgcatcaccatgtagagaagagactaggttacacaatttatcagatttgttctcttagccatgacgacagtattccaagtttctaaaaaataataataatagagaaggttactgatgactaacctgggttttaccatcatcttgggaaagctatacatcttcatattttaaaatttctgtcaaattttacttgcttgatgcctctatatcatgtacaaggcattgtgtaatcaacccaccttatggctctgagccaccagtggatgagagttgacaaaacagccagacaccaaaggaagatgcccagggctgtcccctatgccaggggcctccattggggaacagtatgtaagaggaaggtgtgactgggggttagggatgcttaatgagaggagaaccagatgatcagggtctagcaaggcctgtgatcacaacggacacagactggcaccgcaccactgttcatgtactgactagctctgagtgtggcctgcatgatacaaagtgtgtgtgccgtgagtgcagacagttgtctgaagtgtggagaataggttgatatagtcccaaatacaccatgcatgatttccagacacctctcacacaggtctagctgggaagcaaacagtgctgtcaggatttaggaggtggtggttggtgggggcggtgacacaaaaggtttaacttgaaacattgtgttaaggaatgaactttttaatgtttttctgtttccattctaacaaacatgcatttttgccttcagaaaatagagtcaatagctgtgcagagttgaagaaaaacgtcctctggtgttccctctgcatttatctatatttaaaaggaaaaaaagagagttagtctgaaatatctgtaaatcatgtttaataatgaaagaacactatcacttgctcataatttgctctgcaaaattttaaaacacaagaccccccccaaaacacagagaaaaaagtgaagagtagttttaaaactaggtgtctcaattaaaaaaacaatgaagtaccactacacatctattagaatagccaaaatccaaagcactgacaccgccaaatgctggtgaggacatggagcaataggaactctcactcattgcttgtgggaacacaaaatggtacacccacttcagaagacactgcagtttcttaaactgaacatactcttaccatactttttagcaattg

SEQ ID NO: 97310 - DNA, 116891 bp, Homo sapiens
aagagactgcagagagggtcgggctcgcagcactcattattcaggtctgttaagactcctacctgtgaggcccttttgtttggtactagagcaaatcccagcagtgaagatttcctctgtcgttttaggacttcaaaggtttactcttatctgactacaagttcagctgggatcgtgttttccagagtcgcggggacacaggagtcttcctacagtacacacacgcccgcctccacaggtgagaagaggctgcagggaaaccttgtgctgcactgtgcttacttaggctaggtcctgtgattctaagaccagaggccctgttttctgggcttttccaatatcttctattcacatctgactagagtagaccttcttttaggaaaaaaaaaaaatttattgagcacctatgttagaaatacatttatgtgtattatcttagtcctcagaataaccctgtcgaaaaatatactgttacctccactgtgtatggatattaaggagaccaaaattgtgtattataaggtcatgttcatcacttgcagctctgtgcccttgtatgactttttaatcttttgatgtttttaactttaaacttttgataagtttggaagagacttttggatgtgggtacctgaatgacttcaacactgcttgtttacaagagccacagtctgtttcaattcttcagcatcttctcaggtatgatgttttccagggatcatcaagtgtgcttctgcttatcaaaatggctattagcatttttgctgcccagtagagtcaacagtccagtagctgccttctgcctctagacttttcccaaaggtatgccttaaaaagtgattatttgcattttgaggacagagggcatagattaagccaatgcccaaggaggacagtctttgggtcttcagaatattatcactgatgaatagcgcacatgtctagctgcctctagctcacataaagccttataaaagcataaccttttttagttttagtttgagaaagagcatcttcttgctctctgtggtaagtgaaggaaaatacctgcctttgtgcagcttcccagagaccgtaagtccttcatttgcctcttggtttcggttcacaatctcaaatacatatatgtatgtgatgctcccatgctaggcaagacacccacacattttagctctgacgggcattgttggtgaagccaaacatgccagagattagtctctagaagggatgtggatggttatgaacaaggtggttttctttgattgccatatagtagtcagtggttctttcctggaatcagaaaaatttactcacatgtacaatagggaatgtacggaaaaataagccaactgggttttcttagcattgagggtagactttgctaatttatattttatattcttaaacatggctggaggctttttacattcaccagccatgatttaagtttttgctgtggactaggtctaggaaatagcaagatgatttagaaagtccctgccatcaaagaatttggaagaaagaaaaatgttcctttgccttcaaatgtacacacagttttttcatatccttctactcttctttttttttgagacggagtcttgctctgttgcccaggctagagtacagtggctggatctcggctcactgaaaccttcacctcccggggtcaagtgattcttctgccttagcctcccaggtagctgggactataggcgcgtgccaccacacctggctaatttttgtatttttagtagagaatggggtttcatcatattggccaggctgctctcaaactcctgacctcatgatccacccacctcagtctcccaaagtgctgggattacagacgtgagacactgcgcctggccataccttctactcttaatcgtgtcgagtcaaccttatattcacaatcttttaatgtctaatgtcttagtgtaatgtgtacagtcttttcctgttcactgttcctgtcatcttttaggttcgacgaggtgctttataaatcatctcaggactttcaacccaggcatatcgtcagttaccttctaactttaaggtactttataatcttcctgttttcaggtgttaatggcatttgagacctttctttcatctaaaggtttcctgtaaacaaattccttggcctaaaatttgatgtgcttttagttacaggaattattgcttcatctatacaaattagcagttaatgttccttcattcattcagtgatacaaggtactgtcactgtagactggagaatgggaactgacaactacagttacagcacagtgcatgtgttatgttagagtgaacgtaagagatggtgttagggcaaccagcccagccttgagcgatcagagagggcttctcagaggaaaggagatattaatcagaaggaatgtggctgggaagaagaagaaagcccagagttgagcaagaacgtaataatacattttaaaggatccataagcattgtcctgggagggctgatgaatgaagcgtgtataaacctgtttgccatgtactgaggcatttaaacttattttcggggtggtggggtccatacagggattttaagcagaggcacagaaaaataagctagaaaacttaatttttctaatctttaatgacaatttcatggtgtctattttagcaaattgaaatcaaaattgagtccacccttgtatagcagcagcagctgtatcttctgtaaagctatttaataaaggaaatgttgcttttactcaacaagtattgaaatcagacacttaacaggactgttttcttgattatactttttaccttgtcttctctagatttatgtaaggatttttttcttcctttaaatgacacttaagacatacagaggtgaagaagctacaaagtcttttttttttttttttcttttttttgagatggtgtctcgctctgttgtccaggctggagcgtgatctcggctcactgcaacctccacctgctggattcaagcgattctcctgcctcagcctccctagtagctgggattacaggcacgtgccatcatgcccagctaatataccaagtcttatgaaatgtcattttatcattaaaactgatgtcttaagtatcatttctccggcacattgttatacttgctgccatacctaaatttaaaaagatactttaaagagtggccagtgtgtgtggagagtggatagtttctacccacctcactgtacagagggaaaggccatgctgtgttatacattggattgtaggctgcctaaatgaggaaaaatgattagaaaaggattctttatatttgtaaaattaacattgaaatcataatctttttttttttttgagacagagtctcgcactcttgcccaggctggagtgcagtggcgtgatctcggctcactgcaagctctgcctcctgggttcacgccattctcctgcctcagcctcccgagtagctgggactacaggcgcatgccaccacgcccggctaatttttgtatttttagtagagacggggtttcaccatgttagccaggatggtctcgatctcctgaccttgtgatccacccgcctcggcctcccaaagtgctgggattacaggcgtgagccactgcgccctgcgaaatcataatcttaagaattgcccacctcttagtagtagaatagggccaagatctaaagcttgagttttgaattccagtttcaacttcacaattttgaatacatcctttaatggttctgggctttattaagttgaaggagtaagattagatatcaagctcatatcttacaacaggaaattactgctggtactatcgtgatttctctcttcctgtttcagtcatcttgcagctgtggcacacaaaacactacaaataaaagatagtcctcctgaagtggctggggtacgttatgttgaatgttttctgtataatccctagctcctgagactaatattactaagtcagtcttgtaaatttttctaaaatagcattctgttgttcaactgtagcagtatacttccttagctaataattaggctgtaacaatcaatgtgtatatacttcccaacatactagactatgaagcacattttcctacatgaaatattatagtgataagttccccttatctgaagccatactgtataatactatcactcccactccatgacactttatgtacaggttttactgtaagggatgccaggaatttatcttctcttgcctatagtaactctagggcactttgacatattgttcctgctttaaactagaaagaataacctttaaaaccattctcatgtattgaatacattcctgttactgaatattttaaatcattctttgatttattttgtaggccagacttcatcttttcaaagctgtccgttctgtcctagccaatggaatgaaacttcttggaataacacctgtatgtaggatgtaatttccattaaaatggcttttaaaatgtcaagtgaattctagttatctattctgagatgccttgctgttcagaataaatttaaattttttttttttttttttgagatggagtttcgctcttgttgcccaggctggagtgcaatggtgtgatgttggctcactgcaacctccacctcccaggttcaagcaattctcctgcctcagcctcctgagtagctgggattacaggcacgtgccatcacgccaggctaattttgtatttttagtagagacagggtttctctatgttggtcaggctggtcttgcactcccgacctcaggttatctgtctgccttggcctcccaaagtgttgggattagaggcatgaaccaccacgcccagccaaagttaaactattattctgtgtcagaatctgtattaaatgtgacttgtcaagttattcagtctttatccttaaataaatgagttatctgaattctctcatggtcagtaggtatttaaatagacattgagttttttaaacccaaagcattgtggtctaatggggctaaaggatttgagtttaaactttggcttgaagtttcttaccatgtcattcttccagaaactattcttataactgaaatgatttaatgttttcatgaaataaaagaattggtgaggggaaaatattatcaattttcttgtaattgtggctagtttggagtaaacatagggagatcaaaaataagcaccgttctgtcaatatagctgacagctactcctagagacaatagacctcgtgcttccctttgagttaatatatacagggctgggcgtggtggctcatgcctataatcccagcactttgggaggctgcggcgggcaaatcacgagatcagtagatcgagaccatcctggctaacacggtgaaaccccgtatctactaaaaatacaaaaaaagtagccaggcgtggtggcggggcctgtagtcccagttactcgggaggctaaggcaggagaatggcgtgaacccaggaggcggaacttgcagtgagccgagatcgcaccactgcactccagcctgagcgacagggcgagattctgtctcaaaaaaaataaataaaaaatatatatatatatatatatatatatacacacacacacacaggtaactcttattgtgtgaattcaggaactaaatacattttaataggaaggaattacttgtaaagacgttgaattaggatctttttgtaaaatgtagtccattaattcaaccataatttgaaatggagtttcttatggtttccttcatgtatctatcttcatatttttgtgtggcttcattagataacatgagcatggcttaggaaacaagagtaggatgtgatgtgtttgatcagtacggccattcccatcagccagcatttccattcaggtctgctataatttattctaaatgttgctaatagtaggcttttgaataccagtgacggtctatttaccaagttagcacaactgaagcttctctagttagagtgaaaattgtttcatattagcaactatggcttaccttcttagtcctagaaaagattcagccttgcagttccaatttaagtgaattagctcccagatagctaattttcgacttaaagtagtgtcacatttttcttagcataaaccagccatgggataaaaatataaagtagggacatgttttacacatccaatatccctctctacttgtttgaagaaactttccccttccaagatcagtagtgtcttcccgagtatttgaatcgtgagtgaaaccatacaggaacagtaataggtaaagccagatctttacaaaagctgaaaagacaactgtccattaattcttagaacctagacgcctgtagccctgattgtggaccttcttaaaaattctttcttttttgcttaaggcttgccagagttgagttgatttgcagccagagaaccctaaccgatagacttccacatatagaaaataaaagtgcatttctacatatagaaaataaaagtgcattatcttaatggtcatatctataatataaagtgattaaacaattctttcttacaaataaagtttattgctgaatttccccattaacattatagaaaacactgaaatttcacaaattattgagagcccaacagttaaacatactttatttaaaaaagtacaaaagtgacattagaaatttttttgaagaaatgtgtatcatctaacagmaaagaaatatgaaccagataatgaatggcacaaatatagcactaaaggggtactcactaaaggggtactcagtcaccacccagaaattgtccgagttatgaaatagattcattttgagaagttacacattcagtttgtttatgaactagcctgtcttgtttctgcctcttgtaagaaaagagctaggtctttatgctgctaggacaaaatactgtacatgaattggagaataaggaggggtcatccttctccccggtaccggaacaagagaacagttagtacagaaatggctttggcactttaacccttagacattgtcccaaaccttgttacttgagtattgtagcctyaccatgattttttttaacaccgtatcatctccatactttttatttacaaattatatatacacacaataatacaattccttcattctaaaacaatagtagaccccaaacaggtctacattaagtttctgtattagcagttcactcagatagcttcatttgtttgttgttgtttccacataaccgcactgatcatgccatacagttaatttttatttgtttatgctaccttctgagattgacttaaggctctagtttaatgcaaatggtttagtcttaaaaggagtctcacgtgaggctaaaatcacacaccaataactctctcctttgaagctgtttctccttgttggatggatgtagtgtcttgtctgggtaatccatagagatatatggaaacacatacaagaagagtacccagggcaaaggtgagtgctgaaaagaaaaaaaaaaatagctttatctgtatgtgtgtctttaaaatgcctaatgatcagtttaaaattttgaaaactcttaattgtgggtttacactatcagatcatatttttatgatggcaaggtttagaaaggtcttccattacagccaaaaaaaaggagagggggaggcagggcgggtaaaatcaaggcagtgttttgttgatcactgattacagactttttagaacatgagtatgcctaactgacactatctgaccactctgacaaagaacataactaatttccctataaaatatataattttttttaaatgtaagtataaatatatataagtacaaaagaaaatgtggtaggattggcttttccgtgacaaccaggaacctgtgaaagtttagagtaaaagacaggtgaccaatcattcaaaccattgataatttcttaatcggagatgaggcgataatttactgaataaaactacatttcctactagtcttaacccttttttcatcttttttttttttgagacggagtttcgcttttgttgcccaggctggagtgcaatggcgcaatctcggctcaccgcaacctctgcctcccaggtccaagcaattctccttcctcagcctctcgagtagccgggaggagcatgcgccaccgtgcccagccaattttgtatttttagtagagacaggatttctccacgttggtcaggctggtccccaacctcaggttatcacccgcctcagcctcccaaagtgctgggattacagacatgagccaccatgcccggcaccttttttcattttaatcttaaaaatcaggatgcaagaaaccaaatcataacttgtcctaacttgacaaataaatatatttatatgacatcaagctttattttagttcactcctaactaaaaaagaccagctttgccttcaaaaaaggagaaggtaggataaaaacttgtatctaaacagttaactgaaagattgctaagacatgctagttgaccatcagtaagaacattaaacaaaagcattttctactgttcctatatatttcttatgagcaatggtataaggattttgttgaacataaagatagatcagaattacagctaaaagttcacccaaatcaggtagaaaaacatctaagggaaagcctataagtacctgatactgaaatggtaagtggttggtaagtagtgtcaagcactactctaagcacttcacctgaaaacaccactaggcaataggtgatattattcccattttacagatgaagaaagtgtcacccagggaatataacttccccaaggctgcacagttaagaaatggtacaggcaagatttgccacagactatacatggttttctaaaatttctacaacactatttccatttatatacaggagtcaattttaaaatgaaatgtaaatataagccaggtctcttttacttaatatatttaacagatattcttcatacattggtttatattataataattgatcagtaaagaaaattattacactataaaagcaccctgaaatgttaagtcaatatcattgcttaaataatttagaagccaaattaatgctgggtgtgagagttgggaaaattatattaggactaacaaagcagtggtactggaatgccagctatattaatgagttttgtattaattacatattgaatgaaacaaagatacaaaagacaaaatctagattttgattgttttcaaaaccgtctcacacccaaatgcaaagcagttggaaagtacaagctgagggaggactaaaagatgttttctacattcttctaaataatgagccaatatagtttaaactgactgctgaaaataatttcctaaagtctttatatgtatttccttgagtaccttctcacattcagacactcaagttgtcctatatacaatacctaaaaatacagggaggccttgactgcaaaaaaagtcccctcactttcacatagaactagcacccctcgtcttaacctctaagaccacctaaacaaccaaagtactgcttagccacatcccacacaactatgaacagctrtactggtggaataaactgtagtaacaaagctaggaatttctgtaaacagtatgaccaactgccacttttaaataagggattaaatgaatcaaggaaatgggaggctcttccatgttaaaaactcaacacaaactaagacatacttatctgtaatccaaacagcattactgaagcaatggtggaaaggacaatggccgctgctgcagaaaagcctttcatgatgttgtctgtgtacttaaccacaacagaagtgtagaggccaccaacacttgcaagaacttgtatacagagagaaataaaatcttatcactcaaataaatgaaacattacataatggtgaggcaattttcatccccagagatgccatactttacctaggaaaaggaaaatactgttttccttagaaggagccatctgagagtttgtactaaaattggtagttcctatataacactgtttttccaaaacaatgcccagagggctatgtggtctattaaattttacacattttttgctaatgttagatattttggggcattgctatcccaaagcaattttgccttcacaatcaaaactaagtcaacaaaatgaaaattatattcaaactggtatttacagtatcaaaggattaatttcaaaatgttataacagcttaaaatggacatctaacttaaaaaaaaaataaaggatctactaagaacctttaattcctggatacttacagatgacaaaccagacataatatgtgtaaccatagaaaaatcctttttctttaatttcagctccatctgacaagtagacgccagctaatgtcacaataatccctgatagatacatttgaatgtttctcacccaaagagaagtatctgaactctttaaaactttttcaaaatatactcctgaaagaaaattagacatgcaaatattaaagattactataaattaacttaaaatgtctttcatttagaacaataccctagagatatataaagtatatgatttggggaacaaaacatactktacttaaatgtgcatttattatgtaggttgtgtgacacatgacatactgtacattataaatttatgtttttacagagtatatagaataataactaattgggaagtttataagctacatttaacagaaggctgttaaattaagacagtttctgcctttattagagcagtaagaccacaaaagctctctgtactacttaatgccagtatgtcatttgctttggtcagctgaaaaactacattaagagtgaattatcttaatcacatccctgtaatatctgcctactaatgaatactcctaattctgcaatataatctataatcaccactaggaatcttttcagagtaacaaccaaaaytgaagtagaatttgctgtgtaaagccattttcctttaaagcagggttccacaagccaagttcatacacaaggtcagaaggatcatgaactccccaactggataataaattttgtgtatatgtgcatttttctggagttgaaggtccatagattttttcagatacttcaaaggagtacatgatacccctccccaacaaaagtcccctatctctggatttatgcttaaaatgaatgcatattttacaaagccattaaagattttagttataaatatcatgctagagacttaggaactgccaatgaagtacttatcaactaaaaagtctaacgaaaaacaagattatttttgatgagtctgttggaatgggaacataaaatagctattcttattttcacctctgattttaccttctgggagaagcatttatccagtgctcagttaccgtaaacacagagagatattaaaccaccctccatttcctcaattgtgtattaagagagtgaactaataaaatgttggacataatcatttaactgttcaaaatattgcaaaaaatcaaatagcatattttttaggtaactcaatttttgttcccaatttgttggtttctagaacacaatgctatcagtaagtatattcctgaatttaaattttcccctcgtataaaacatcttatttacaagcagtattttacttctgtattcagcctgctttcctagtcaaaaatagtcctgacttgaaataggtacaaataaataataaagatgtatagctataactaatatattctactaaaagctttaagcagaatatattaaaaactaaatctctgctggaactatttctaaaactttttttatgttacacttaatattcatactttcttatcttgatgcattggaggagtgcttgtccctacacatacaacgccagacttccgtggattgttgatgttagtgattttgtgttgtctttcctccctgtttggttattagctttatgtattatgttttctaaggtactctcgacccacctcatgatcctactccatagctcctaacctgttaaagcagagaaagaacttgaggttataggggaaaaaaagatacttagctggtaacattaacaacctaaagcagcaggatctgacttgatagtggcagttccagaaaaaaggaaagggctttctgaagactaatttcctccattttcagaagtcttttttcatttacttttgggtttttggccggactgagatggtcaaggataacagaagtagttaactgcaagtatgaatagggactgagtctgaacttagttgaacaatgctatacatttactggaaaaacagctgacataaaactaaatataagcaagaagatcaagtttaatgggaataaaactgagraagcaagataaactagactggtgtctaaagtttgatgttttygaaaaatatgacaaaagaataaaacaatgctttcatgatttacctgcaaatcctgagcacaatacagcaatagctatagcgccaaaccctaataatggattttgttccacctgcaatattaattgttaaagttatttttagtgactaataaacagagttcatccaagagtccaaacaaataaatacaaaaacctgttacagtcttactaaaagtatattccacatcagacacagctattctacagaataagacaactaaacaaaaagaccattccagaaattaaccagggcacttggcttaagtgaaaaatgtgtccctcaaatcacagccatagtatatrcttaatataatatgtgcccactgtttcctaataccaataagcactctagcatgaacttttgaacaggccaagtcagcatactacttaattttaatttctattatcactctaatttaagagcttatagcatcaatcctgaaaatgataacaatttaacttatttattcctcatcacctacaggatacagtgctgcctcttaagactccccaatttattgaatttttagtataccttctgtgtaccagatacattgtctatacacactgctgtggtttgaatgtcaacttcaaaacacatgttgagatttaattgccgttctaacagtattaagaggtgggcatttaagagatgattaggtcatgaaggctctgtcctcaagaagggattgatgccattactgagggaatgagttagttattgagggagcaggtttctgataaaaaggatgagttcagcccacttccctctgtcacatgggatcgcttctgccttctgccatagaatgagcctcaccagatgccagcaccgtgttctggacttcccagcctccagaaccatgggccaaataaacttctgttttttatgagttacccactctgcgtattctgttatagcagcagaaaatggactaagatacatactaaatgaataaagaagattayaatacacagctctgttatgtataggcaaaattgacaagtatatataaccaaaatagtgtgagaccagtgctcacagatccaagtatatgggtcctaaccctctgtttcactttattttctctttcttttctaaactgtcaggagctttcatcagtctttcctgaaagataaatactatctcaatagtatcactgaaattagagggttgagattcatgactgtaatatgacaaggaagtatataccttgttcaaaataaataagcctgatataagaaaagtgccactttatggtacctgagagagcaagcttggtctaaattgtttgcatgaagataaaaggagaaacagaagacactgtagaccagtggttctcaaagtatggaccctggatcagcagcagtggcaccactgggggtttgttagaaataaaaactgtcaggctctaccccagacctactgaaccataaactatgggaatgggcctagcaatctgtttcaaccaaccttccagttgattctgatgtacgctaaagtttgagaaccactgctatagactatacattattaacaagtatactttcctataatacaaatttcaagactggcatagatagaataaaatcatagtgtgagataccacctatcccaacatctgctgggaagctccaactgctaaaaatagagtgcctgataaattcttgacttastttcctgccagttgaatgtctctacagttaggaaaaatagtgatggaaacagcttatctggacttgattctgacaagaaactgctgggtgatgaagtagatgtgatgggaactttggcagaaagcaaccatgtgatctgagcatgagccaaacacagcacagttaagagacatgtgctccagtcctgaataaatcaaaaytcaaaaatgtaaaacttcaagttagaattccatggctcgtgagaagaacattcaagagagattaagagttactgaagaaggaggttctggtgaaaagtaaaaaaaagaatacataaggaaatcaacatatctaaataagggcatcttcactgaattctgattttacaagaacaaagccgaagtacagatcaccaagaggaatctaaccaggaatttaagaatagtatcaagaaatcgaaaactcagaataagtggaggcttgcaaaaaatcctgtaaggcattaaagaaagcttttttttttttttttctttttgagacaggatcttgtggtataatcatggttcactgcggcctcaacctcctcggctcaagtgatcctcccacctcagcttcccaagtagctgggactacaggcatgcatcaccacatctagctaagttttaaatttttttgtagagacatggtctcactatattacccaggctggtcttgaactcctgggctcaagcaattctccccgcctagactacctagctaaataaatttaaaagactatcaagaaaagtaggtgagttagtgtatataaagcatttagataatgctagtatttagtgcattataaatgattgcagctgttattgttacattgattaccagcaaaatgttagaacagatttagagatgacttgtacttaaaaagcttaatggtcatcagtggaaaatagtgtgacttcaccaagtgtgaaacataccagatttccttactgaaaggaytcctaatgttaagtgatgaggggaattccatagagataatgtttggcaaaaaatgtgacagacttgcatattattgttattattattattattgaaacagagtctcgcactatcactcgagctggtgtgcagtggcgcgatctcggctcactgcaacctctgcctcccaggttcaagcgattctcctgcctcagcctcctgagtagctaggattacaggcgcctgccaccacgcccagctaagtttttgtatttttagtacagacggggtttcaccatgttagccaggctggtctcgaactcctcacctggtgatctgcgaccagccacataatatttttatagacaacacagaactgtagtgaggataaaggtacaatccrtaagtgtgtgaatgctcatacagaaaaatggtagttaattgaacaaaatcaagctaggccatcaaccaataccaacttgccaggcatatagataagccacgttagaaacagatcctccagccgtagtcaagtcttcagttgactgcagccctagccagtatcttgactgcaacctcaagccagaaccagctagctaaggcaccctcaaattcctgacccataaaaactatgagagatgatatgttcagtaagcaagaaaaagatcaagctagagagaattctaaaggtacagccacagaactctggtcctgttctacctaaaattttcattaaagacccagaaggcatattttttttgactctggaaagcgtaatacccaaaggagaagctaataatgggtaagaactggaaataactcaaggggctgagcaatgacccaaagctaacaagaagagcttaataaatacaaactcaacctgcattctggtttagaataagccagagtttgagttctagtgtcaatgagagtctattccagtcctgacacttggaacccacttaaccagtaktggaggagtgcatggcagtgcagacagattgagggaacagtggggtgagagggatacaagatacatttgagacaaactatttgggtgacacagttacatgtagtggtttatgatcaattgtaaaatagatactttgcctgccccccagaaattaacagtcatgtaccacataatgacatttcagtccatgatgaaccacatataaaacagcggtcctgtaagataaaactatatttgtgccttttctatgtttaggtaygctaaacttaccactgtgttacaactcgctacagtattcagcacagtaacatgctgcagaagtttgtagcctaggaacaataggctatatactgtacagcctagatgtgtagtaagtagtctataccatctagatttgtgtaagtatactccatgatgtttgcacaacagtgaaatcacctaatgatgcatctctcagaaccctgaacttayattctttgttaagcgatgcatgactgtataacaagtctccggtatkcagaacaaaggggtaattaccaaactgtgcctcgtattacttagacaacattgggagacagtggggttttaggatatattgagaaataatgacagatgaatgcatctaggagaaaaatataaggaaaagtgtaggggcagaaggcagggatcaggaagtctgtctagaaaccatattatagaaagaaacagtagggttttaaytggggaaggaggggacctggagggkggggatatgatactgttcacaagcactgtacatcccagccgccttccattcctaagagaaccatagtctgtttgctaaaagttagagtaaatattcaactgtaggaaactcctgaccttcacaaaactattcactggcatcccatttcctgtttctctttggggaaataactgattgaggcatacaatgtaagaaaaaaaatcatgtatgtatcttagcgttaactctttaaaaatctgttatgtaccttcacattaactcttaaaaactaaagataattatcaattatcagtaagaacactccttcccttgtcatcctgatcactgacagtagggagatgtgccagagactgacagttgagagagaagatgaaaactagatgcagaaaaaccttgcccagtgtttctgagatgtttgaaagaggtctagaagttctaaacatatacagtatggaaactggcacagttgtggtcacaagttagctattaactaatttaggacaagttccttcacctctttggggactgtcatccataaaatggaggggatggaacacattatttctaaggtatgttccatctgtaacatattttatgcatattctyctctgagaaacaaccaataagtattattatccctaataatatgctaaagaaaaaaggcctatctataaggcaaaagttattttaaatcaaagaaatgtagtcatgctgcatgcatcaatgtaactgaacagtwtaagacttaaggaagttttctatttatgggaagttatggtgtgcattttgyttcttaccaccacttttgtagcttgggctggtttccactgtacaagcgtaactccagcacacagcataaaaactgaaacccactgtaatttgctgagtgtccgrtttaacattaaaacagtgcataaagcagtacacggaatcttcaactggtaggtcacctaaaaaaaagagaatgaattaataaattcagttaatgttagtctctgatacaaatatattatttctggtatcattgataaaattatcaataaaaaatatttgataatggccgggcacggtggctcacacctgtaatcccagaactttgggaggccgaggcgggtggtggatcacgaggtctggagatcaagaccatcatggccaacatagtgaaacctcatctctactaaaaatacaaaaaattagctgggtgtggtggcatgtgcctatagtcccagctacgcgggaggctgaggcaggagaatcgcttgaacctgggcggcggagattgcagtgagctgagatcacgtcactgcactccagcctagacgaaagagcgagactccatctcaaaaaaaaaaaaaaaaattgataatatgataaagagttaataaaaactctttttaccataaaagattctgtgcttttcattatcattaactccacttacctggtacactgctgcatccagattgctaagagctaggaaagccatgttgttctgaacagcatacactaacgatggcacacttaacttcaacagttccttggggctccccaagacattttctcttaaagatgctttgaatctacccagactaccagtttctctttgaaaacaaaagggggagatgagagggtggtaaggaagaaaattaaagagtattattttaataagacttcttcaaacacaggacaagcatactatgcttgctgtaatttagcaaactaataatttctaactagttttagattaaaagaaacataccaataatgtatcctctttaaaaaattatagttctgtttgggaaaatatgacaacaactagatttaccactatctctagtcaaagctctgagagattctgagtatattgaataatgagattaggaaaactgttgatattacctataaaaaaattcatcccctgctactttaactatttcatcaagttcaccctgattactttttaattgatcagtttgcatatccatttttatttttatatttatttttgasatggagtcttgttgtgtcgccccggctggagtgcagtggcgctatctcagctcactgcaacctccacctcccgtgttcaagtgattctcctgcctcagcctcctgagtacctaggattacaggcacccaccaccacaccaagctaaattttttgtatttttagtattgttggccaggctggtttcaaactcctgacctcaagtgatctgcccgcctcggcctcccaaagtactgggattacaggcgtgagccactgcacctggcctatttttaaagttttttttaaattacaatagatttaattgcaaataaaaaggctttggtagttcgttaagtgggttaggaagagtcaggtcagtattatttataaatgaatttagtacttatgaaatatagtagataataaatccttatgtaagaatattctcatactttatatctgtataattctgtagcagatctgaataatttactaactccaacaaaagtaaactatatctctaatgtacataaagtttactgtttgactgcatattgattatgcatgctcttaactattatttttgctattattatttcagaaggacgtggctaatctggcttgtatttcctgtrtcataaatcagctcattgatttcctgaaagtaaaaataaagcaatgttttataataagcaccaataccccaaaagaagtgctttataataatggtcctaactgcagctcaygatatccttaagaaaaccataatactttgttggtgaaatagctctgttccaactcaaagtttgataattacaatgagattctgtatttttggttaatatattagaatcaacagttgtgagttgaattttttcatttttaaatgctgcaaatataattgcccaagttctgagagaaagcaaaagtccattatattaaattgactaacctgtgcctatttatttgctgtagaacattctacctccaagaaaatgcttaattaataagacaggaactttgacctaagccacagaaacaaaagacatccttcttagttacagatctctttgtattaccaaatccaaacccacaccacagtgttaagtctatatgctgaaaaggaacgcacacagcctagtggtggactacaaactctattcgaaaagcagaagaataccaaaaataccacagattttccaccaaaaaatctatgtaggagagttttccaggcttctgaagattggctctttaaactaatgtttgcctttttttttaactgcttaatgcaaatctaagatgccccatatactttccttacatctttgttgttttgttttgtyttttttgagacggagtctttctctgtcacccaacctggagtgcaatggtgcaatctcggctcactgcaacctccatctcccaggttcatggattctcctacctcagcctcctgagtagctgggactacatgcacaggccactacgcccggcttatttttgtatttttggtagagacggggtttccatgttggcaggctggtctcaaactcctgaccttaagtgatcctcctgcctcggcctcccaaagtgctggaattacaggcatgagccactgcacctggccaacatcttaaatagagtataaagaataattttcaaaatgttttctcctcaattataaaactgatgaaaaaattagagaaaaagagattaaaatgtaaaataatcaccttaataaggtgatgtatcagagaagataactgaacattataattatctctagtatcatgatagcatagatataaattttacagactgtatgaagtgcaagttttagtgcccttctaaaatgctgactcatacactgatgatgtgtctttaaggtgatacccagaaggaactgctgagaggtggctgtttgtgcccatgcttcacactccaccttctcccatattcatttatctcctggtgtaagattcttcatgctaaaccctcaaaagctacaatataatggctatttatcctttccctaatccccagctatgggcaatgccactttacctccacctgttaaatatattatagccttggtgggtgtggtggctcacacctgtatcccagctactcaggaggctaaggcaagaggatcacttgaggccaggagttggagaccagcccaagtaacagaggaaaatcccttctcttaaaaaaaaaaaaaaaactgccaggagtggtggcacatgcctatcatcccagctacgcaggaggctgaggtgggagcatcacttgagcccaggagtttgaagctacagtgagctatgatgccaccactgcactccagcctgggtgaaagagtaagataccatctcttttaaaaaaaagaaaaaaataagacattagaagccttcactggtaacaaacgaccttttgactctccaaaaaacagggctgattctctttgtcctgtcagaatatgggctacttaaggatccaactgctactccaaataatcacgatacctgcaccaataaaggctgctgtggtcccttttctccccactcttttctttcttatcacttctccctcacttttcacataaaaagaagggcttatgaaacaaattagcagccaatctgagtattcctttccttcagtggagcaaaaagtaaagtacagtgygtcaggattaaccttcagatctgtctcttttggccatatcctttttgttggatgcttaggagctattttttcacggtcaggatggccaaggtatctttttctggttccttctctaatgtagacattagagaaaccaaggtataccagaatgttaattgctggaaagtgcaaatatcactgtagtaccaaagattatagcaatgttacataagatattttgaaataagttacaaaaaaaaaaagcagaggatgctaaaagaactagtaaaagagaataacagaaaagtatcagaaagtagaggagatttaggaggtattggaaagaatatgtgggaatctcaccacacagaaagttttaaagaagagggtaaataatttcagtattaatcaggttaaatcctgcttaagttaatgtatttattaagaatacagctcttaatcttatatttagctttactcactgaagttacataaaagtaacaagagcaatatatctgctagaaaacactagtaatcatcgttttgttttactatgaaagagatagaaacaaatgatcagtcctaaatatactgtaatatattgtaaaaaggttactttttcttccattttcctgaacttatattttctgttttggtgggtttttttttgtttttttttttttttgagatggagtctagccatgtcacccaggctagagtgcagtggtgtgatctcggctcactgcaacctccacctcctgggttcaagtgattctcctgcttcagcctcccaagtaagtgggagtacaggtgcacaccaccacacctggctaattttttgtatttttagtagagatggggtttttcatcatgttggccaggctggtcttgaactcctgaccaagtgatccacccacctcggcctcccaaagtgctggattacaggcgtaagccaccacgcctggccctcaacttactttcttagaaatcaaatcacaagcaccttaatgagcacctctgttaaaaacaaatttattaattatataaatgacactgctagctaggacaaaagagcatatataatcaaaaacatatattaaatttctttttagatatagtcttccttgttaaattttctatttgaacaattctttttatttttatcattggaatagaccctgtgcaacctttggttacctgaagaaattctgaagctccatgttgactgcagagagattctgctgctgcctctcccactaaatttcctatcaaccagctgaaaccattctttctgacctctgtttggtcaaaagtaggcctcattcttccagctactgatctaacaagaactactaggaggcataaaatccttggctaggttaccaagtcactgtgcaaaatggaacacagcagaagttactcatgagcttaagaaagttaaattttgtttataaatttcttatcatctacaaagttaagtataattaactcacctaaaaagactttgattggccaggcacggtggctcacgcctctaatcccagcactctgggaggttgaggtgggcggatcacaaggtcaggagatcgagaccatcctgatttacacggtgaaaccctgtctctactaaaaatacaaaaaattagccgggcgtggtgrcatgcacctgtagtcccagctactcgggaggctgaggcaggaggatggcatgaacccgggaggcasagcttgcagtgagccaagatcgcaccactgcactccagcctgggcgacagagctagactctgtctcaaaaaagaaaaaaaaaaaaagactttgaggggctaggttaaaaaaccaataatgaggtcaatttgaggacaaaaatacccttcatatgagggacatgatttttacttcctccccaacaccctgaacccattatagcatgggtacaaaagggtactgaaaatgtaaacccagaaggagaaataaacaaagctggataatctataagtatttgacagatacattaatttctctagataatactatgaaacagtagaataattttctctggtcttaatatgggtatgtagttcaaagttaagatatatttggtttgttactaaacacacccaaagtgtatgtacattaacatttacacatcctgctagggatagtctttataaactatggtgaatagcaaacaataaaaagttgtttgagctggcgcagcggctcacacctataatcccagcatgctgggaggccatggcagacggattgcttgagtccaggaatttgagaccagcctggacaacatggcgaaacyccatgtctacaaaattagctgggtgtggtgctacgcacctataatcccagctactggggaggctgaggcagaaggattgcttgagcccaggaagcgatggttgcagcaagtcaagatcacgctactgcactccagcctgggtgacagagtgataccctgtctcaaaaaaaaaaagttgactttgttcctytgttccaaggcaatatgaaagtgttttcacttccttttctttatactaacaatgacaggtttaaatctaaactgttagtgttaacagctgtgatagagtctagtaaagcattataacaattttcccgtgaattgcagcagtaattaattttatgaaaaagtacttttaaatgttgtattgtttatctttcaaccaaattatagcttagaaattgataacttaaaattcaaatatttggccgggtgcagtggcccatgcctgtaatcccagcactttgggaggctgaggcaggcggatcatgaggtcaggagatcgaggccattctggctaacacagtgaaaccccgtctctactaaaaaatacaaaaaaaawtagccaggcgtggtggcaggcacctgtagtcccagctcctcgcgaggctgaggcagaagaatggcatgaacccaggaggcggagcttgcaatgagctgagatcacaccactgcactccagcctgggcaacagagcgagactctgtctcaaaaaaaaaaaaaaaaattcaaatatttaaaaaaaatcaccttatttacatgtacagctttcgcaatatccaactgctaatctgcccctccctcaaaacagaatttactaatttctcttttaatttaaaagttatctgatataataattcatatgcacaacagtgtatgtacaaagataattattacatctttgtgttggagtagaagactggagacaacccaaatgcccatcagtacagactggtatatatggtatctatacataatggaataccatgcagcttttaaaaagaatgagatagatttctatgtactgacataaaaccacctctaaggtaaaatacttgtgttaaaaaaaaaaaaggaaggtggggtacagtgtacatcacacacaaggcccagcaatctcttgcacataacatttactactttgaccacgtcaaccttatctatcaaagtagccatccattaattccttcccacactccctttttcttttccagttctaacttcttattgaaataagtataatttcacatgccaaaacttccagggtgttgtaagtataatcaacaaggatggggggaatctcaagttaaatacaaacagaagccaaaaacaactgtctacaaaattatacttggagaaaaagagaactcaaatattctaaaacacagtattttactgtatgctgtaaaactaaaacaaagagaactacatacaaatacatacttcagttagtagtttgtttttttctcaggtaaatattagaaattctgaaactactcattatctattctaggattgagcaaataagtaaacatcttgagcataatgggagctagaatcctcaccattagataagggaacaaacatgggtaaggagaagtttagaatgaacacagtgatgttagatcaaaattgtggtatcaatcaatgtagaactctttgttatacacacacacacacacacamaactagatttagataggtgtctatgcatacacatgcatatatatttcatagctctgctaaaagggtctaaagtaatgatactccagtatcaatgtgtataccaaatgcctagattctggtttccaaataccattctggaaaaaaaaggaataaaggatccttgaagaaatgtatgatttcagggttggggcagggaaagtacaagaaaagcctgtaacaagatatgctaaaaagaaactgtttaatcccactgtgcaaatctgggacattttgagcatcaaaataatgataataatggattctaacctgcacaataaaataatccttgagtccatgttcatataaatacaaagagggagagaaaggggggaagaagggaaatttctagagtagaatgccaataaatgtataggtaatgatgaagtatcaggaagttatcatttgacaacagtatcagaccacaaaaccagtaggtgaaagtgtgatgagaaagagaatatttatctcrtctcaaagtatctctccaaaagacacttgttaataacaaagagaaaactggtaactttatgtggagaaacctagcaggcactaccttaatcaagaaaccaggattaggccaggtgtggtggctcgcacctgtaatctcagcactttgggaggccaagctgggtgcatcgcctgaggtcaggagttcaagacaagcctagcaaacatggtgaaaccccatctctactaaaaatacaaaaattagccgggtgtggtggtgcatccctgtaatcccaatcctacttgggaggctgaggcaggagaattgcttgaacccaggaggcggaggttgcagtcagctgagatcatgccattgcactccagcctgggcaacaagagtgaaactccaactcaaaaaaaaaaaaaaaaaatcaagataaattaccagtaatggaacaaatagataccacgtacatctttatatactgcactaaaagggacgcatcatttctatgatatccctgacccaaaaaaaccctaaatttaatcataaaactcaataaacataatttgagagattgtacaaattaaatggcctgtgttaatatcaatgacatgaaaaaaaaagatggaggaactctctagattaaaagaaactagagacatgacaattaaaagcaaactgtaatcctggacaggactgaagtccaagaaaaataactattttgctataaaggacattggagggcaattggaaaaatttatataaggtccgtgaattaggtaatagtactatatcagtactgatgtctcaatttcgataattttattgattatatataagagaatgtccttgtttttaggaaacatgcactgaagaacgttagggacaaagaagcatcttgtctaaatcttactctaaaacaaatcagaaaaaaattctatacatgttcacacaaatagaagaatgtcataaaacaaaaatgttttgttgtatgtgtaatgtgctatgggctaaatgtgttaccccttaaaattcatatgttgaagccctaatccacaaatgtgattagtatttggagaagggtcttaggtttagtgaggtgatgagggtagagtcctcatgatggaattagtgccttataagaagaggaaaaggccagagccatctctctctccatcacatgaagatacagcaaaaaggcagcagtcggcaaactaggaagagggccctcaccagacacctaatctgccagcatcttgatcctggactttccagcctccaaaaatgtaagaaataaatgttgcttgagccaactggtctatggtattttattatagagccacctgaatgaagaagacacatggcaaagtgttaacatttggaaataaaaagttaagagaaaaaattattgtaaactactgaaatgtctaacaacgccactgtgcttatctttgtcttaatcaaaaatacttaattacttcatttttctgaaagactcataatttgaaaatcagagttcaagaaacttgtcttctaatcctrtcattgtcaattactttctaggttcctttggcaaattaaaatttccctcagcctaagatttctcatcaaagaagaggaaataatagtttcagccaaaatgaagataaaggttgagtagcccaaatctgaaaattcaaaatctgaaatgttccaaaacctaaaactttttgaatgccaacatgacattcaaaggaaatgctcattagagccctttggatttcaggttttcagatttgggatgctcgtatcaaattaatataatgcaaatatttcagaatcctaaaaatcctgaaatctgaaacacttctggtcccaagcactttggataagggttagtcaacatgtacaagaatgaaatgaaaataagctgtatttaccagcttgtttccctcacctgtttctaaggctggacatcaaagagtgtttccttaacactttcaccctctggcagcctgccattctcaatagcaacaattctgaataactgaaggcagcaaatataatcttaaaggaggatgtgtggcattttacataacacattttgacaatgattactagttggtattctacagagtatagctacctgctctctaaagaagacatctactcatgaggttttcaaaaatacttttcaaagtcccaaaagggggcattattcttttctttggcttttctagggcattttaaatttatagcaataatacactttcagtgctttcctcatattttttgcctagttttcttggagaccacagcaacatatgcaccgttgccttctgttcttttaccccaacgtgaaagaaatatctttttcctttttttcaaataaaaattacattgggaggccgaggcaggtggatcatgaggtcaggagttcgagaccagcctggccaacatggtgaaaccccatctctacaaaaaatacaaaaattagctgggcatggtggtgtgtacctgttgtcccagttgctcaggaggctgaggcaggagaatcacttgcacccaggagacggaggctgcagtgagccgaaatcacgccactgtacaccagcctgggtaacagagcaaaactccatctcaaaaaaaaaaaaaaaaatgatgacaatatatatcaggcacccttcactgaagcaagtctgtatttcttctaagaagttaaatatcctaaaattttcaagtaaattgcatttataatttttttttgagacaggagctcactttatcccccaagctagagtacagtggtacaatctcagctcactgcagcctccacctcccaggttcaagcgatcctcctgcctcagcccctgaagtagctgggactaaaggtgcacaccaccacacccagctaatttttgtattttctgtagagatgaggttttgccatgttgcccaagctggtctttaacccctggcctcaagcaatccacccacctcggcctcccaaagtgctgtgattacaggtgtgagccactacacccagtgtgcatttacaatgtttaatagagttctcttttaaatatgttaaatactgtctttgtctgctttgcgttgctgtgaaagaatacctgagactggtattaaaaaaaaaaaaaaaaaatttggccaggcgcggtggctcaccagcactttgggaagctgaggcaggcagatcacaaggtcaggagttcaagaccagtctgaccaatatggtgaaaccctgtctctactagaaatataaaaattagccaggcgtggtggcacatgcctgtagtcccagctactcaggagactgaggcaggagaatcgcttgaaccttggaggcsgaggttgcagtaagccgagattgcgccactgcactccagcctggatgacagagcaagactccatctacaaaaaaaaaaaaaaaaaaaaaaagctcacagttgagcaggctgagaagttcaagggcatggccctggcttcttcgagggctttcctgctgcatcacatggcagagaaggtctaaggggaggtggacacgtgtgaagagagcaaaacatgaggagcatcctggctttataacccactcccgagaaataatcaattcctgcaagaactaatcctgtctcttgagagccacagctcactaccaggaaaacagtaccaaaccattcatgaggaatttgccccccacaacctaaacacctcccactagaccccgcctcccaacatcaccacactggggatagaatttcaatataagttttggtggagacaaatcacatccaagccacagcatataaccaggacaaagaaaatatttggaattagaattaagctattgtcttccaatgttttagcaaaccagttatacccttcagcctacaaaacttttaccatactaatgtgaatgttaggatatccatgcctcatggcatgcaacccatctacagctaccctaaggaaggcattaaaggcaagagaaagaacaaaagacaatggggtctcagccctttgacctagattgccatcatgggttctgtccaaaaaggactacctggttatagaacctctctaccacctcaaattctgaaaaagagactggcatttcatttaaaacatggatctggaaccttgctgatccatttggtcacacaaaatttttagtcagagattgtatgaattagtccctttccaggctcaaagttcttacacatgaagtgagtgtgactagacttcagatctccaaaacctcaccaagaacaatccatggagctacaattgcctctgcttaaattcttgggacctgaagattctaatttgcacacttgattgagttatacctaccctggcctgcttaatttaactcttacaaagttctagggcactgcctcagtaccagactgactcctttgttttttgaatgtggaatgctttacaaatctgcatgtcatccttgcacaggggccatgctatcttctctgtactgtccaaatttttagtattatgtgctgccaaagcaagcactcctttgttgtttcttaaacaagctgccttccatttctctaaacagagcacacctatcatgtgttcctctttatattagtcctggggtttctggttatcctgtccagaaaacagcaatctttaaggkacatggagtcaaatgacattacaaataagattgtttttacacgatcattgttttttaacaatgtcttccaattccatgagattaaatacttttatgtgataagaactyccaaatttatatctctagcccagacctctcttctgagttccagacccatttaatccaactgcccatttggatgtctcaagacattaaaaactttaaattatacctacccaaaatcaaactgttgatatctttttcccccaaatctgtttttcctgtttcaaaaaacaaaaataataataactctaccsaattgtttatactaggaaacacagatatgcttcctgatacctccctttccttcccctactatagttgattattattattcatggactgtacgtgtgaattctccactcattaaaatgtatctgtaacccccaaatcaatgctggtaacacttgcagtcattggcagacaygtgcagagtggcaaaaaatttgattcaccaagtgtgcacattcctggctgacgctgaacaagttaacattctgccttgtttccgctttcagatcataaacaagtgcaatctattcagtaccacattttttgcatttttgtgctttgtgttggtgattttgtttaaatggctcccaagcattgtagggctgacgcactgtctgatgttcctaagtataagaaggatatgctatatattatggagaaaatacatgtgatagataagctttgttcaggcatgttatagtgctgttggccatgagttcaatgctaattaatcaataatgtacattaaataaagtgtctttagattgaagcacacacaaaacaaggttattgtattgattaattgacaaaaatgtgatcagttgctcacaggaaactaccctgtatatcccctaggagcaggttatccaaacccatcacgaagtcctacagattctactgccagagcataactcaaatccattaacttctcttcgtgacctgtgctgtcatcctagctgattatctcttgcctctattgtttccctacttctaattcattctcaaagaggtcaaagtgactctcaacatgggttctatgttagtccctcacttaaaccatttaatgactttctttttcttttttttcttttgagacggagtcttgctctgtcacccaggctggagtgcagtggtgtgatctcagctcactacaacctctgcctcccaagttcaagcaattctcctgcctcagcctcccaagtagctagaatacaggcatgtgccaccacgcccagctaatttttgtatttttagtagagatggggttttaccatgttggccaggctggtcttgaactcctgacctcaagtgatccacctgcctcagcctcccaaagtgctgagattataggtgtgagccaccgcacctggctccactcaatgatttttctaatgcacttcagattaaatctaaaatccttaacaggtccatactactactgtgataccctgatgacctctcctgcttcatctcagcaccaaagtcaaggacttttctgcctcagggatttcaaacacgcagttctctgcctcctctctgctcttttcttgcctaaagtctactcaattgacaggtctaggtttaaacgtaacttcctcagagaggaaaccctttaatccaaatgcaggccctctatcatgcatgtttgtagcaccctctacttttccctcataacatcacctatttattatttattataatatttggttctccaacagactataagtccatgagggcagaactacacctttttaatttgcagtgttctagtgaaaacactagaatagtgttgagtatataattgaggtttgataggtattttctaactaaataaatgaatgcgtgaacctgactgtcccattatatcttattaacaataccttgaaacaacttagaatgactatttgcttccaatgtttggaaggaatgaaacacaaatttgaatatggcagtggtatgttattatctaagtgaaccttaattataaccaaaacatggtttcaggtgctacttcgataagtttctgcccccacctcccactcccgtataatatatgtactttaacaattagccaagactattcactaagcaaagaacattactgagcaaacagcatcagagaccatactaaataaacaaaccaccaaatggactgctctataatgagattaagctttgcacagttccaaaaaaattgaagttctagtataatactttgtatcaaccctataaagttattgtactttatcacagtgtaaagaatgggcaaaaaggaagaagcttttacttcatttaatcatagttttaaatgaagtttaatttttttccatttaaatagtaatttcttttcctttccctgtattcattctccagaaaactcaaatcaacattgagcaaatgttactaatttttacactaactctgcagtatttttctggaaatatgggggaaatacactattttaatcatcaggatctaagttcttcwaatttttttttttctttttctgagacagagttttgctctgttgcccaggctagagtacagtggtacaatcatggctcactgcaggtcctcgcaggctcaagcaatcctcccaccttagcctcccaggtagctgtgactacrgccacacaccactacacccagctaatttttttattttttgtagagatggagtctcaccatgttgacaggctggtctccaactcctgggctcaagaaatcctcctaccttggcctctaaactgctgggattacaggtgtgagccaccacacctrgccaagatctaagttcttcttaatttttctcctctgaagagaaagttcaagttctaaacctttagttatttctaatataattcttccacagcctcccataatatcctgaaattgtcatcctttctgtgagatgataaagtcttccttgatttgaaagcaaagaaaaaagtctaatttcatttttttagctctacacaattattttaacattacatgggaaaagaattttcaagcaaatataaattcaaacatgaatcaactttggtttcctgtgcatataacaaatcatctcataacattttttgtaacaattattttctgatatttagaagcctctccatcacagcaaataaaacactgacatccaacctgtgttttaacagactagataacrtcctgtttgcctttcatctacttactctttttgaattaccaattttaatatgtgtacaaagaattgacaacactcagagtacctggaaaatattttacttttttgcaaacactaaatctaaaagaccattataaagctctaggccctttgatttgctgctcctcttaactgttcatatcactcttaatggcccacagtctggccatgtattttattcatctgttagatacgagttctaaatttctcttcaaagaatcagcatgtcagtacgttcaattctttgccttctacttttaaacttaacttcttygtaaagcaccttttccgattaccctctccactctgactcattctgattacctactccaccctgactcattccgattacctgctccaccctaattccaattacctgctccaccctgattcattcagattacctgttcattctccatcctgactcattctgatttcttactctgccataaccatttttcctgccaaaccactcaccccgttactctctttaaattagccaatcggaattagtttagcctgtgcggtctaaccctagccaataggtgaatgacacagcagcaggggccacgtgcatcaggaataagacccccttttcctcccttgtccaagtgtgtgctcaccactgctccaactgtgagggtgtacccttctatagaaggaaactgccttgctgggaagaaaaaaagaaaattttatattcgagtgctatttcttttgcagcaccaaaactttataacaatttaggggctcrtctgggattacattcccctccagaggcggtctctggttctctcttgtgaggaggtgcaccccgcccccttgtggcgtcctcaggggtgagaaatcaggacccgcccagtgcaaggaataacccgagctctcagcaacacagaaagaaaccaaaccggctggcaacctsaggtaaaggatcctcacataccacagcaatgactgtgcacagaccaatgaagaagaaaccacgggagccagtaaagtacttccttggtggtcaaagtctggagggctgaatgtgtgtgtgcgtgaatgatcacagacaaccctgcttgtggtgttgtgtggatggtgacaagtcctactgctggatggagtgagtgcgtcctctctgcagttccacagctacctcrtatggcttagggcggatcctgctgtgggatttataccagcacgccaacactaagaagggcctaattctcccttgggggagcagccagagaggacaacatgagtgggaagtgtgcaagggaccttcagagggggaaaggggaggaaacatgtcaacctcccaggataggcaagtcaagacaccctggtttgaggggttgaggcttccggagcaggcaaggcaagacatccctggtttgaggggttgagccttccacggcaggcaaggcaagacatccctggtttgaggggttgagtcttccaggacaggcgagggaagacacccctggtttgatgggttgagccttccgctaatttcaggggctgaacctcaaagaactgagaaatccccattacgaggggttgaacctcaaaagaggtgaaaaatcccaataggggtacattgaacctcartgaggtgagaaatccccattgtggggggctgaacctcacagaaacctccagtagtaagaaaaatattcagaactcccctttcgcttcttctcgggggaaagaaaggctaaactccactcccactggtcgctcccctaggggaaggaggagagggaagaacagcagcataagcggctggcagaggcagggaaagaccagcagagaggaaagagaaactgggaaaggaagtcagagagagagagagaaagagaaagagacagagagtcagagagagagaaagagagagagagagacagagagaagtaataaaaacagtgtaccctattcctttaaaagctagggtaaatttaaaacctataattgataattgaaggtcttctccgtgactctataacactccaataccaccttgttgtcagtgtaaacaagggcacagcctgaaagcactgagatcactgacgacccatagccttcctatcaaaaatccttaacccagtaacccgcagatgacccaaatgcattcaatctgtaccggcaactgctttgctaacagaagaaagtagaaaaataacttttagaggaaacctcattgtgagcacacctcaccagttcagaagtatcctaagacaaaaaggtaacttactaactcaaaaatcttaaagtatggggctattctgttagaaaaagatgatttaacattaaccactgataattcccttaacccagcaggtttcctaacaggggatctaaatcttaattaattaccatataaaggtccgaccagacctagaaggaactcccttcaggacaggacgatagatggttcctcccgtgtgactgagggaaaaagccacaacgggtattcagtaagtgatagggaaactcttatagaagtagagttaggaaaattgcctaatagttggtaagctgtttgcactcagctaagccttaaagtacttacagaatcaggaaggagtggtctataccaattctaagttaatttaaactaaagaaagtcttattaatagcaaaggataattgaaataccaaacttacaaggttttccacaaaggtaaagtttgccaaaagttagcagtgtaatatgtattatcctaacttctaatcttgtggccttaggcagtctagtccacagacctgaaggaagtttgctttggaaaagaatggttatcatcttgggggaaaaaaaaggaggggggggagaatttatataaaaagaatgttatatggtaaattattatcctaaaataaattaactggttatttaaagaaagcgatgtttacaggaagtcagaaaattgaggcctgtcgaagattgcgaaagtcatgaaaaatgctataaaagggaacttatgcaagaaatgttgtataatttaaaagtaattaggcctcctgaatgtaaaactattgaagaaacagtttatgtgcaaggtgtataatgaaagtaaaatatacttttggtaaaaggataataaggaggcatagaatgtggatttttacctacattaaaaggttaaaaaaaattttgttttgagcgtttaagcaagttttaaaatgttaattgtaaaggaaattctgtgtgtaaccatattggctaaagttaaaggggtatcatccagtttttctgtgaactggacattaaaataaaagcacaatgggtttttcttaaaacactaaaaaacactaaactgctctttaacaaattttataaaaggttaaaaagagtctatggaaatcttaccttatggtcagacattaaaatcggataaatatgtctacagggttttattaaaattgagtttaatattaataatacactaatataaaggtgaaatttagcttatctggtataatcatacaggaagcactgtcaaatataaaatggtgtttggctttctttggtctaaaaactaataaaaataggtttctcaggaagtttctaaaggaagtttctcaggaagaaggcactaaggactataaagtccactgctggtgtcccccaatttttttttttttttttgagtcagagtttcgctcttgttgcccaggctagagtgcaatggcgcgatctcggctcaccacaacctccgcctcccaggttcaagcgattctcctgcctcagcctcccaagtagctgggattacaggcatgtgccaccaagcctggctaattttgtattttttagtagagacaaggtttctccatgttggccaggctggtcttgaaactcctgacctcaggtgatccacccgcctcggcctcccaaagtgctgggattacaggcatgagccaccgcgcccagcctggtgtccccaaatttaaaacaaaagatcagtttctcataaattatatacttggtttatcttccactttcctttccctcaaaactacaagtcttttagcacaggtaccacccctagaatttctggtaaacgggcactagcctggggatcacaccctcatcaaagggtagaaagaaggaaaactcaagccagcctgagaaggaccctaccttgtgctgctaaccaccaagactatggtttgtaccacagaagggggatggacacatcacacccgagtcaagcaagcaccattaccatcagaatcatggaccattgttcctggatcaagccttaccaaattaaagctaagaaaagcttagtctatctatcttttcctttcctttcctaacacagtgcctatatccattactgttcctaccactagcaactctaaccccactttagagcgtttctatggtttaggagcagaagtcactggaaaggaccctataggcttctttaagatgygctttgttctccctgctctacctcctacaactgcccctttcacaaacctacgaaataaaactatgcctcgcctcatgccaaatgacaaaagcaaggtctcagtagtagaaataggagacctaaggcaaaccatagctattgacagggtataaagatgtaaatgcctggttaaaatgtattaaatattccattcacactttaaacaaaagtaactgttacacttgtgtgcacggtaggctagaggcccaggttgttacctttccactgggatggtcctcaaatcaagtggacatggagtgcatggtagctttttcaagattctactgcctggaataacaaattgtgctaagctctttctctgctatttcctgaagtccaacaccctgcaggtcagcccccaagggccatccagcctccatcttccaaaaccaattttacctcgtgtctctaacgacacggggaaaaatttggcatttcttggagacttaacaggatgcagtgaagttaggcacttccaagaggtgacccgtcaatctgcccttattcatccctgagcggatgtatggtggtattatggaggacctttactggacactctgccaaataattagagcagtagttatgctctagttcaattggctatcccttttactctggcatttcatcaaccagaggaaggaaaaataagacatcataaagtgagagaagctccttataggtcattcaactctcatgtctatttagatgcaaytggagtcccacggggaataccagatcaatttaaagcccgaaatcaaatagctgcaggatttgagtcaatattttggtgggtcacaattaataaaaacatagattggataaactacatctattataaccaacagcaatttatgaactacactagagatgctgttaaaggaatagctgagcaattagggactaactgccagatggcttgggaaaataggatagccttagacatgatattagcagaaagaggaggagtttrcatcatgattaaaactgaatgttgtgccttcatcccaaacaacactgcccctaatggaagtataacaaaggcattgcaaggtctgactgctctgtccaatgagttagccagcagctcagcggtaaatgacccctttacaggatggctagaaaagtggttcggtaaatggaaaggaataacagcctcaattcttacttccctcacagctgtaatgggtgtactyattcttgtcgggtgctgtgtcataccatgcatctgtgggttggtgcagagtaagtgctcatagaaatggcacttactaaaacctcccttaactatcctccaccttatccagagaagcttcttctttcggaaaattgagcagaactaagccaaggcatgttaaagaagtttgaagagaaagaggtgtaaggaaaatgcaagaggaggggattgttagatatgagttctaaatttctcttcgaagaatcagtatgtcagtatgttcaattctttgccttctacttttaaatttaacttcctcgtaaagcaaccttttctgattaccctctccaccctgactcattccgatttcctgctctgccataaccatttttcccgccaaaccactcatcccatcactctctttaaattagccaactggaattagtttagcctgtgcagtctaaccctagccaataggggaacgacagagccatagaggccacgtgcataaggaataagtccccttttcctcccttgtccaggtgtgcgctcaccattgctccatctgtgagggcacacccttctatagaaggaaaactgccttgctgagaagaaaaaaagaaaattttgtattcgagtgctgtttttttgtgtgtggcactgaaactttatttataacacatatttttcatattcgaactacttcaagtggattagtataagccttttcaagatctagaaccaattttcaacactttcactcggtatgtttcccaaaatgatagccatgcttgcagttgcattatcaactgtctcatcacacattgctgaagctgaagcaatcacaatgtcgtgtaacatttcaatatttaaatgtaatrtctgtttctacataaaagcctacacacaacactattcctccctgcttcccttcactcaccaacacacatcttgaaacctgtatgacttcttaactgccccaatgactcctataggtccccatctcataaatctttcccctggtaatttacctattagattttatttaattttcagcaccccatattattttctcaaattaaaaaaatgaacaaactgaagcttaaagaggttacaagtgtgtatgcagccacaatctcagtctaggattaaaattaggtctatctcctccaatgcccctaattcttaaccctctcttataccacatccttagctaaacaattcttgcatgatgtttytgattcaaagcccagtgctgccacatattaacagtgtaatcttaaggaacctcagatgctgcgtcaataaaacaggggtaaagtacttaccttgaaaatgtggaagaagtaaatgagaaaacacaaaaaacacatagcacagtgcctagcacttaacataggaaacactcaagaaatgttattattattatattcawccaaaacacaagtcaataattgttttctgtaagggccaaacagtaaatattttaggctttgcaagccagtcagtctccattacaccaaaaccagggagcaagctggatttggcccatgagacatagtttgccaacttctattctacagcagcgttcttcaacctcagcagtactgacatttggggctgrataaatctttgttgtgaggctgtcatggggattgcaggatgtttagcagcatccttggtctccacccactagatgccagtagcatctctcaagttgtgacaactaaaaaatcttctggggggcaaaatcacccctagttgagaaacactgacccagagcaattaaacatataaagatgtagcttgaattttctaacaaataccctcaccaggtagaaaaataatttaacacactataagtatttatactcacttagctaaaattcccacacttagcaataactttataacttctgtgatacacacggctgtsgttgaaaagtagagttctttgtctgatgtccttgtgtatcttaaagctatggtatagactgcagccatcagggtcatcactgccaagcagtataacttgaataataaagtgacattgtctggaaaatacgtgcaacaaagacattacttagtagacaatatatgtatatataagttaataaactagttatagcctaaaaatactttccaattccaagcacaaaatattttctaaaactcatgcttaaaaatttttttcaaaacaatgtttgccaattacatgagcgtgcacacacacacacacacacacacaccacagctgactttaaacatcagccaattaggcataagttttgttcctagggagtgccccaattgcaagactatgtagcgtactgattctagttcaggatgttataaattacattatatatatattggtggtggtggtgggtttttttggagacaaggtctcactctgtcccccaggttggaatacagtggcgcgatctcagctcactgcaacctccacctcccaggttcaagcgattctcgtgcctcagcctcccgggactacaggcgtgcactaccacagccagctaattttttgcatttttagtagagatggggtttccccatgttggccaggctggtgtctaactcctgacctcaagtgatccgcccacctccgcctcctgaagtgctggaattacaggtgtgagccaccgtgccagacatatattttaggacagggtctcactctgtcacccaggctggagtgcagtggcatgatcttgacgtgatctcggctcactgcaaactccacctcccgggttcaagcaattctcctgccttagcctcctgagcagctgggattacaggcacccgccactacacccagctaatttttgtatttttagtagggaagaggtttcaccatgttggccaggctggtctcgaactcctgacctcaggtgatccacccacctcggcctcccaaactgctgggattacaggcattagccaccacgcctggccccagcacatattttaaatatttttatgattacaaacttgtggatgcaaagcatgaaaccaactgcagcaatgtatattctagatttaaaggcagcagaaagaaaataataattgagaaatgagtggggcttaatataaaactttttcacaataagaacttacaactagccactcatttcattgcattatacaaaacaataattcataacacaggaaaagaatattaagaacacacctctataaaactagaaatgcaggaaacatataaacacttaatttaagaattgcctgcaagtatatctgagcagcagccatctctcaggcaccagagcctgtccaagacctttggtaaaaccataagcagtgggtaccaagtctccctcrtacttccttattcccagacctgctcgggtactgccatcacccaaggatcaaactatttctactttcctcacccacctcccacctattgtcccccagttccccttcacctccattcaaatctttaggctcaaggttaaacagggatcagcaaatttttctgcaaagggccagaaacaaatattttaggctttccagagccatactttgacaactccaggttaagaaccagaaggacaccaggtgactccagcctgctactttaactacattatatgctaagtaagattttgttcactgctttgggagcctaatcacaattcaaagatrgttttcatagggaaataaaacaggagtttcaaacagattatctttagatacagtatggttggawcttacaaggaaacaggttcttcaatataaatattttcccgagtgcattaaagaatattttctgaattgtaggcaatttttaaaaaccatatcaggttttaaataaaaagtaaaacagaagaaatagtttttaactgcttaaactttctttccaaaagatctgaggagccaaaaaatcagtgtttatataaaaggaagtgaaggagatcactataatacttcctttgttctaaaactttcctacacaagggaagaaatatgacttcaaaaatatacagcaataacctttaatcagtagaagagaaggcacttcccatcttctagataaagggtgaacaaactatatatgtcgccagtttacatgaggcctgtgaactcacgattgttttacatttttaaatggttgataaaaaatgtaataacatcttgtgatatgtgaaaattgcaggaaattcaaattctagtgtccatgaayagttttattagaacacagccatgctcatttgtttctaaattatccaggctacttttttttccctacaacagcagatctgagtagttatgacaagagactatccagcccttcacaggaaaagtttgccatctcatgtcctagattatcaacactttcataaataagagaagttagggctgataaactaaaaagtactttattttagctactgtacaggttcctgattccaaaaacaacaaagtgaatatttaaacactaaaccaaatattgatagcctacaaacatattctgacttataatattgtcattaacttgaaaaaatacctttttgcatagtgagtatatgggaatatatattatattcttgaaaataactactgatctaagtggaagggtaatcaaataagtttaggtatgtgcaaaacagattgggctttgacatggaataccagtttttaaacgtatttcaacttttaaatactaaatgtttttaagtacgattttctctggcagtttaacatcagaccaaactatttcttgttcactccattcacaaattctccagtataaaacttcagttattagcaatttcaattatttcagggtaacagcaaaagtccatatgtaatcacttcaaattgggcaaataattcaaatcacacccaatgccagtaactataaagctagcccacaactcaactggcagccacatcttaaccctgcattgttccctgcttctcacgaaattctattagctcccatatagtgtttgtgtggaaatgtcccccaaaagaaacttayagtttaaaatgttttttttcggttatgttttactatagtttatggggacattatttgtaatacttaagaacttagaaattctgtaagtcccagataaatcctttgtggatattcggaaactatggaaactgtagttttgttaggattacaatcaaggctcaacaaatatgtattggcaataagcctaaacctttacattgttgcagctatttcaagtaatgatttgacttctgtaatttataagttttcgttcggatcaattttgctatccccattccattttagttatcaaaacaattctatttctttttcttttatttcctgtgttgctacaaaaaaaggcttttaagattggacttatttgaaatgaaacagaaagaagacataagagaagcatatgcaactaaagacaatgcccctgggcagggcctgatgagaaacatggaccccgcaacagggaaaayaacttgaaacccacgcaagaagatattccttatgtattcgttcaatatttattcaagggtgaagccaagtgctctatggaggaagggtggagcaagaatccgggtgttgcccaacttctcctggttaatgcaccacagtcaaagaatccacctctggtcccaacttacacacactgctcagcaaaaagtggtgcggagtcaattagactcgccctccttaaatgtcaattagtcaacaaatacgccttcacccgaatgtgccatccctcaggaggagggaggtggatctcagcttccaccccaaatagcagcatacagcattctctataattacacacagcatacaggtgggaactgttaacgactgttatcttcctttcgttacgatttcagtgctgttttgacgccccagtgatgtctttagtggttrttgcatggcccagccgccgcatgggatctgcgcccggagcctgcctttaagcctctgagcatccacagggtaggaggcgcagaggagaccggagccgcggggccagggtgaagaactgtcctgcctcgctgggtaatgcggtccagccccggacccacgccctggcctctctccgggtccgccgcagccccggcctgtcagaattcggttcccacccactcccagctagtggaggtcagtgcggtctctgactccgacctgcccagcgcggagtcagccgcggagactgcagccgcagcggaaggcaggctgccctgactgccgggagcggctccacgcaaactcctgacgcctcagccaggccccagaggcactgggcaaccagggtgctccgctgcccgacaggggctgaccagcgcagatgctcgcccgccgccgccccccgcggactccccactcccagcagacccagttctcacctctcggggmagccatggttccccgacagccccgcgcggaactgacgcccgccccctccgcgcccccgcgcaggacaccggggaccgccccttgtggtcatagagacgaagccgctcggcctagagcgcctcgccggcctcccggtcggccacgcactaaaactgggctcaggaatccaagctacaccccaaaatggggagaacgcggatcgaagggaggccttcccggccgcgtcctaggtgacaggtgtgtgaaattcggttggggaggtagttctgtaaactgcgtctccccgccrgctaaggaagttgagtgaagggagcgttgccgtctgggaatcgtagtcctcacaaaggcgtgagtaggcggcaaataaggatttgggtttagccttggggattcactcctgtcaaagctgttagagaagctcccagaactcgtaaagtaacagaaactacttgcggcaacatttgtaacttccacctggctcattatcttccactgttaccttgtgttctagataagttataatttattctacatatcgttcagaagtcttgtgcctgttccatatcgtcagcagtcatcggttgtatttacccagccaggcattctaactaatgatcttcgcacaacaaaacggcctttaaaaaatcagatgtatcggccgggcgtggtggctcacgcctgtaatcccagcactttgggaagtcgaggcagatggatcacctaaggtcaggagttcgagaccagcctggccaatatggcgaaaccccgtctttactaaaaatacaaaaaattagccgggcgtggtggcgcgcaccggtaatcccagctactcaggaggccgaagcgggagaatcacttgaacccgggagattgcagtgagccgagattgcgcccctgcactccagcctgggcgacacagcgagacttcgtctcaaaaaacaaaaaaaattagatatatcaacaggcattttaaccactataatctccactttcactaggggatgttaattagctatcataattgatattagaaataattcattggtgaaataaatgatgttcaagatatgtggattggtttaaaataatatgaaaatacctcagcacttacaggaatagggatgcaagattctgagctgcccagcagcccacaccttctgcagcatgttctttccccaaaattgtccttttagagggttggttgtataccattgtcttgttaaatatacatatagatatatctggtctgttaacattgttggaacattttgcatgccttattagcatcatattaatattgggaggggctcccaggagaccagagttgactttgtagaggcagacatttgattaatctcattttgcaatagtgttggacttttcctctacctggtagtaagtgtgctcactggtgctaatcttcccttattgtaattgatacagtttccactagtagaattattcagttctctactgtgtatgtacttatgcatacatttaaacaatattcatatatgtacgtgaaattaattttaaaaattaaaaatattatatcatatagtccttcgttttacagctactgctttgtatggtttatcttgtcccattttggactatcattatagtgtcagcttacatcaattaagtataatttctaaatgctcaatttgttccaaaaggcmcttgtaagcctgcctctgttttcaagtctgcaccagctgtttttactttttttttttttttgtctttttttcttcttgtagagattgtgggtgggggcgtctcactttgttgcccaggctagttctcgaactccccacctaaaacaatcctcccacctcagccccccaaagttctgggattacaggtgtgaaccaccacacctggcctgcactagctttttgaagcatgttttaatttctggcaacaagaggttttgttttttcctgtcctaggtggtagaatcaactaggaactatcattccttctggtgaggaagcgcattttacacacacacacatgcacacacacgcacacgcacacacacacacacacagagatcccaattaaagtggtgggtcaaatgytgctgagccatttttgtggcatttctggttcacataacatcatgctgttgaatcctacttttcttatacattttcattgcctcaaaagactattatacttcactggcatcaaacttaactagattttcatgcctctttgtcctaacccagttagcccaataccaacaggacaaatctgccaaactatagtctgacaaagttgagcttactgatgccttctgatataaagtgggtatttgtccctgcccagatstgatgttgaattgtaatcctcaatgttggaggtggggcctggtgggagctctggatcatgaggacagaaccctcaagaatggcttgggccatcgccttggtgataagtgagctcttgctctgagttcacaggtgatctggtgttttaaaagtctctctctctctttctctctctctcctgctctggccatgtgatgtgcctgctcccacttcgccttccaccatgagtaaaagctacctgaggcctacccagaagcatatgccagcactgtgtttcctgtacaggctgcagaatcatgagccaattaaacctattttcttatgcattactcaggctcaggtatttctttatagcactgcaagaaccacctaaaacacattccaatgagggaaactgaacaccagaggtatctcaggaaacaaaaaagataaatttatagaattttagggaaggatgggattaggtgaaatttaaaggaagcagtgtttgataaactcaaagcaggactatatgtatccaatagggactgtagaacagtctcaggatcctgtttcttgaaaactacaaagttaccatagatgtggaatgttgtattcaggagccccttaattgaggctgcttctttgtatgaaaatgatgtagatccccccaagcaaaagtagggtgtttcattcttactgatgtaatttcaagcagcaagttttcctagagtatatgattttagagaacaaagtttttcagtgaattagaaagcaaacactcaaagaagggccttgctattatactttatagtgtcagcatatacttagttatttcccattaactttgcagcagggtttacctgggtttgttatcccagctcaattaatgaccaagcagctatttacagtcttactctgaactaatttttactttctcactctgaattatcctcagtcttggaggaaaaaaatattgatttaatgtctttctttcatgtgtgcctagttttccttacaactctggttagagaaagcagcagcaatccttaacatatgagatacaagcccctgtgcctgataagataaccttacagtgcttcaagcagccattgctaatgccacttgagtccctaatgatttctgattgtcactagaaaactacagtatttgcctcaatcccctgctctcttccatttcctgctcatgtatcagagctaccctagtctcaatgatgtatataaaaagaagcccagtactgtatccattggtaataaagtaaaagtatgaacttaattaaataaaaaggctgtgaggaagcaaataccaaaaggcttaaggaggttataattgaattcaaatatggtagctatataatagattattaaatgtggtaatgtttaaagaatagtaagcagttaaccataaagaacatatatagatatagataccaaaagaaaattatttccctgacagtttaagcatatttctttcattgtgctattaagcatccaaaacctatttgctaagttattgtttttattttatttatttttattttttgagacagagtcttgcattgttgcctgggctggagtctaatggcacaatcttggctcactgcaacctccgcctccagggttcatgcaattctcctgcctcagcttcctgagtagctgggattacaggcacacaccaccacacccagctaattttttgtatttttagtagggacggggtttcactatattggccaaactggtctcaaactcctgacttcctgatctgctgcctcagcctcccaagttattgttattttaaagcaattatttcctacagtataatatgactaaaaagccaataattgtcacattttataattgataaaaggatacagggagataatgtaaaattcaatgtctggattaggaattaaacatgagtaataatcatgtgtatccagacatttcatatttgagcttaactatcccttgcckctcttttcttttttcattaccgtaatccctctttccttttcctgccagtcactgatggtttgtacctatttctaccattttatgcttgctttgcatcaatggtatttccactcaagccaactctaggaaaagagagtttgacaattgcctactccactgataactctaatccatcatcctcttttgttattcaccattttttgaaagtcataatgtgccaagcattattctaggcattaactgagggctagaaaacaaaaagtgcagaaaaatgggcaagggggtacaatagacctgaaacattggagaatctctattctcttagctaagattgacatggcacttaccaggtaagtgctttttatgtgttaacttatttaatccttatgacaacccaatcaatgaatttggaactattattatctcatttttatgatacagaaactgcagcagagaggtgttaagtggtacagctggtaagtagaagagctagacttttcttccatgatcacagagcttactttacatcttttttctattcttctgactgctactctgtcttattttgtcttctcttcctcctcatgtaacccctattctcatggggatgacctcccaaattatctttgtgcagcccaaattcctatcacctctgctttactatccttgtcatctcttaaactcaaattttctagtgctgaacatgttatyctttttgaccaaccagctccccttctcagttatcctttatctcctagggcagaaagcctgaggtcatactttgaatttttcttccttttcctgagatattatatcttgtccgcttaatttaatctagcatttgccccccaacatcccccatcatgcatgccccgttcttgcaggagcttcctagccatctctccaaagcgagtatccctctcccacaatcaatattctactcaagaatctgccatgattttctaatgtcctaccacaggaaggcaaaatgtttctctgcttggctttcaaagtcctccagaaagtaaaccaaccaactctgtttattcaactttatttgccagtacttcctcaaaaataatctccttttccctctttaccatttttctccctctycttttgcaataactactttattgctgaattctattagctcccaccttgactattcaaataatcactcaacgaataccctgcttccagtttgccctttcattccttctttttttaattcattcatttatccaacaagatacaaatgccaggggatataaagatgactaatgcataattcaaatctcaagaaattcaaatttaacaggaagaatacagatgcactactatctatacatcaatttattttaagtgctataataaaagtaataataaaatccaatgaaaattcaaagaaggaagcaatcaacttgctcacaagaaatggggaaaactttcatggaaaagataaagtctgatcacactctttgaggactgtacctgtggactacattccagggcagagtgtgaaaagcacaagttaagagtaggtgtataaaagaccattacctatttgggctgggcgtgggggctcacgcctgtaatcccagcactttgggaggccgaggtgggcagatcacttgaggtcaggagttcgagaccagcctggccaacatggcaaaaccccatctgtactaaaaatacaaaaattagacgggcatggtggcacatgcctgtagtcccagctactcaggaggctggggcatgagaatcacttgaaccagggaggcagaggttacagtgaaccaagatcacgccactgcactccagcctgggcaacagagcaagactctatctcaaaaaaataaaaaaaataaagaccatgacctatttgaagagttttggttcaatctggctaatgtgtgtggtgtgtggagagagtatgggaagagtaggagaggaaactggaggataaatggagatcatattttaaaaagttttacataatacatgaaggaggttttagttcattccctaggaagcggacaagagtcttggtgacttttaagcaactgaggcaaaggctgtggggaagaggaggccagatgacaggatcagatttatgcatgagaaaacatcctgatgaaccatatagaaaaatggagagagcagtgacccaggcagtaagacaaagtcctgctggggaggtgagaataggaagacatgaatctcaatgacaattcaggtcaaatgaacagggcttgaaggctagtaaagtgtagggggagaaagacaggaagtttttaacttatgctactgagtaaggcagtgatgcctttgaaaatagaagaaaataaagagaaagaaacaagtttggcagagaaagttattttgatctgtgacctgctgaaatgggggtgaccatcagacattaaattcagcatatggttggaaatcttcagaaggatagggcttgaatagatggtggaggtccagggagaggatgagttttccattggatgtagctccctttattctgttgtacttaccaggtgactgtctgatattaggattgggtttttaaattggatttggtatttttattcacttggccattctacttccaagccttaacttgataagcccaaatttcaggttacagccattcttttctgtgtttaggaatcttgcagaatcaaataagggttaattgaacagataaaatgacattcctgaatttgtaaattttagtatcaccccactcctccaggccctgccttaacagccagccagtctatcttaaacatcatttgtaaactacaggtatgaaaatcacaaaaacttagaagtaggtttgtttgaagtttatatgcagaaaatggatttgaaagcatattcatagtataaatcacatttaagtagccaggtgcggtggctcacacctgtaatcccagcactttgggaggccaaggtgggcagatcacttgaggtcaggagttcaagacaagcctggccaacatggtgaaaccccatctctactaaaaatacaaaarttggccaggcgtggtagtgcacacctgtaatcccagctacttgggaggctgaggcaggagaatcacttgaacccaggaggcagagattgcagtgagccgagatcgcgccactgcactccagcctgggcaacagagcaagactccatctcaaaaacaaataaacaaaaacatttaagctacacagaaagcaaattatacaaatgccttagtaaaaggtcacctgagcagaaaaaaatacgccaaatacaaatgacctcctagctactaaagcaagataaacagcccttcctagaagctttattatccatgaattggtattagaagtatgtaagacagtaataaaaccacagttataaaatatagctaccagcaattcatgggagctttaaacacaactgcctatgcagtcaggcaaataaggcaaagcagtgacgtgggaggcccataaggcagcaggaactagattaggcaatggaggattgaaagtgcctgccctatgaatgggcaaagctactacttgcaggaatgctggccaagtgttagcagatattctgatttcttctttttttgaagggccagaaatacaaattttatgtcaaatttctacattttgaaaaacaccatgtgaggtgggcatggtggcttatgcctataatcccatcactttgggaggctgaggcaaaaggatctcttgagcccaggagttccagacccgccaggggaatatggtgaaactctgtctctacagaaaattgttttaaaaattagtcaggtgtggtaacacacgcctgtggtcccagctactcaggaggctaaggtaggattgctttagcccaggaggtcgaggctgcagtgagctgtgattgtaccactacattccagcctaggtgacagagcaaaaccctgtctcaaaaaaaaaaaaaaaagaaagaaagaaaaaaacatcatgtggacctttgctccaattgttccaaattagtaaggttttgttacatatcagtttaatccatgttaacatttaatagctaacagagctgaaaatattgattaggttttaagtttgtaacrtttaacattaaatatggtttagaaatagacttctattccagtaataatcttatatttatatctaaatgttatcataatttcaatcttaatgctgacaaatttttctaacaaataaaagataaatggacagttttatttttcaatttcaacagaatgaaaaatgtgttacagaaaacagtttkataaaatatggsaacccaataaacagtcacacaaccaatgaatgtgccacccctacaaaattaatttgtatagatgttaatatacctttaagtacttgctattgttcataattgagtagcatctattttaaaacgttgtctgtaattaggtttcatccacatctctagttaagttcaccttgacctcatcggtgatttcgctctttcctccacgaagaccagccaagtaaatctgaggcctgggcaccccagtgctgtcttccctcatggactgggtgctagtgtcctttggagggtacacttgggaacaattttctcttctcaagtgactaagatcagtttgtactgagtgagtaactttctggcgcaaattagcctaaagagaaagagaatacaggaattaacatttctctaaagaacaaataacataaaatattatcagataccagttaatatctgcctatttttgtcttcaatccacaagaaattaattccataacatagcattttttctataaaacattggaaaatctagaacataatagaaaattaaatatcccttaccaagacgtagaaaaatatgtaaaatgttgaaaattgacctcaaaaaacatacagattcaaaattacagtgaactcaaccagttatttattaatataatctaattccttcattattatactttgagattcatataacttggatttttccactatacttgttttcttttaacaaaaatataagatttatacagtattatcttttaaaaatggacttcaccctagatttttaacataaaagagtctgatgctttccattttgtattttacagtattctacattttgcttactccctttatagattattagtaaacatgaggttaaacagattactcaggctgggaagcaaggaggagcttataaaaagaagaataaggttgctgcgcttatagtaaaagccaagaaaaaactcaaaaggcattatagcatgtgagtgaagaaggtgacacctggaattagaggaaacatttcagagtttgagatactgcaggtgactgagaaccgaaactactccccaatacccaggttattgtccacattaatatgactttactattccattgtcttcattagcatgattttaccattccaagagactcttgcctaagcaaataacttgattgctcatttcagtagtacctgagagatgtgtcaactcttcagtagtaagcatcaaaacacagtttcagtcctaagagtctgcatcccttgcctcaaaaaatcttcttgctattcccaccaatgctggactgctttttcatgatccttacccaatccgattcaaacctccatcctacccccagtccacctcagtcattggaagacctgccttagcaaacttcaaattctcaatcaattctgactttgcagttcctcttctgagacactgccaaagcactgttgaggtggtgttttcccttatggctgtaagcaataaactcagctttgtcttatccacaggttaggtaggtgacacttggggagctggcattcaatataatacagttctagggaataataaggcccaaggtgagagtcagaattaagtggagattgaggaatgggaagagagggctcagtcagtatgaagttcagacccctgaataccccattctcttaacatttccagtccatacctatgctgtcacctctatctctcctatcctatccagccatcacttccctcctcctctttgcctatttgtatctcaaaagcaacataaaatatcacctatgttaatttagtagaattttcatttcacttctgttacaccacttacaaggaggtaccacttacaaggaggtactgaaatatttttaatgtaacagtatcacttgctagaacaaagtagtgggatatatatgttacccaataaatctaatgaactcaagtgagtttagtagataatagaaaataatatgggggttgggcatttcatgaactacaggagagtaactgataggaaggaatactaatggaacaatgatctggaagatatatggggaaactgatccttcctcatgccagggaactgaaaagctgccaccagagtgagtagcaaaggaaataatgtggtcagtgggactgaatatacaaatggactgaatatacaaatggacaaaggctagaccatatatgacaatagaactctttgacttgcagcctgtacatcaaccagtcagggaagccagtctcaacctctatagctgtagcagttgacccagaatgttgaagacttagccaacttctccattttttggccccttctgccccaactcaggaccaaccagagaaacctagatatgctcaccaaaccaatctcataaaatgccctgcttctagttagcctgcttccagctttctcatgttaacaaactacaatcagagaacatctgaaggcttcccccttttctgactataaagmtttcccactcccctgcatgctttgagtctaccaaacacaagtgacagtgtctgactcccttgctacagtaagctctaaataaatagcctygctttgttctcatttgggtaggcattgtttatttccacacctgatttcagttaaagagatggataaaatatactaaaaaggggctacagacataaaatattttattttttccatactataaatatttgttgtttaaaatgacaagataccataaagaggggatggtgggggtaatttcactsagttggacagggatgagagtttcaaagacaggctttaagggtaggtatctatattgtaattaaggtgactgagaatcagaaggatgagagtgcccagggtctggagataatatgttgttgaggggaaaatatctatgctttaatagaaaaggtccaaaaaacaaacaaaaaaaagaatggtataccttaagtgattaaaggaagttgggagtgctttaaatactagcaccaagttttaaaactgatgatagacagatagatatatagatattatcattgttctatatatgcttaaaattagaagacaatcttataatgtaaacctagcaagttataaattatatttttgttagcaaagaactctgtataaaactcattattttatataaataatttaatttaccaactctatgagtaacaatagattaaaattccccaacatataaataattctagaaagtattgttacaaaccaattttatagcttttcttcttaattcccattcattccactcatatgatctcacaatcgttggtggcagtatgtgtgtattcgtctgtgtgctactttcacattttgtaattggttttatataatgtttgtcagcatctctcatctaaagaagtggagttttgtagttastgcwtgtaaaaaataaacattatttactgataactaaaatatttagctaaaactaacraaacacttaaaaaacaataatttttggacatggaatatacttgtaaataccaataaagaaaataaacacataattaatgagctgaatataattgtttttctgggaattatggcttcgtgattttgttaatgtagggggtgtttttttttaacttttattttagattcaagggggcacatgtgcaggtttgttacaagggtatattgcacaatgctgagattcgaggcaggattgaacccatcacccaggtagtgaccacagtacccactagttcatttttcagcctatgcccccctcccactctttccactgttgcagtctccagtgtctactggtcccatctttatgtccatgtgtacccaatttttagctcccacttataaatgataacatgcagygtttggttttctgtagaacatgtattttggaaggagaaaacatccctcattcccaagtcaaatatccctccccactttgcacaactgataacatgagtaaatacctgttgaaaatggatagaaattgaaaatagctttattaggtaaaaatcacatctatttgaactatcaaaacctctttaagacatatgttgaactcaagctatgcatacatagcaggttattatccaaggtttttgctttgtttttagttgaatatactgattttcttttggggaacccaatattaagaattcactaattccaggctaaacaagacatgatggtgctggacatgacattgttgacgttgttggagggagtggtagaggtttaaggtacttaggtcacagtaaaaaggagggagaagatattctttccaaacaacagataatcactgagtgtctaacatttgatataatttctgactataaaattatcttatgatatatttaggtagattttaaaaatgctaaaaagatagttaataatactgtaccatacaagtaaatggcaagtaaattagacagcaaggactacatgaaaaagacagagataaaactcatttctgcagatattaaaggtcactgaagaacaggtgggaattaaatatccagaaagacaggaaaaaacaagaccaggtgtataggaaaaaattatgctttagtggaaaacgaggcattatccacatacaacatacctttccagtcgtctgattctagcctttcactgtccttggggtatcttacaactctgtaagttataagtgagtgatagcaagaccaaataatttctgtctgtagacatgcacagtatatcctgtctgtagacgttcaactgacttccctttccccatgtggaaaaatcagcattgcctccatttacacattcatttgaatattcctgatctataaatgtgtctgttcttagggttctcttttgaactggttataacatctacctggtcccctcattgattaatgaatagattactcttaacacatgttgacttttatatctgcttatctgcatgacaataattttacccatttctgaaaactatcttttaacaaatagaagactagagcatatagaacaagtattttaaaaccagtatataactcacaatttttctgacagagaggtcatggagggaattagtagaaatagaagsataaaaagacatgtatgcctcgaacaccagtccccaaaatttggatttcatcttacagacaaaaaacggaagagttttgaattcagagtaaaatgaatggcattttctaatttgcagaaaaattattaaaattttctattgtaaattttcccctcataatttttcaaagtagttggctcctgcaatcatttgttctaaattagaattttgtataacatctaattaagcaaaaaattacatgtattaaacttaagatagcaacatttataatactcatcaaaatgaattatcagctccaggaactctacaatttgaacaaatttgagaactactgacttggtaaacttaatttggtggtattttttaatttttatgggtacacagtaggtgtacataattatcaggttacatgagagattttgatacaggcatacaatgtgtaataatcacatcaggtaaatggggtgtccatcacctcaaacagtcatcatgtcttgttatgaatattccaattgtactctttcagttattctgaaatgtacaacaaattactgctgactgtactcaccctgttgtgctataaaatactagatcttacgccttttatttaactatatttttgtacccattaaccatccccatttctcactccccacaactacctttaccagccctctggtaaccatcattctgctatctccatttcaattagtttagtttttagctcccacaaaggagcgaggacatatgaagtttgtctttctgtgcctggcttatttcactgaaaataatattctccagttccatccgtttttgcaaatgacaggatctccttttttatagctgaatagtactctattatgtatatgtaccacattttctttatccagttgtctttgatggatacgtgggttgcttccaaatcttggctactgtggatagtgctgtaataaatatgggagtgcagatatctccttgatatactgatttcctttcttttgggtatatacctagcagtgggattgcaggatcacatggtatttctatatagtttttttaggaacttctatactgttctccatagtggcttactaatttacattcccaccaacagtgtactagggttccctttctccatatcctcaccrgcattcgttattgcctgcctttttgatataagccattttaactggggtgggatgatatctcattatagttttgatttgcatttccctgatgatcagtgatgttgagcaccttttcatatatctatttgccatttgtatatcttcttttgagaaatgtctatccagatcttttgcccatttttcagttggattactagattctttcctaattgagttgtttgagctccttatatattctggctattagtcccttatcagatggatagtttgcaaatattttctcccattctgtgagttgtctcttcactttgttgttttctttgctgtgcagaagctttttaacttgatgtgatcacatttgtccatttttgctttggttgtctgtgctggtggggaatgacccaagawatctttgcccagtccaatatcctggagagtttccccaatgttttcctgtagtattaatagtttcatagtttgaggtctcagatttaagtctttaatccactttgatttgattcttgtatatggygagagatagggtctagtttcattcttctgcacatggatatccagttttcccagcaccatttattgaagagactgtcctttccccaacgtatattcttggcacctttgtttaaaataagttcacagtagatgtatggatttatttctgggttatctattctgttccattggtctatgtgtcttgtttttatgccagtaccatgctattttgcttactatagctctgtagtataatttgaagttaggtaatgtgattcctccagttttgttctttttgcttaggatggctttggctattcagggtcttttgtggttccatataagttgtaaggttattttttctatttcttacagaatgtcattggtattttgataaggattgcattgaatctgtagatgcttgagtagtatgaacattttaacaatattaatttttccaatmcattaacatgttgctttgtgtcctcttcaatttcttttcttttttttttttttttttgagatgttgtctcactctgtcgcccaggctggagtgcagtggcacaatctcagctcactgcaagctccgcctcctgggttcatgccattctcctgcctcagcctcctgagtagctgggacaacaggyrccygccaccacgcgtggctaatttttttgtatttttagtagagacggggtttcactgtgttagccaggatggtttcgatcttctgaccttgtgatccatctgcctcagcctcccaaagtgctgggattacaggtgtgagccactgcgttttcagccaacctcagtttctttcatcaatgttttatagttaycttcatagagatctttcacttctttggttaagtttattcctaggtttttaattttatttgtagctattgaaaatgggattactttcttgatttctttcagattctttgcttttagcatacagaaatgctactgatttttgtatgttgatttcgtattctgcaactttactgtatttgtttatcagttgtattagttttttggtggagtcttaagatttttccaaatgtaagatcatatcatctgcaaacaagcataatttaacttcttcytttccgaggtggatgccttcatttctattgtctgattgctctagctaggaattccagtactatgttaaataacagtgttaaaagtgggcatatttgtcttgttccagatctcagaggaaaggctttcatttttcccgttcggtatgatactacctctgggtctgctgtatatggcttttattgtgttgaggtatattccttctatacccagtttttttgaggttttttaatcatagaatgatgttgaattttatcaaatgctttttcagcatttgataaagcatatgaccaattaaaatggtcatatggtttttgtccttcattctgctgayatgatgtatcacattgatttgcatatgttgaactatccttgcatctatgggatgaatcccacttggtcataatgaaagacctttttaatgtgttgttgaattcagtttgttagtattttgttaaggatttcacatcaatgttcaccagcaatactgacctctagttttcctttkttgatgtgtctttgtctggttttggtatcagcataataattgccttgtagaatgagtttggaagtattccctcttcctctactttttgaaagagtttgagtaggactgatattcatccttctttaaatgtttggtaaaattcagcagtgaagccactgggtccctggcttttctttgctgggagaccttttattaagggtttcatctccttacttgttattgatctattcaggttttgtatttcttcatggttcaatcttggtaggtttgatgtgtctatgaatttatttcttctgggttttccaattgattggcatgtagttgctaatagtagcctctagtggtcctttgaatttttgtgatatcagttgtaatgtctccttttttatctttgattttctttgggtcttctctcatgttttcctagcctggctaaagtgtaactattgactaacaatttgtctattttgtttatcttttcttaaaaaaagtaccttttcattttattgatcttttatattttttcatttcaatttcatttatttctgctctgatctttattatttcttttcatctactaattttggstgtggtttgctcttgcttttctagttttttaagatgcatgcttgggttctttatttgatgtctttctactgttttcatgtagatagttattgctataagcttctctcttactactgcttttgtgtttccacttttattgtttcaagaaattttttaatttccttcttaattcctctgttgacccactggtcattaaggagcgtattgtttaatttccatgtgtttatatggtttccaaagttccagtctgggtgtggtggctcacatctgtaatcccagcactttgggaggccgaagtgggtggatcacttgaggtcaggagttcaagtccagcccggccaacatggtgaaacccagtctctacaaaaatacaaaaattagctgascatggtggtgtatgcctgtaatcccagctrcttgggaggctgaggcaggagaatcacttgaacccgggaggcagaggttacagtgagcagrgatcaygccactaaagtccaggctgggcgacagagggagactccataaaaaaaataataaaaaataaaaaaataaaataataaagttcctcttgttattgatttttagggttttttgttgttttgttttgtttttttttttttttgagacagagtctcactctgtcacccaggctggagtgcagtggcgcaatctcagctcactgtagcctctgcctcccgggttcaagcaattctcctgcctcagcctcctgagtagctaggattacaggcatgcaccaccacacctggatatttttatatttttttagtagagacagggtttcaccatgttggccaggctggtctcaaactcctgacctcatgatctgcctgcctcggcctcccaaagtgctgggattacagcatgagccaccacacccagccaatttctagttttattccattatgattagagaagctactgatatgatttcaattttttgatatttttaagatttcttttgtggcctaacatatggtcttatccttgagactgatccatgtgctaaggaaaagaatatgtattctgtcgcctttgaacaaaatgtactgtaagtatttggtcaatttggcctacagtgcagattaagtctgatgtttctttgctggttttctgtccggaagatatatccaatgctgaaagtgggatgttgaagtctccagctattattgtattggggtctatttcgctctttagctctaatatttgttttatatgtctggatactccagtgttgggtgcatatatattaataactattaaatcctcttgctgaattgatacttttatcatataatgatcttctctgtgtctttttatagtttttgtcttaaaatctattttatctgatacaagtatggccactcctgctcttttttggttttcatttgcatggaataacttttttcatcccttcattttcagtctatgtttgtctttataggtgaagtgcatttcttgtaggcaacagatcattgggtcttgtttttttaaatccattcagctactctgtcttttgattggagaattgtttagtccatttaattcagtgttattattgataagtatgggtttgttattgccattttgtgatttgctttctggttgttttgtggtcttctctttcttccttccttcctgtcttcctttttgtgaaagtgattttctttggtggtatgtttcaatttcttactttatatttttgtgtatctattgtaggtttttaaattcgaggttaccaagaggcttgcaagtaacatcttataacccattattttaaactgatgaaaacttaactctgattgcaaaaacaagcaaagaaaaaactgataaaaactctacactttttcatcccccagccagccactgccgcttcttaactttttgttgtttctatttaaatcttattatactatgtctttaaaagttgttatagttactatttttgataggttattcttttagtcttcctactcgagatatgaatagtttacacacaacaattacagtgttataacattttgtatttgtgtacttactattaatgagttttgtgccttcagatgatttgttattgcttgttagtatccttttctttcagattgaagaactccctttaacttttcttgcagaacaggtctggtgatgaaatccctcagcttttgtttgtctgggaaagtctttatttttccttcatgtttgaaggatattttcatcagatatataccattctaggataaaaaatttttttttccttcagcactttaagtatgtcgtgccattctctcctggcctataaagtttccacagagaaatctgctgccagatgtattggagctcctttatatgttatttctttcttttctcttgctgcttttaggatcctttctttatccttgacctttaggagtttgattattaaatttcttgaggtagtatttgggttaaatctgcttgacgttttataaccttcttatacttgaattttgatatttttctctaggtttgggaaattctttgttaatatctctttgaataaactttctacccctatctcttctctaccttctcaaggtcaataactcttagatttgtccttttgaggctattttttagatcctgtaaatgtgcctcattattttttattctttcttcttttgactcctctgactatgtattttcaaagagcctgtcttcaagctcaccaactgtttcttctgcttggtcaagtatttattgagagactttgatacattctttgatttgtcagatttttcagatccagaatttcttgtttttaattatttcaatctctttgttaaatttatctgatgggattctcatttccttctctgcattatcttggatttcattgagcttcctcaaaacagctattttgaattctctgtctgaaaggccaggccacatatctctgtcactccagaattggtccctggtgccttatttagtttgtttggtgaggtcatgttttcctggatggtcttgatgcttctggatgtttgtcaatgtctgggcgctgacaagttaggtatttattctaatcttagcaatctgggtttgtttgtacctgtccttgagaaggctttccaagtattcaaagggaattgagtgttgtgatctatgactttggtcattgcagccttatgtatattagggggcaccccaagcccagtaacactgtgaccgttgcagactcacagaggtactgccttggtggtcttgggtaagatgtgggagaattccctggattactaggcagagtctcttgttctcctcccttactttctgccaagcaaacaaaatctctctccccatgttgcgccaactggagtgggaggagaggtgatgcaagcacccccttgtacaccaccactggggctatgctgggtcacacctgaagccagcacagtactgggttttggtactgtggcaactattttctggctactgctgatgtttattcaaggctcaagggctctttagtcagcaagtgatagatcctgccaggaccgggcctcccctttcagggaagcggaattttttttttttttcttttgagatggagtctcgctctgtcgcccaggctggagtgcagtggcactatctcggctcactgcaagctccgccagggaagcggatttcttactggcccaggacagatctagaaatgcccttcaggagctaaggcccagaatcaggaactataggagtttgatttgtgctttattatactgtgactgagctggtacccaagttgcaagataaagccgtttttactatccctctcctttcctcaagcagaaagagtctctccttgtggccaccacagctatgaatgtgctggatcacacctgaagccagcatgtactgggtcttgcccaaagcccatggtgactgctgcctggctaccattgataattattcaagacccaagggctctttggtcagcaggtggtgaattctgccaaaactgggtccttgccttcagggcaatgggttcccttctggcccagggtgggtctagaaatgtcatccacaaactatggtctggaattggggcttcaggactctgcttggagctttattttactgtggctgagctggtatccaaattgcaagacaaagtcctctgtactcttccctttcctcccagaactccaagctgcactgcctggagttgggaaaggggtaatgcaagcactcccttgtctaccgtagctggtgtctcactgggtcgcatgcacccaagtccactggttctgagcacagcatggcaccaggacttgcccaggaactgtagtctgtgtggcctagactgcctttcaagtttatcaggaccctagtacactatagcccatgatactggggctagccagaactcaggttccaactgctgagatggacaatgcccttctggctagggctggtctaaatgctcccgccatgggcactggccgaattctgccctgtactgctttatgctatgacagggcagcactgaattccaatgcaaagtcctaacaatcactttgctctccctccaccaagtacacagattctctatctgtgtcacgtggccgctactggggcatgcggggaggggtagtataggcaattaaagactgtctttcctaccctcttcagtacctctttccttggtatgatgtttaaaaaaggtactgtgattgctctcctgatttttaattcttttatgaaggtactttcttgtgtagatgcttgtttgatttgatgttcctgtggggggatgatcactggagggttctattctgccatcttgctctgcctctcaatctggtggtaatttgaagggtgaaacatacctttttttttttttttgccataagtagctttgagactttttgtggtaagtggctatatcatagctccaaaattacacacacacacacacacacacacacacacacacacacmttttcatttattcaaaggaaatatatacacacatttataaagaaatggtacattaaaaagtcacatcatactacccaaagtgatccacaaattcaacgcaatccctatcataataccaatgacattcttcaagaaatagaaaaacaatcytaaaattcatatggaaccgcaaaagagccagactagtcaagcaatcctgagcaaagagaacaaacctggaggcatcacactacctgacttcaaaatatgctacaaagctatagtaaccaaaagagcatggtattcgcataaaaacacagagactaatagaatagaatacagaacccagaaataaatccacacatttacagccaactgattttcaacaaaggtgccaaaaggacacactggagaaaggacagtctcctcaataaatggtacttggaaaactggatatccacatgcagaagaatgaaactagacctctatctctcaccatatgtaaaaattgactcaaaatgaagacttaaatataagaaccaaaattatgaaactactggaagaaactactggaagaatgtttcagggcattggtctgggcaaagatcttttggataagacctcaaaagcccaggcaacaaaagcaaaaatagacaaatgggattatatcaaactaaaaagcttctgcacagcaaaagaaacaatcaacagagaaaagagacaacctacagaatgggagaaaatatttgcaaactatccattaagggatgaatatccagaacttacaaggaactcagctcagcaaaaacaaaacaaaaacaacaaataatccaattttaaaatgggcaaatgatctgaagagacatttcttagaataaaatatacaaatggccaacaggtatgtaagaaaatgctcaatgtcactaatcatcagggaagtgcacaatcagctatcatctcattccagttaaaatgcctattataaaaaagacagaaaacaacaaatgctggtgaggacgtagagaaagggaactctttttttttttttttttttttttttgagatggagtctcactctgtcacccaggctggagtgcagtggtgcgatctcggctcactgcaagcttcgcctcctgggttcatgccattctcctgcctcagcctcccaagtagctgggactacaggcacctgccaccacacctggctaattttttgtattttttagtagagacggggtttcaccatgttagccaggatggtctcaatctcctgacctcataatctgcccacctcggcctcccaaagtgttgggattacaggcgtragccaccgcgcctggcccaggaaagggaactcatacactttttatggaaatgcaagtttgatgggaatgcaagccattatggaaaatagtatgaaggctcctcaaaaagactaaaaatagaaataccatatgatccagtaatcccactgctgggcatatatccaaaggaaaggaaattagtatgtcaaagagatatctgcactcctatgtttatcacagtactactcacaatagtcaagatatggaaacaacctaagtgtccaccaacaggagaataaagaaaatatggtatatttacacaatagaatatcattcaaccataaaaaagaatgaaatcctgtcatttacagcaacatggattgaactggaggacattatgttaaatgaaataagcaaggcacagaaagacaaatatcacatgtttcactcatgtaggagctaaaaaagttgatcccatagatcatgcccatataagtagggagtagaatagtggttaccagaggctgggaagggaagtggatggggagaggttagctaatggggacaaaattacagttagataggaggaataagttctagtgttctagggcacagtagggcaactatagttaacaaaaatttattttatatttcaaaatagccagaggagaggattctgaatgttcccaacacaaagaagtagtaaacatttgaggtgatggatatgccaattaccctgatttgatcataatacattgtatacatgtatcaaaatattacatgtaccccacaaatatatacatttattatgtatcaataaaaatctttaaaaattaagggcacatgaaaactcaagttaaaaagagattctaaagccaggcacagtggcgtgtggctgtagtcccagctaattgggaggccaaggcaggaggattgcttgaagcaggagtttgaggctgcagtgggctatgatcacacaaaaccaaacatcgcatgatctcactcataagtgggagttgaataatgaaaacacatggacacagggaggggaacatcacatgctggtgcctgtcaggggttggtggactaggggagggatagccttaggagaaacacataatgtagataacagattgataggtgcagcaaaccaccatggcacatgtattcctatttaacaaacctgcacgttctgcacatgtatcccagaacttaaagtatagtaataataataataatawtaataataataaagaaaatctagaagaaatggataaattcctagacacatacaccctcccaagactgaaccaggaagaagttggatcctgaatagactaataacgagttctgaaattgaggcagttataaatagcctaccaaccaaaaaaagcccaggaccagacagatttccagctgaattctaccagaggtacaaggagaaaccggtaccatttcttctgatattcttccaaacaatggaaaaggaaagactgctccctaactcattttttgaggccagtatcatactgataccaaaacctggcagagatacaacaacaaaaaacaactgcaggccaatatccctgatgaacattgatgcaaaaatcctcaatgcaatcctgatgcaaactgaatccagcagctcatcaaaaagcttatccaccatgatcaagtcggcttcatccccaggattcaaggctggttcagtatatgcaaatcgataaacgtaattcatcasataaacagaacaaacgacaaaaaccacatgattatctcaatattgaattcygtagaattcaacatctcttcatgttaaaaactctcaatcaactaggtattgatggaagatacctcaaaataataagagccatttatgacaaacccacagccaatatactgaatgggcaaaagctagaagcattccccttgaaaaccagcacaagacaaggatgccctctctcaccactcctattcaacacggtactggaagttctggacagggcagtcaggcaagagaaagaaakaaaggatattcaaatagagaagaagtaaaactgtctgtttccagatgacatgatcctctatctagaaaaccccactgtcttagcccaaaagcttctcaaggtaataagcaacttcagcaaagtctcaggatacaaaatcaatgtgcaaaaatcacaagcattcctatacaccaacgacaggcaagcagagagccaaaccatgatatgaacttccattcacaattaccacaaagagaataaaatacctggaaatacagctaacaagggaagtgaaggacctcttcaaggagaactataaaccactgctcaaggaaatcagagaagacacaaacgaatggaaaaacattccattctcatgaataggaagaatcaatattgtgaaaatggccatactgcccatagtaacttataccttcaatggcattcccattaaaccaccattgacatacttcacagattagaaaaactactttaaaattcatatggagccaaaaaagagcccatatagtcaagacaatcctaagcaaaaagaacagagcggaaggcatcatgctacccaatttcaaactatactgcagcctacagtaaccaaaacagcatggtactggtacaaaaacagacacatagaccgatggaacagaatagagaactcagaaataaaactgcacacctacaaccatatgatctttgacaaccaatggggaaaggatgccctatttaataaatggtgctggaagaactggctagccatatgcagaaaattgaaactggaccccttccttacaccttatacaaaaattaacttaagatggattaaagacttaaatgtaaaacccaaaactattaaactataaaaaccctaaaggaaaatctaggcaataccattcaggatatacacatgggcaaatatttcatgacaaaaatgtcaaaagcaacagcaacaaaagcaaaaactgatgaatgggatctaattaaactaaagagcttctgcgcagcaaaataaactatcatcagagtgaacagagagcctacagaatgggagaaaatttttacaatctatccatctgataaaggtctgatatctagaatctataaggaacttaaacaaatttgcaagagaaaaacaaacaactccattaaaaagtgggcaaaggacatgaacagacacttatcaaaagaagacattcatgcaaccaacaaacatatgaaaaaaagctcaatatcattgattagagaaacgcaagtcaaaaccacaatgaggtatcatctcatgcctgtcagaatggcgattattaaaaagtgaagaaacaacagatgctggtgaggctgtgaagaaatagcaatgcttttatagttagtgggagtgtaaattagttcaaccattgtggaagatagtatggtgattcctcaaagacttagaaccagaaataccatttgactcagcaatcctattactgggtatatacccaaaggaatataaattattctgttataaagatacatgcatgtgtatgttcactgcagcactattcacaatagcaaagacatggaatcaatctaagtgcccatcaatggttaactggataaagaaaatgtggtacatatacaccatggaataataagcagctataaaaaggaatgagatcatgtcctttgcggggacatggatggggctggaaggcattatcctcaacaaactaacgcaggaacagcaaaccaaacaccacgtgttctcacttataagtgggagctgaacaatgagaaaacatggacacagagaggaacaacacacagtggggcttgctggaggggcaaggagaaggagagcatcaggaaaaatagctaatgcatgctgggcttaatacttaggtgatgggttgataggggcagcaaaccacctcagcacacatttacctgtgtaataaacctgcatgtcctgcacatgtatcctggaacttaaaatttaaaacgtaataataaaataaattttaaaaataaaaaagaaaggggagatgaaaatgcagctataacagatgatggattacgcaaatgataagaaagtggctgccactgaagccctaaatgatggtgaaccgtagaaagccattgacttattcacagatgccttcaagctgaatcctctcttgaccattctacatgccaaagagagccagtgtcttcaacgaattacagaagccaaatgctgccatstgatrttgtaacagagccattgaaataaatcctgattcagcccaggcttacaagtggtgagccttacaagcgcttttcacacacagacttctgggccactgggaagaagcagcccatgatcttgccccttgtctgtaaattggattacaaagatgctagcacaatgctgaaagaagttcaacctagggcctagaaaattgcagaacatcagagaaagtatgagcaaaaccatgaagagtgagcgatcaaagaaaaaatagttaaaaaggctcagaaaagagcatgagagagcccagagggatcaggaactcagtaggctctcttttccagctggctttcctgtgggaaggcctgttaatgttcatgaaggaatgcctggaatggcaggaatgcctgaactcaatgacattcttagtgatccagaggttcttgcagccatacagggtccagaagttatggtggccttctaggatgtggcctacaacccagcaagtatgtcaaaataccagtaaaatggaaaggttacaaatctcattagtaaattgtcagccaaatttgtaggtcaagcgtaatgcccttctgataaataatgcccttggtgaaggaaacgcaacctggaccacctaatgcatgttgcaacaatacaaaccagtgtacctctgaccttctcatcaagagaactggggtgctttgagaataatgcccacccctctaccccaaatgcagctgaagcattttacagtggtttgccattagcgtatccattcagataatgttttcctactaggaattacaaactttaaacactttttaaaccttaaaaatattcaaaacaaattttaaaagtctcttgattctttttaaaaattagatatcaataatagctttgcattgcaaaatggaaactctttgtgagtaaactaacagacataaataacctacaatctaaagaagaaatgctaaagagaattagaaaacattcagaaccgaactatgatgaaaatagctatgtttaaaagtatgccgcagaaacatggatggagctggaggccattatcctgaacaaattaatgccggaacagaaaaccaaataccacatgttctcactcataagtaggagctaaacactgggtactcatggacatcaagatggcaacaacagatactgggggctactagagtggggagagagagaggagggcaagggctgaaaaactgttgggtactatgctcactacctgggtgacaagatcagtcataccccaagcctcggcttcatgcaatatacccatgtaacaaacctgcacttttgcaccctgaatctaaaataaaggttgtaatcatttttaaaaaacttatgtgacatacaactctcatagtatagtaaaaaggaaatttattgcattaagttaaaaagaaaggctaaaaactaatgagctaagcatctatctttaaaagttagaaaacagaataaaatgaaggaactagataaaggaaaataataaagatcagaaaagaaaatataaaatgaaagcagtcatgaaatagggtcaataaagtcaaatgctgattctttaaaaagactgagaaactagtgctctggcaagattaatcaaaataaaaagagagaagactcaaataaacaatatctggagtttaaaagacagcataagataatgtagagtttaaacaaatagtaaaaggatattgtgaaatcttcataagtttaaaaacttagatgatttgaataaattcctagaaaaatgcaacttattgaatctgatacaaaagaaacaaactacctggaaaaaattcctgtaatcacaaaagtagttaaacttatagtttaatttagcatagttataatgtttccaaccaaagaaacccagagagctttatcagcatacattaccagataattccaattatacataaattctttcagagaaaagaaaatataaaacattcatactcatttataagacatgtataactttcacatcaaaacaacggacagtaaaagaaaggaaatgcataggttaattgcactgaggaatataaatgtaaaacttctaaagaaaaattaaaaagctgaattcaagaatgtattttttaaataaataaaataaactataccaagttggattgatcccaggaatgcaaagttggcttaatcttagaaataatataattcaccacattagcagattaaaggataaaggccaaacgatcatctcaaaagacacagaaatagtatttgatacaattcaataactattcatataaaaaactctcagcaaatgagattagagaggaaacccttaacctaataaaacaaaatccacaaaaagctacaatgaacactgcaattatgaaatatcagaaatattatttggggggataagaagacaaagttgcccaatttcgctacctctatttgatactatactagagttgcttgtcaatgtagtaagataaaagtaaagagtataatgacatctacagtcctccacagtacgtactgcaacattagctagtgctcactctactctctaatggtgaaacaacagactacaggagactgaactgtatctgcctctatttcctgtctcaaattcaacttttacttaccaaaaaaagaaagaaagaaaaagccaggaagagtttttaatccttaaaaaatatcaatataaaattatagcaaaaaaggaaccagaatgtaacacatcctgaacaatttgcagcagcagcagaaaaagaaaaaggtatttcatttagttgatttgctgtggttgttgattgttctctagtctcacgatgatggaagttgcacagtttttcaatgggacctagaagctgctggaggtcctcctggcagcaacccgatgcaaaccaaaaatctggaagtcttttcaccactccaagatctgagggtgacatattttggaaggatctgcaattttccatcataagtgtgacaaaaactgacaatcaggaagcttatgtactcagtgacagtagcacgtttatctccaagagacattttatttggaagacatatgggaccaacttttgctgaaagcactggttcccctgttgaagtttgctagggatgacatcggatttggctcaatgaaaagcttctcttattcgcctgaaatttcatgaagccttctcaccaagtgtgcccacaccagaatttctaggaagaaacagtttcttaatgtaattttcccaagtggaacgacatattgtatggaatgtgtgaattctgactgttggtacttgtatatactttggatttcccagagaatctggcaagcaaacagattaaaccctggaaattctgatagtgagcttgaccaagcagttatgagtcagtcctacatgaatgatggcatcactacaaaggatgtcactcatgagagtggaaatagtgacctaatactaggttctgccacactgttaaatccttgtggrtatttaatcaatggaatgaaataggatggaatttaccagactattcacatcactccagaaacagaattttttacgttggcttcaaaaccaccttaagtcagaccttctgtgatgacctgattgggaaagttgtggaagtctttcatgcaggaaaagtttttaccactttgcttgtaaatcatagttttaaatgtcactcactaccttctttgcccctagaatatggaagattttaaatgtcctgattgctagagtactatgttcaatgattacaattttgtttttaccagttttgctaagaagcagccaacagcagagctgattaagaaaaatgaaaaatgagaacacacatagaagggtggtggttgctttctagagactgatacccyagggccatgctttctgtaaccaccaccttgccattgtaaaaagctccacatgtactatagtttaatcattttgaattttatgcattagtatatcaaagagctacatactatatcttccatgaatactctcttccttgtttaagtattctgtaccactcttgctgtgaaaatggagtgcttgtagaaaaaacaaacaaaccttttactatatgatacttcttaacacttgtgaaagcaattcagcttggtttacgcatagtgtaatatttctccaagtaccacccaaaattccctacagaactttcatcctcattagatgctggcctcagccttaccactggggacattacattgctgccagaattttacatctaatttacctccattttctagatattctctacttatgttatcaaaaccagtttctacttcatacagatgctttctgcattagcaattaaaattttccatctatgagttgagtcttaagaaaatgattgcaattgttcattttgcatattacgattttaacattatcgctccctgcatttgcagtcctctgatttatttcttcaccatgatgccctcgctccccacaacaacactcacctcctgtaataaagcaatatcgcgttaaaaaaaatacaaagtctaggggaaggaattatcatttgcatatattgtgatggcccacattaagaaaaaaaaactaacagactctaaatatcaatagactctcaaatatcaattattagaattagtaagggagtttattaaggttgctgaatataaaatcaatatgcagaaattaaactgcatttccataatataagcaataatgaactaaaattcaatcctaagcatcaacagcatttaaaatagcaacaaaaaatataaagtccctacaaataaatctaaccaaaaaatgtgcaattctttgataggaaatattataaaactacattgatgctttggatagggagactcaatgttgtaaaaatgtctattcttctcatactaacctacatatacaaggcaatttcaatcagtattccttcaagggtttttaatggaacttcattatgtacttctcaaatttataaaagtaaagattctagtacagacaagacttttcggagaagaaagaatgtgaaaacttactctaccagatatcaagacttataaagctattgaagatatcagtataggattttttttaaaattgaataactgaacataatagagagtgcaaaactaagcctgtggttattgataagacactgtagatcagtgaggaaaggagagactattaaacaaatggtctacgacaatttcactacaaatgggaaaaaaataaaattggatctttacctcccaccacaaacaaaaataaaatccaagtggactaaaggctctacataatagacaaaacatatttcttttaaaaaaaggtaagaatattttcgtgatctcaaaatacgtaagaacttcttaaacaagacatgaagaaaaaataatgacaaattacacattaaaataaaagacttgttcatcaagagacaccacaaaaagaatgaaaacataagctacaaactaagaaaacatatcttcaaaacatatatttaacaaagaattcatacgcaaaatacaattttgaaaaaacacttcctgcaaatcactaagataaagagaaatcaactaacagaaaattgggcaaaatgaggtcatttcacagaaatatattatttaggaatacatacatgaatggcaaaaactcaactactattttagaaataggtagagaataaaatataactaaatccatcaagttttatgaaggcataattaatgaaactaccataggaaaaaacactatgcaaatggtatttttattgatgggacaatccaatataataaatatgtaaattcccccacatattatttcattagtttaatgcaattccagttaaaattccagtaagattttttggggaaacttagcaaattcattaagaaacttacatggaaaattttgaaaactaaaaggcaaagaagagagcttccttatcagataataaaatacatttcaaagcaatagtaattaaagcagtgtggtattaggatagagatgataaatagaccaatgcaacagaatagaaggcctagaaacaaacctatttcatatgaaagttgttaatacaatagaggtgcactgtattttgtgggaaatacatttayattatttagtaaatcgtgttaggaaaactggcttactacatgaagaaaaataaaattagaatcctttattatctccaaatagactaaagatctcaatgtaaaaaataaattgtgtgaaagttgtcagaataaaaatgttgtcacttgtgttaaaaactctgacaaatagagccagggacggccatgaaggaagggctcttgtggcaaatcggccatgaaggaagggctcttgtggcaaatccccaataaaaattatcacaaaagactctccaaaaaacacaatcctgcacaaaggccaccacaactttacacagaaaaaatatttctgtgatgacatctgcccagcaactgcctgtccaactaagccaagaataatgatctttttttttttttttttttgagacaagagtctcgctctgttgccaggctggagtggagtgatgcaatctcagctcactgcaacctctgactccctggttcaagcgattctcctgcctcagcctcccgagtagctgggaatacaggcatgtgccaagacacccagctaatttttgtatttttagtagagacagattttcaccatgttggccaggatggtctcraactcctgaccttgtgatctactcgcctcagcctcccaaagtgctgggattacaggcgtgagccaccacgcctggtcaggataattatcttaaacaattatgtaatcctcctaatttttcccttaacagactttgtctttctttacctctcttaatacacacatggtttactatggcaagtgtattcccattgcagtgcctggtcctgaacaaatatcatttccttttagagagtatctgttatatagattgacaatttaaaaagaagaaaatgggctggatgtggtggctcacacatttaatcccagcactttgggaggttgaggcaagaggattgcttgagcctaggagttcaagaccagcctgagcaacaaagtgaggcaccgtctctagaaaaactaaaactaaaaaaaaaaaaaaaaaaaaaaaaaattagccaggcatggttggtgcatgcctgtgtggtctcagctacacaaaagctcaaggcaagaggattgcttcaacccaggaggtcaacactgtagtgagccatgttcatgtcattgcactccagcctgggctacagagtgagcctctgtctcaaaaaaataaaaataaaataaaaataaaatgtaaagaataatcctaggacagaggagaatttctaaaataagattttaaaaaaagcacaatctgtaaaggaaaaaattaatagatatgactacattaraattaaagatgtgtcttcaatgaaggattcaacttacaaagttaacagaggtktcagsctgggaaaagacatttgcaacttttataacttataaaggattaatatttagaatagacaaggaactgccaatcaacaacttaaaaacagaaacagcaaatggaaaaaaaaacggcaaaagttataaatacgcaatgtacagaaggggaaacctgaacagataaataagaagaaatgctaaacatcactatcagaaaaatgcacaataaagcagtaataagggcctggtgcagtggctcacacctgtaatcccagcactttgggaggccaaggcaggtggatcacaaggtcaggagttcaagaccagctggaccaagatggtgaaaccccgtctctactaaaaatacaaaaattagccaggcatgttggcagacgcctgtaatcccagctactcagaaggctgaggcagagaattgcttgaacctgggaggtggaggttgcagtgagctgatatcacgccactgcactccagcctgggcaacagagcaagactccgtctcagaaaaaaaaacaaacaataataagtaccattttaaattcatcaaattggcaaatattacaaactgaggtattaacacgtcctcgcaggattatgggtaactgacwagccttataatgaagttaaattagtacattttcagagtaactttttagtggaaacaaaaattgtaggcctacctactatttggctcacatacagaaaggcactgtagacgagaccaatctctcatcacaacagtaggaacctaggactctgcagaatagcttcattggaaaggggagctggagtgctacatcaacgatgtcatcacgatgtcagaataacacaatgtcagaacacagcacatcacgatgtcagaatagcagcaccaactgagctgtccatggtcctgactaccatacttccccccaccctcctcagatgacttagtccctagcttgtttctggtcttcctgcctgtgtgttcagaccatcctctgtgctcctctgtcaccagcccaacagtcctctcactacttactgcttggatctctgctggccaggtcaatggcacaaagcccacctgctttagagttaaaatgttgataaaaatagcaaacaagtccgggcgtggtggctcacgcctgtaatcccagcactttgggaggccaaggtgggtggatcacctgaggtcaggagtttgagaccagccttgccaacatggtgaaaccgtatctctactaaaaatacaaaaattagccaggcgtgatggtgtccgcctatagttccagctactcagaaagttgagacaggagaattgcttgaacctgggaggcggaagttgcagtgagctgagatcacaccactgcactccagcctgggcaacagagcaagacttggttaaaaaaaaaaaaaaaaaaaaaggaaacaacagacattttaaaccatgtatttcaaaatgttttcattttagtgagtttaaaagagaggaattcaacaagagacaggagagaaagaaagaccacttaagagatgaacaacaggcttggcatggtggctcgtgcctataatcccaacactttgggatgccaaggcgggaggataacttgaagccacaagtttgagaccagcccgggcaacatggcgagaccccatctctacaaaaaagttttttaaaaaaattagccaggcatggtggcacctgcctgtagtcccagctacttgggagactgaggcaagacgatcccttgaacccaggagttggaaggtacagtargctatgattgtgccagtgctctccatcctgggtgacagagtgagaccttgcctctaaaaagaacaaaaaaagagatgaacaacgaaaatgagagacaaagaggaagaacatkagaatatacggcattcaaatgtgagttccaaaccggtagagatttttatctgttttgtttcatgaaatcccttatgccaagaataattactgacacacaataagtggcttactaaataagatgaatgaattaatcaataggcacagacatacaagaaacccaccttgagatccattctgtggcctttcagactactacaatttaaacctgttaaattgttttgcagctctgagtataagttactatctgtgttatctgtgttgagctcctccaatttcagatacagaaatatactgcagcttcaattatttataagtcaatgaagttgttctgattcagattttccccatttcctaattcatcaatttgactccatatcctgttttcattattctttgattcaattagttttcatcttcagatatgaatccctttcagacaacctgtaaagaccctcatctgactctctctgtgtggacctgggaagcattctacaacaaaatacaacttttaaattaactatatttttaaatgtcataaattcataaaatattgaccctgcttacctgagaatatggaataaatgtttcaaactgttgatgaagttccaatagttgaattaactctgtattttttttggccttttctctaactatgtcaatataatgttcaggattttctgcaaatgaatatgcagcatctttactattgaatgtgtaatatttttctttatattttaaaattccaattgctggatttcctgaaaataaaaaaagaattagatatgaaatgtcttgatcacttatgaaatattgttattctggctgggcatggtggctcacgcctgtaattccagcactttgggaggccaaagcaggcagaccacctgaggtcaggagttcaagaccagcctgaccaacaaggtgaaaccccrtctctactaaaaatactaaaattagatgggcgtggtggtgtgcacctctaatcccagctactcagggggctgaggtaggagaatagcttgaacctgggaggcggaggttgcagtgagctgagatcgtgccattgcactctagcctaagtgacagagcaagactgtctcaaaaaaaaaaaaaaagaaaaagaaaaagaaatattgttactctgtgtttgtaacataccatagagccattcctcatccactccatttttttttttttttgagactgtgtctcaaaagataagttgataagactgcgtcttatcaacctggctggagtgcagtggcgcagtctcagctcactgcagcatcaacatcccgggctcaagagatcctcctgccttaccctcccaggtagctgggactacaggcatgtgtctcccaacctagctaaccttttttgtagagatggggtttcaccacatcacccaggctggtctcgaactcgtggactcaagcgatctgctcacttcggcctcccgaagtgctgggattacaggcatgagccactgttcctggcccttccactcctttttttttttgagacgaagtcttgctctgtcacccaggctggagtccagtggtgtgatctcagctcactacaacctctgcctcctggattcaagcagttctcctgtctcagcctcctgagtagctgggattacaggtgtgcaccaccacacccagctwatttttgtatttttaatagagacggggtttcatcaaattggtcaggctggtcttgaactcctgacctcaggtgatccacccaccttggcctcccaaagtgctgggattacaagcatgagccaccacgcccagccccttccactccatttttaacatatcagttatgcttttattttgctaaaatgttataattatcattttaatttatacatttttaaatgatatgtgaaatacatactaattatatttttmtgttaaagtatgattttaaactgtattttatgtaaaaatactttccactatccagatataataattgtaaaaatcttttatgaaaagccacttactcatctggtagatttttcaaagctacttcaactaactactgcaaggactatgtttaaaataacccagtaagaactacaaaaatgggacatcttttccaaaactcaaatttgcatattagcaaatatttttcactgtaaaaagatactacatagactatagataattaaatatccacatagtttgtggaagttgtattagaaagagcaacactgtcttactcatttattctttcatttatccaacaaatagttattgaccatgttcatggtgctaaggctatagaagataacaaattccctgctctcaaaaaatcacaaatatatcataggtcacagagtgacaygtgctacatgaaaaaaataataaagcaggttaaatacatagtaaaaggaagaagtgtgcaattgatattttaaattgagtgattagggaaggctgaataaaatgaggcagcaaggcgattagcaacctgggaggcagagtttttccaagagtgcaaaggctctgaggtgaaagtgggcttcaactgttcaacaacagcaagaaagccagtgccactgaagtggagcaaacgaggcaaagcgtggtaggcaatgaagtcaatgaagtcatcggaaaaggattctgactggtaagtgccagtgttaccctgggatttaaggcatgtggtctccactcctgaatggaagaagggaagttctacagaattcatctgaggtaatgcaggttgctgctgcccagaaaataatgaagtagaaataatgtagtaagcagaaatcgtcagaattcacttatccagagaggaatatgaaactcatggccccaaaagctcttctacttttctacttcaccctctttcttcttagacccagagttgggagaccctggaagggaccatacagacctcctggttgatccttttcattttcttgaggagaaactgaggtccacagaaggtgtgagatttcataaaggttacctagttcactaaggacacagaccaggctcttctgaaccctagcccatagcttttccaaccatatcatgcttcctctgccatcaccccacatccgtgtttctcctttcccttcttatttgtgtgaaacagggaaggaaggaaggaatggagagggggaggcaggaggggagggagagagggagggaggagaaagaaaaggaaactatctacattccattgcattttacttctgcatggctcttgattgttttctccccagtatcagtgaccctcactgggcctcagaatattactttcaacttcccacagtaaatattttgttattcccattatcaaaaatgtaataacattttttaaatgagccaattgtgtgttctctctagcctgtatacccacaatcccaatagttatttttaatgaaaaaatacccaattgtgaaacataacaaaagaaataaagaaaaaaataatgaagaaagaagaaaaataaggttaatggcgtaaagtaaattaagacacaatcttgtcacactgttttcattctagccctggcaggctttttcttattcacaattcacacagcactttttggatgataatttctttcatctctatctctgatttattctttattttggagaagctctaataatatatacatcatagagaaattttacttgatattagccatttccttataggcgtctaacagagaaatcctatctatgccagtgaaatataactgcaaagtaacaaagaatattttttaacaaacatgtcaaataagtgttgctctttcagtaattactttggaagatatatttttagtaatgttgtgtaacatttcttttgttttatttttgagacagtctcactttgttgcccagctgaagtgcagtggagttatctcagctcgctgcaatctctgcctcccgggttcaagtgattctcctgcctcagcctcccaagtagctgggactacaggcgtgtgccaccatgcctggctaatttttgtatttttagtaaagacagggtttcgacatgttggccaggctgatctccaactcctgacctcaagtgatccacccgccctgacctcccaaagtgctggaattataggcgtgagccactgcatgcagccaatgtcgtgtaacatttctagaattcttcattggccatatgagtcatcccctttcaatggtactgcagcatccatatttcataacacatatacactttccattactaatcacttataatttcttgcttatgtcagtcyaccagagcacctccaaaatgaagactttgtctggatcatctttgtagatcctttgttagttcaccattagattccataaagtttttaaagtgaatattcaagtgacaatgacagaactccatataaagaaaaaatcggggaaaggagagcagtctcatttccaatgatatacctggaaggagaagaccatctgttgcagcaaacgtgtaagcacaaaatccccgatattgaattaacagtttatcaaaatttgctgttgtttctgggaaaagccattctagttttctgaaatctgccacatttactctatcttctaaaatgaaggagaagaagaaaagctttaattcagtgagaaggttaaatttccaaaataaatcagyagtagctcattctaaacattacctttttattgctttgtacttttcccgatgggcaaaaacttkatattcacaaaaccagatttatgaggaagtctattcaagcaaagaagtacaaatgacctcagtgacatataacgtcaygtaagtttctggggcaaacttggaggtaggattttgctccagaatgaagaacagaaaggagaggccatttctgacaagcatgctctgctgctgagagaaaagctgactggggcacttccgaaagtgtgtggtgcttcctgctgctgcagagtaaataacccaaggagttgagcagaatagactggctgctatgtgacccagaaagagatatattgacctcattcaatatagtgttgttcttaataatatgctaggtggcaaaatatgtttaatatgatgcttataaactaggactattgcttcttgaaacaacagagaaggttctgagcagaaagtcaagaaaatgttacctgattttgataacaaggtgtgtaatttttgttctttatatttttaaaaattcttcctatgttggttagcttacctatttacatttgataagcaaactgaataaatttttacacaaataataccacgtatttataaaacattgttcctgaagtttcttagctttcacaatctcacgtacacttctgtgcctggttctaaacccaaaaagcaggcaccacaaacgatcttgtggctaccactaaaagtaaatgcataatttagagaaaataaatcctctctcttttttcctgatatgcctgaaagcctctaacaatgacaatatgtggcaggtgtaaatgaaattcttttagaacaacactggcttgaccaattcaatggagtggtaatttaatagtgttctagtgaataaaaagttctgacgtatggtagaaaatgacacatctaaatctaagaagttgcaggtaaacagtcttgccaatatggttagcttaatatacactgttggagatactttaacttttcaatttcatttaatatttgcttacatatgctgctttaatgaaatgaaatgagyaataaaaaacttgaactgaaaggatattttttagtttctggtttagttttcagtttttatgtattctaatagtttgggaaatgactgctatatttttatttttcatctttaaaaaatagaatttgaaaagaaaattcatagagtaaattattaatttcagtttctgaaaaaactctctttttatgcaacatcaacatctcaagtcccaagctcttttttggcattcctcataaatgttaaagtgtctttagctaagatagaagggtctaaaatggttaaaagtttattgataaagattgtttttctgtaagaatcaatgcatcttctaaaggacctaaataagctcaattaattttacagggataacatttattggtttgtaaattcccaacwtgaatctgaggtagatatataacaaataacattctaaagaaatggagctttatttgcaacaaaatagcaatgattaatattcttttctccaacaaatcaataataaaattactaggactgcaatagaaacacatctgcacaaaaaatgattgttaaccaaaacatgaacgataacactacgaatggttattgctggacagtaagttattcagtttacattttttctgttttccacatctcctctcataaacattagtgctttttttttttttttctttttgagatggagtctcactctgtcacccaggctagagtgcaatggcacaatcttggctcactgcaacctctgacccgctaggttcaagtgattctcctgccttagcctccccagtagctgggattacaggcgcccaccaccatgcccggctaatttttgtatttttagtagagacggagttttgccatgtcgaactcctggcctcaggtgatccacccgcctcggccccccaaagtgctgggattacaggcgtgagccaccacacccggccctcattagtactttataatcaagaaaaatgtttaatgctttatcagaaagatatgaaatttttagaacaaaagagtgactttattctagaggtaattttaaaaagaagaggaaataatggatgattttcattacccatgtgttctttcattctacacacatcagttttcacagtcgctccattaagatgacattgcatcactctctcaggaaagtatagttcrtgagcacccaagaatggctgaatgtgagtgaataaattactgaggacaccaaccacaatagtttcgtcttgcaagctggtccacagagtagaaagtgcaatgaagataggctgaggaagagaaaaaaaatattcaaaatgcaactgtgtaataaaattataaatcactgtactctttaagataaatacaattgtcatttgtaaagaagttaattctccctaagcaaaagtcttacraacttagacagtagactttagatagacatttaactcataaattatgagaaaataaacttgcattttatttcaaagcattttattttagtaygattattataaagttagtttacttyaaaaagccaaacacatgtgatcacctaagaaagatttatggactcttcacctcaaaaaaccaagggaaaaatgtcttaagaaaaaaaaaaaatacggccaggcacagtagctcacacctgtaatcccagcattttgggaggccaaggtgggcggatcacctgaggtcaggagttcaagaccagcctggccaacatggcaaaaccccgtctctactaaaaatacaaaaattagccaggcgtggtggtgggcacctacaatcccagctacccgggaggctgaggcaggagaatcgcttgaacccgggaggcggaggttgcagtgagttgagatcaggccattgcactccagcctgggcaaaaagagcaaaactacttctcaaaaaaaaaaaaaaaaaaaaaaggagggtggagcaaggtggcaaaatagaaagttccccccacgcaccctgcaaggacaccaagttaacacctatttatacagaaaaaaacaccttcataagtaccaaaaatcagatgctgaagatgtgtttagaggagaatgaacacaaaagtgtcactgaagaccattttttgtttgttttcctgactgatcatctaataaaatataacaatattaagaaagtaaaaaataaattaaaaagctaaatatgactcaytataattagattttttctggccaaatcattgcaaaagaacctggaaagtatagagatatatcttgggccatgttttgtgagctgcaagttaaatatttgaggccagtgagatatgtttcttattcctattaaaggtcactgacttatagaacaaatgaaaaaatcaataaggccccacatctaagttaaacaatttagccttttgtttcttggtttttaaaccaaatactggggatgactgcagaaagttattacagcctcatatcctctataataatactacatataggctgggcgcagtggctcatgcctgtaatcccagaactttgggaggccgaggcgggcagatcacgaggtcaggagatcaagaccatcctggctaacacagtgaaatcctgtccctactaaaaatgcaaaaaaaattagctgggcatggtggcgggcgcctgtagtcccagctactcgggaggctgagstaggagaatggcgtgaacccaggaggcggagcttgcagtgagccgagattgcaccactgcactccagcctgggcgacaaagcgagactccgtcttgaagtaaataaataaataaataaaaataatactgcacatacattttatacctccttatccagataaggtttgccaggtttgtccataaaatggtgcagataatcagaaactcaatgtaagtgcaggcctggtaaacaaagtgattattatctgtcttttcagaaaggtcacaagttacatcatctctgtactggaggcaatttctgaccagctactatgaatacattttcaaccacagtacaatgattatttctgttgtcacagccaatactgatatggttatcatactatacagttgcagttyctttagtagcagttgyttatgtgggggaattctctcatccaacttatagcacactattayggcaaagtaaccataaagaacaggatcaatttatacaaaacattatatttttagaaattaaatataattataatgacttgcgatccaatattatagggctcaaaaggaaattcaccttaaggtcaaagtttatgacaaatacttacaaagacttgtgatgttgggaccgctatctttgattttatrgtcatttttagttgttccagatgggctcctaactgttttgtcatcatttccacttcttgagcaccagtaattatatctgactgtgaaaacaacataatttgcattaatatttttataattctactataaaaatcatatgtgtttcagaccatacctgctccccacatcctctgaaagtaggctcaatgacagcaggaagtctgttctccgcaagatcctcaacacctagaacagtaccagcatatgtatggggctcccaagatatttgtgagatggatgaatcttttgaaatacaatagrtataatttttcttaaatgtatacaggtattcttagatttaaatataattgcattcttgagaaatggatcctcaagaatccrtttttgtatagctgttattttcctattcctcaatgataaaattaattaggggttcctctgaaaattatgttgataacaagatttaataaaatcacattgagaaaaacctgttaggagtgagccagcagggcactgcaggttggcaagctagtgagatctcacctgtgatgtatgccatgtggtttaggggatgccagaatccttgtactgagcaggggatattcttgaagacccygtcatagagttcatcattgaaatgactcacaaggcaatgtgaattggaagatgaggttgagtacaagtttacaatattgttttcttgatttgaagggacctaaggaagtttgctagggttaaagacttgattactatgaatgcagaactgaaatgaactggaaaaccatttgacgaagtaaactatggatcttgacaccttttgtactttctgaaacttcattatcgtctgggggaagtacatatattaactgtatattttctatagtaaggtcctgatagatatcaagccatgtaactgaaagatggagaaacacaaagttttcagtttttattttcatgccttcaattttacggtgatctttgagcctttaatcgcctgtctttacataataagcatacttgaaatacttcttgggtttcaatgatcacacataataagttaaagtaccttgtaaaccatttatttccttctgacttttgactatctaaaggatgaagtagtatttatatgttagctatatttgtgccattgtaagctatactgtagctatttattatgcaagatctaaaagatatatttgactttatgataactaagacatgcttcatgtatcctaaagtttttggacaacagtaaactgaaaggttattaaaggtagtgaactggtttgtgatccttctaaggagatgatatagaaaaatacggttctttgtaagaatttktatctgtcttaaaagaaaatttgtctgaatattcttttcttcttataacaagagtgattatttttcaagaaactaaaagtttcacgtgaatgcttgttggaaggcatttttgatttaaaaccttctgaggcttataaaatactatctgttaagttttaggagaattcattttcccatatcagattaaatcttctcagaataaatgctttcagtagcaagaacagttttaaaagttgatgacaggataagcatttgggatagtattctattaacatatttctaagtacttgttcactgtggaaatgtgtacttgattaaaacatatatggctatggaaactgcttttgcagttcaggatatacaggtttgtgtgtatttagcttattgtaaagcccttaccttaaaataaggattaaaattacatttaaatagatcactgaatgttactctttgtgaaactgaactttttgtgtgacacaaacattataaatcaacacttgggaaactttaactttcttaatctattgatacaaggaataaagtatgaaaaattaaacagaaaaaagtcgcattgaagaatgcagaaaatcttaaaagtcagagcattgaaagaaaaacaatatatttgatacaacaatcatggtctgaaaataagttgctaaacactgaatttgaaataattatatttggccaggcacggtggctcacgcctgtaatcccagcactttgggaggctgaggtaggcggatcatgaggtcaggagatcgagaccatcctggctaacacggtgaaaccccatctccactaaaaataaaaaaattagctgggcgtggtggcacctgcctatgtcccagctactcgggaggctgaggcaggagaatcacttgaactcgggaggcggaggttgcagtgagccaagatcgagccactgcactccagcttgggcaacagagcgagactctgtcycaaaaaaataaaaaaaaataattatatttattcttactatgtgctaagcaccacattaaatacttacaaatacaaaaagggataagtacaaatgagaaaatcaaagaatagtaaggtaagtaaattgtctaagtatatgcagctaataargggtagcaatcttggtggatcccaaaccatctgagcccacagcccagctcttaaccattatactgtgttgcccaagatgtcaccagaaatggttgtggtgtgggtttatcagtatagcataaaagaatgacatctatttgaagagaaaaaggtgcatctgaattctcagacatctgtatgtagcctaattatatgctttctagactcttttaaatgacaaaaataattacttcatgagtactatcaactattatcattgtattacaactaacaaatttttattcataaatgtaacgtgtatcctgtttaattttacccatactgctgtttaagctttactcctcctcctgctttattcctccawacactattatctattatatcaaataggtctcttgtctaccctcatagagttttttcccccttgcttgttaagttttgttttaggaatcaatacgaaaatgcagtctttaaagtcttttaagatttatgcaacagcaacaagaaacaggaatacatttgcatacgttctccaaaataaaagttgcatttgacatgcaatacttattaaaacctacaattaaaaatatcctaaggctgggccgggcgcggtggctcacgcctgtaatcccagcactttgggaggcggaggcgggtggatcacgaggtcaagagataagagaccttcctagctaacacggtgaaaccccatctctactaaragtacaaaaaattagccggrcgtggtggcgrgcgcctgtagtcccagctactcgagaggctgaggcaggagaatggcgtgaacccgggaggcggagcttgcagtgagcggagatcacgccactgcaccccagcctgggcgacagagcgagactccgtctcaaaaaaaaaaaagaaaaataaaaaaataaaaataaaaaaatattctaaggctgggcgcagtggctcacgcctgtaatcccagcactttgggaggctgaggcaggtggatcacttgaggccaggagttcgagaccaggctggccaagatggtgaaaccccgtctctactaaaaatacaaaaaaattagccaggcgtggtggcgcgtgtctgtagtcccagctaccaagaaggctgaggtagaagaatcgcttgaaccctggagacagaggtaaaccgagattgcaccaccgcactccagcctgggtgacagagcgagaccctgtctgaaaaagaaaaaaaatactctagacccctcccccaagctgtagttgcaggatccattcagagtaggcacacagagcttcttgctttttttctaataatgtcctagaaattactctacttacattttactaaaaagaatttattcacaatcatctggagttgtttttttgtttgttttgtttttttttttttgagacagagtctcactctgtggcccaggctagagtgcagtggtgcaatctcagctcactgcagcctccaccctccgcgttcaagcgattctcctgcctcagcctcccaagtagctgggattacaggtgcctgccactgcaccgggctaattttttgtatttttagtagagacggggtttcaccatcttggtcaggctggtcttgaactcctgacctcatgatcaacctgcctcggcctcccaaagtgctgggattacaggcgtgagccaccgcacccggccttttttttttttttttttcgagatggagtttcgctctcgttgtccaagctggagtgcaatggtgtgatcttggctcactgcaacctctgcctcccggattcaagaaattctcctgcctcagcctctcgagtagctgggattacaggctcgcaccaccatgcctggctaattttttgtacttttagtagaaatggggtttcaccatgttagccaggctggtcttgaactcctgacctcaggtgatccgcctgcctcggcctcccaaagtgctgggattacaggtgtgagccaccacgccyggcccatctagagtttttaaktataatattagtcctctaaaaatgctatcacttaaaaaaattttatcataacattcaaatgtttggcaaaagcatgtgatcccagcatgtttctttgtcttcttccccttccccctaccttttaaacactttttataagttcctcatactttcttccacggacaattttcaacaagtctagtcaaacttatagaagcagaaattagaatggaatctctgatgtttaatgttcttattacaacagaaataaaatataataaaacaagcacaaattccacctaactgatttttttacttgccttatcaagaaaaatcaagaagccctgtgttgtgtgtctgtgaatgggccctgcaaaaatagcttggggggaaataactctacaaaaatcttgacttacaggttttaacaaatgtgctgtcaaacgcagctcttacttgcacaataacatgcagctttccctctttggtgtctgccttgcactttaaaagcccatggaagatggaattttattctctcagttaagagtcaacaaaactacgatcatcactcccttttcttttctagaatatttcaatgtgttcactgcagaagataaaggcctgattaaaacaaaataattcactatcttacccaggctatatattggattttttttttctttttgagacagtgtctcactctgtcgcccaggctggaatgcagtggcacgatctcrgctcactgcaacctctgtctcctgggttcaagcgattctcctgcctcagtctcctgaatagctgggattacaggcacccaccactatgcccggctaatttttgtatttttagtagagacggggtttcaccatgttggccaggctggtctcgaacttctgacctcaggtgatctgcctgcctcagcctcccaaagtgctgggattataggcgtgagccaccacgctcggcctatattggatttttaaaatgttcacataaactgaaactttgatgagagaatttttaaaaatcaaaattgctactttaaaatttttaattagttcaaataatgtgactttaaaacgaatattcatagattttaatataggaaaaatcttggctaattttaaattgatgcagtttataatctagagataatactgattaaaccaatatccatttcataataatcaaccttaattgtcactaagactgatggggaaggactgaatagtttaaaaacaaaacaaaacaaaacaaaaaagactgtttgagcagagaatcagaaagttaagaaaactcatcctgatcctgactaaagtcagtacaaaacagccataaagagtgcttggataagaaaattaactttctcaacaacgtgagcagcaaggagcttggaaatgagatactgtatggaaaaataaaagctcttcagcttgttccactagacaaatgaaatcacagctgttcagctaaggccctaacaatgatgatgatgataatcataaacaacatcatcatcactttattgagccgttgcaccaggcactatgccgccttatttacatggtgaagactatgaataaccccattttacagatacggaaaccaaggcacagggaagttaagcagcttccttacggacacagatttagtaagtggcaaagtyatgattagaattcatgtagtctggttgcaaagaccacactcatcatttctacattttactcactgtcctctccagctgtgagaagtagaacgccaatgagaatttaagacttagttggtggattcatgattgmaagctatgagaagattctatataatgaatgacatcttctgcaacatccttacagttgtgtgacagtttctcaaggttctttcttataatatcacctctgaatacaggtgacaaatgtgaatgtgaagttctactcctgtggactcacatgcacttcaaaataaattgattacaaaatccccttagtagctgactagttaacataaggctgatagccacaaggtaatgtaaagggaaatatccaccccaagagtgtgacttggtttttattattatttatttatttattctttttagagatggggtcttccttggctacccaagctggagtgcagtggcatagccaaagcttactgtatcctcaagctcctgggctcaagcaattctcctaccttagcctcccaagtagctgggattacaggttagtaccaccatgcttggctaattttattttttgtagagacagggtcttgtaatgttgcccaggctggtcttgaattcttggcctcaagcagttctctaacctcagcctcccagctaggatccttcctcctgaagacaattagataggctagttgtgaggacaacccctagtttgaatgaagtcatgtcatcagaacagctaggtaaggagagaggacagaccaagtgcatccaatagaaggaccaagtcattacaatgcaagttaaaaagaagaggtggtcagaatacatcctattctatccctcaagaaattagcattcactcatacaaaagacagttccactaaccgagaatctcatagttactggaaaacagaggttgtgtaaaagtaaacrgtgacaagtgggaacataacctgccatcatgcagtaattaacagactgtgtttcttacaaccctagagtgtcaaggggatatcccttagtgaaaaggtcctccagtccctttatgtagatatctgttttatatttgtaagattctgagtaagtttctatctgacagaaaggtcactgctactttttaaaaagtttataaccaccactttaccatatttttcaactctctagggatactgtttggcttgttcattagatctaaaaacaccagatataaaaatcttatctggctaggtatggtggcttaygcctgttaccccagcactttgggaagctgaggcaggaggattgcttgaggccagatgttcaagaccagcctggacaacatagcaagactccaatctatatttaaaaaaaaaacaaaaaaaaaaacaaacgtttttttgagtcagggtcagggtctccctctgtcagagtgcagtggtgtgatcttggctcactgcaacctctgcctcctgggctcaagtgatcctcccacctcagcctcttgagtagctgggaatacaggcacatgtcactgtgcccggctaagttttgtactttttgtagagatggggttttgccatgttggccaggctgattttgaactcttgggctcaagcgatctgtccacctttgcctcccaaagtgctaggattacagacatgagccactctgcctggcctacaaaaaacctttaaaaaaatattttgtaccagttgttacagtgagaacaaataattacacaaaaattatttgaaaggcaactacctgccaaacaatgttacatacttgctctgaactaaaataaacatagtattacttacatatacaccactgtttaactacagcatgctaacaatcatattatcaagtaccaatgaaaaaatacaaattcaacttctaccaaaatattttcattaaaatcaaaacccaacttttctgtttctattttgattcctaacyctaccaaagcaatataaaccgagcagttactgaggttttctccttaattagtgacctggttctacctgatgtggccttatataaagagattgcattatatagaaaaggtcaggtcttatgaacttaactcaccaaaatgatctgaaggaagacctcatattgtcgtatattatatagygcttcttttaacatatatggctgaagttcagccctcatgagtgggtcgttggctgccttctcaaggatggctgtgtagcggtatacctggctccgggcagtctcaagctggtaatcaatatgctgcatggtggctgggattgctacatggagaacagctggcactgtttgtaagagtatgaaaaggcagccataaaggagactaaaaacaattaaggagaagaagcctagaaagtagttacattttaaacattaagttagggtttttctccccaatcaaattagtaataatgaggcatgtgtttcctgggtcccacaacataaagaaaatctaggccgggggtggtggctcacacctgtaatcctagcactttgggaggccgaggcgggcggatcacgaggtcaagagattgagaccatcctggccaacatggtgaaaccccgtctctactaaaaacacaaaaattagctgagcgtggtggcgcatgcctgtaatcccagcacaggagaatcacttgaacccgggaggcggaggttgcagtaagccgagatcgcgccactgcactccaatctgggcgacaagaacgaaactccatctcaaaaaaaaaaaaaaaaaagaatctaaaacaagttcaaacaaaagatattaacagaatgataacccagttacagtaggtcagcttttgccactaaatatagaagagttcagagaataggcagagtttggtattatgtgttgttaaccatgtgcttccagaaaagccactgacccttccttttgtatatcttcttttctagttattaaaaaaaaaaaaaaaaggaacgtttgttaagaaactcatctggatggtgaaaaatgacagaatagtctagcaagggagggtcatttatgaaaatggaaatttgactttttagaacagtttttaaaatagaaaaaattacccttttatactagattagtgatttggtgaaagacactaacaccttatcagtgggcctacaggagtaccaaatttcataaggaagttacttctactggtaggtacttcattaaatatttcataagtactttcaaacttataaagaatgcattaagtatataaccacaaagtaaatgcccccgaatttagagatttgaaatatctcctcgtggatcttttcattccattaactgcaccaggaactgttttcaggaagatttttattttttaaataactaaattgtactcccttttggttacggacttgcagtaatgaacacaaagccctgctgaactgggaggttagctttgagcaggacccttcattgctttcactgattcactttctcctactagcttcatggtacataaaatgtaaagtcttgccccagcaaaagtaaaaatcactacacattataaacagtagttattcttaaggaaacagtaaaaaatgcaaatcttaaatttaagaatgccagtggtgtgttgtttattattttcctcactgtgcaagttaaattttaaacatacataacctttagaattaatctaatgatatacctacaatcatcaatgccttctcctccttttccacagtctctgttaaataaacgaattccagtaacaatcatggtgagttctttcagctggcgttctttgtccttcttagaaagagttagaaatgtcscaagctctgcctgaggaaaaacactctgtagagcagctaaaataaaccagaaaaaaaaaaaaggaaaacaaaatgatagaataaagatatcagacgttaaataacgtttttctttagcagcaagttaagggtctgagttacttatatgattctttaaattactgatacctgattataggatacataataaaacttatcacgcatcaaagctggattactgagagttatgccattgcctcatgtccatttttaataattaagcatccagcagtaactttttggcaatgggcatgaaaacaagctttctaattagggatctgagccaaaaaatggatgctttaaaataattatggaagaaagccataggagagctagacatttttcctattcctcattttaaaggatgaaagagggcaaagacttcctaaggataaaatggtgccccattccatcacccattttaaatgacagactcaatttctttcatcaatatgaaatatccgttttcagcttttccatttactcaatcagcctggtaccctcaatcctactatcaatgtttctctaatggggtgtaataggtgcctagatatgtacagctctaggaaaattagcaatatttcactttctagaggtgctacttgagttttagaatggatacacagtgtaaaaggagactgggtacattttaactcatttgtgctgatttttttttttttttcagataaaaagggaacttcaatctttaacacttctaatttaacatgttttataaaatacaatgaccatatattttcacttatgaaatggaaattggttatactttttacctgttacctctytgacagtcttgatgtctgtaggggatccaaggccagagyggagtaacacatagctgataatcttccggtagaggctttccaattcttctttagcacatgctctgttayctgtaatttctcgggtaacagagcctaatctagactctaggacccggtgatgttcttcgagaaattccactaaaattgccaaataacaatgttctatatatttaatttttagaattcttcttacgtaagaactagagaaaaactggattggatatggcaattctacttcaggaaaacaagtaatttcttaagctgtaataatgaaataaaaaacagtggccagcaygtagcctcaagacaaaaatccaggagggaagatttattacagtgacttaaatggaatactttgtcaaaacacctaagactttaaacagccaaactaaacaggagatatcagaaaaggctaaaacctcccaattaagcagaaaataaagaagaccatttctacaaaatatatattatatattttaattttaatactatatgaaaaaataaatatatacatattatatatttatgctatatgtaagcacatgtagtatactatacataagcatatatagtagcagaaatatatatgtagtatatatgttcctttcggttacgtgtatttttatttcagttctagataaatttcctctgaaaagcattattgataataygatgttgcatcgagaactgtatccctcctcattcctcctgtgatatgctgagggacaggcttcactttggcaggacactatgttccctgagttgttgcaagtacaattctgcaatgactctataagacaacccatattactattacaaggtcaataattaacatatccaccacgcacagtttatacctatacccttgccacaaaaccaactgagaactttttgcaaattaaaaatatgtttaaataacaaatttaaaaatctataggttaaattttatcaattatatgactatttcttgctttaaaatttcactattaagcaaaaacgcaagatatatacttttacataggtagcataactgaaactaacaaagagaaacatcaccaaattgttaataatgattgtactatacagtagaggtagaggtagtccatagagaaatagacttgttttatatagcaggtgcagaggcagtccatagagaattacattttcctttttcttttgtttccaacttgtctttgatgtatgcattaaattatttacataatgagccaggcatggtggctcacactgataatcccagcactttgggagtctaaggcgtagacagatcgcttgaggcctggatttcgacaccagcctgggcaacatggtgaaatcccgtctctactaagaatacaaaaattagctgggcatggtggcacacacctatagtcccagctactcgggtggctgaggtgggagaattgcttcaacatgggagtcagaggttgcagtgatctgtggatcgtgccactgcactcctgcctgggtgacagagcaagactctgtctcaaaaaaaatttacatattgaaacgttttctaaacttaaactccccatcgttcatttttgaatagttacataatttaggtaattataatgagataataacataaaccaggaacaagaaaatctataaattaaaaacttttaacttcaatgggctgaattcctaattattatgtattagtgccactggaaacaataattatgagcacaataattggaattcacttttaacactcacaaaggccaatggttttttttcatttagcatttctaacattgttgtattcctcaaagttgattgccaaaaattaaattgttaaattgattaaacaattaaattcattgtcaaccaaatgaagcccttcttagctgaaacacagtatgaaattttttaagtataaaaataggtagtatacattacctcgattcgtataattcatatcgaagtagacttgcatcttaatagtgtccagggatggatttttagtatycaatagccgagtcatacaaagctagaaaagaatgtcccatgaatacttctagttatagtttttgagacagtcaagtatttcctaaagttattttcaaaaataaagggaaaagcagtggttcctgatattgattcaccaataaccccttttattttttttttctccttgaggacttcaggctttatagtttatttaaccaataactttttttatttttatagatttagggggtacaagtgtcattttgttacatggatatattgcgtgtagtggtgaagcctgggcttttagggtagctaacacctgaatagtggacattgtacccattaagtgatttcttatccctcgctcccctctcaccctcccaagtcttcaatgtctactgttccactctctatgtccctgggtacatattattgagctcccacttataagtgagaacatgtggtattttactttctgagttatttcacttaagatagtagcctccagttccatccatgttgccacaagacatgatttcattattttttatggctcaataraactccattgtgtgtatgtgtgtatacattttctttatccaatcatctgttgatggacacttaggttgattccatatctttactaccaataacatttgttaagtaataagttatttcccttgagttaaccaataatcatcatgccaggtggctagtagtctagttgaaggcaagaaacctgatgttttggttagtttgagcagtctaaatgtgggtaaatgttccacaaagcttatattccagtctaaaactcttctagagttcctcattactatttatttgtgccttgaacaacactcctcattttattttataaaaagctgctgcagctggtgcagtggctcacacccgtaatcccagcattttgggaggcagaggtgggcagatcacccgatgtcaggagttcgagaccagcctggtcaacatggtgaaacccgtctctactaaaaatacaacaattagccaggcatggtggcacacacctgtagtcccagctactcgggaggctgagacaggagaatcgcttgagaacccgggaggtggacatggcaatgagccaagatcatgccaccgcaccccagcttgggggacagagcgagactctgtctcaaaaaataaaatataattaaattaaattaaattaaaattaaaaagctgctgcaaccacccccctctcttcacaaaatttctctggttctacccttgatatttcttctcctggtctgttttctcctatgagcccccacatagatggctcattccccttctctgccttgcctctttatattgaatatcaacctcagtttttctttccttctctcatctctactggtcacctccctcccccacttccttcactgctcactctgtaggctgaatatactgcagctggcaggcacttggcagcatcactctcaacccatctccctgagcaccagccctgctttcctgggaggagggaggggagaatgcaagactgaggattggacactatgtctttgcagaagcctgtgcacctggatccctccacatacagaagtactgttctaaaatgcacacttaaaaaaatagctcatccacatgatttttagttgagaaaaaaattgtcacttgaatataacatatgttgttagtttatgtacctgtcgtactaaaagtatattggcttgattctttccaacttagttgagttggggaattggggggaatggaaaactcttcttgggtcatgacaaggagaacaacttattttctgcccctcctggattctcttccacggctttccaataaaatttctgactgccacaatcacttcccctattgctaagaacaagctttataccatcttttctctgcatcctcaccaatatctgttatgtttttactttttaaagatattctaactggtgtaagattgtatctcattgtcagaatagaaaatccagacacaaagccacatacctgcagtcaggtgatctttgacaaagtcaacagaaacatacactggagaaatgacatcctattcaataaatggtgctgggaaaattggattaccatatgcagaagaatgaaacccatcccaatgtctcaccatatacaaaaattaacaactcaagattgattaaagacttaaatgtaagacctgaaactataaaaataacagaaaaaaacctagggggctgggcattggcctacgcaaagaattcatgayttaaaagtaaatgcaacagaaatagacaaattggatttaaataaactaaaaagcttctacacatcaatgaayaatcaacagagtgaaaagacagcctgcagaatgggagaaaatatgtacaaactatgcatctgacaaaggactaatattcaggatctacgaggaactcaaacaactcgacaacaacaaataaccccattataaagtgggcaaaggccatgaatagatatttttcaaaagaagacatacaaatcrccaaaaagcatgaaaaaaatgctcaacatcactcagcattagagaaatgcaaattaatttagttctatttaacttcacagtatatgacraactagttaatgtttgcaatgtaagacattagtaacaaggtttcactaaaatactgtagcagatgctgctacctgcccaatttccctgcccttccttccttactarcagagcctcaatttggattggggcaaggatttattcatctaagaaagaaaaaagaagtgaatgtccctgggtcacttacaatatcattctggtcaataaatgttaagtagatgggagggattctgggaaaattattattttctggatagaaggtgatagacccaattggcacacatattttgccctttgtctttcccccttctttctgcctagaggcagggtagctatcttttgaccaccagatgaccatattgcaaggatggtgtgccccaggaagccaggaagaatggtctatgtctctccagattttgtgttatgagaaaaatayctcgtgtatactactattttgtgggcttttgtttcatgcagctgaaggcaataatgactaatacaaatattgtatttacaactgagaataagtaaytgcaaatttgaggactgttgggtaawcaccttaacaagattctgcacatcacttttcatgagggttctatccatgttaaagccattacttggatccaggacaacagctttcacctagaaaaaagtaggaacgagtccattaactaggaaagaatccattaagcaattttatttcatattattagcttaatatgtttccattttttaaacaactacctcttgattacgttggggttggttttccaactattcttcttattactgaactcatcagtacccttgttagaggttgaaaaaaggaagcaacaaacatcaaacttgaatatggtgctagaaaagttatatggggaaataagttgaaagcaatggctaggttttcaattgggaaactatggyatattttattgtatttttattgtgtattgktaaccaaaagcaagaacagagaaaccacagcaatgagtaatttttaacaacggcaaacaaaaatacacgtcaaaaaattcccacacaggagaayattattgatgtttccaaaactcatcaaggtcttctaaatgtctctataaatctagaactcacatgctctataaactttttaaaaatgttttcacaaatttgtccaattatctcgttatgcttcaactgaaaaacatttatgaaagcctcacagaatttaamggggaaaatggacaccacatcttaaaaaacctcttaataaaayagtaatcacaaaaatatttcttcttaccataaaagcaatcagagtttcagaaacaatctctccatgggctgcacattcttgtcctatttctcgtataatactccttataacactttcggcctgagttggaggcattctggctaaataaaacaacaatttttttwaaaaaaccgtggttttatgcaaatttatttttttcctcttttgatttctgcaatattgtatttgtaaacagtcataatatcatctattagcttattagcatttttattagtatctaggcctctcctgtttttcattatttttaaaaatgaaggactttattgaagacagacaacgattgggatttcaaataattgaaacatttgataaataacattttcaattatttaaattatggtcactaaacatatattcctatcatgatattcttaatttaaaaaaaaaaaaaaaggctaagcaggctgggcgcgatggctcacgcctgtaatcccagcactttgggaggccaaggcaggcagatcacctgaggtcgggagttcgagaccagcctgaccaactcagagaaaccccgtctstactaaaaatacaaaattagccgggagtggtggcacacgcctgtaatcccagctacttgggaggctgaggcaggagaatcgtttgaacccgggaggcggaggttgcggtgccattgcactccagcctgggcaacaagagcgaaactgtgtctcaggaaaaaaaaaaaaaggctaagcagtatttgtaggggagggaggtaaaattaatgagaaacccaagagtacagctttaaaaggagaaatgcttattccaccacattcattaaatgacccttcagaactgtactagaatcttggaaaacaattcttgctcagatcattaaaatgatcttttccgcacatctaaaatagagttcagactctcgataaaaaaaagcatttactataaggaaaaagtggtaggttttgatcgagttttctgattttcctgaatatcagtaactaagcacaatggaagttggcatgtagagtataacaaaggcaatatcaggtagataaagccaactcctcagcattattagctttccaatggatgagtacgaagcactaggcattttgtccagtgaaaccagattgcctggattccatggtgacccgaccactgtccagctgtgagaccttgggcacttgcttcacttctttccagaggtgtgaggactaaattagtcctgtttttagtggttacaacagtgcgcggcttaagggaatcgcttaaaacagcttataatcagtactccaagatcacaggcagcgcatgcgcaagtgccagtcagtgggagagtccgtcgcgctccggatctgtgtgcgcgctccggatctgtgtgcgcgctccggatctgtgtgcgcgctccggatctgtgtgcgcgctccggatctgtgtgcgcgctccggatctgtgtgcgcgctccggatctgtgtgcgcgctccggatctgtgtgcgcatgcgcgccgctgccgggtcgctagggacgcggctcagcaccttccctgcacccaccctccaattactaagtctcccgaggtccggcttctggggtagccagtggagcgaaacagaagcgggaggcctcaggcacccgcgcaaaggctagagggcagccctgcagccctggggtggcgcctccggcaggaatgaaccgctgttccagctctgcggcggcgcagcctaaaggatcgagactgagagctaagtctcgacgaggcaggacgcggtcctccagccgcccgagctccgccagccgccccaagctcgccgcctggcggggtacgcctccgggtcaagggcgcggagccccgagtaggctgacctggatcggaatcgacagcaggagccgtgtctgtctgcttctgtcctggggccctcaccgcgacagtcggagcagttgggcgctcgcagccaccgccgcgtaaccatggagatggaaggctccggaccagagggggcggggccaggtgggggtggggcggggtcccactttgagggtctttcccccaaaagatgggctggaaaaactttaaaaacaaaggaatttcaggcagagacatcttaacctccgtggttaagactgtgaaacacaagttctcgtaaataaggatattaacttgctagcgtgggaatgatgaggcggctttgaaagcggggtgggggagagggaggagccagttggagaggctgggaaaacggaagggctgtatcctgggcaaatagagttcttgtaaaagtatctagttttaaaaaacaaaagtaaaaagtatcgaggttttatttcatgtcccgttgttcaaaggaagtctgtaacagaacgctccaagatgcccgaagagaaaactgctcattcaagaagcacatgataagaacacattagtgtccgagtcaaaataatgaggttttatcccttaacgataatatcgttaggcccaccttcagacgtgaaagtgtgaaaaaggattaaatactcattagaaggagagcatcaaacaacaaggttttatttttaaacagtaatttttctcaaactgcaaacaaatatgcagaatatgctttgcttaaggacattccctgattactaggaaatgaatcaacacaaaaactcaagaatacacatcataatataacacaattttatttccgccttctagaaaatgttcccggaatgtggaagaagcttgtgtaaaaatagatgttcagagtaacaagatttataatagcacagccttagaaatctaaacacgttatttaagtaaaatatcaggcaggtatttaaaattatgttaacaaaaaccttgtgtttgtcttatatttgttaaaagccaaatgcgaaatttttatataatatgacttaaactatattgacatacatataatgcacaaaaagtgtaggtcagtttttcaaaatcacagcaagcaattagatctaaggatggaattataggtaaattacttttatttctttatacttttctgttttttctagatttttccataatgagtatatattgtcttatgatctataaaacaaaatttaaaaatacaagggagatgagactggctatttgtagagaatgaacccaatttagatatacaaatatactgtaagtatacaaggtaaagcaaccaaaggacggtgagatagcaaaattttaacagtggttgtaactttgtaatggcttatggctgatttgtcttctttatactttaagatagctaccaaaatgtcttccatgagcatatattatatattagaatattaaatatcttttaagatggtaagaataataccataatattaagtatagttttaaactaatgggcaaatcctggcacaaatactccctgagtatgtttgatactgttaattcctacttaatgtcaatgttttcttctctttctgttactaatttaaccctgtgttgggaatgacagtgttctcttttaaaaaaaaaaatctctcaacctctttctctgtgagagtggcctgtgacatggtctagccaatgagatgtaagtgtaatcactggatgaggtgtcagggaaagcacttccattttatgtctattgcctttccttttctttctacttgaaatgagaatatgctggctgaagctccagcagccttgctgtgaacataaacatgagggtcacatcttaaggatggtggaacaaaaatgaaaaaggaacctgagttcctggtaacgtcatggaacagccctatcagcttcttgactggctatctccagactttgcatgagagaagataaactcctattttattaagctactgttatttggcttttttgctacattcagccaaactgaatccctgactgctacaatgggtatgactttggaagtattatttagcgttttgtgctacattgaattattctccctaatccttcatgcctcttagcatccacacctttgccatggactttggtggagtatacttccccaatccttgattttgaatttagccatgtgacttgctttggccaataggttgtggtgaagcaacggtgtgccaaatcagatccaagatcttaaagagaccccatatttctgctttctctcttgtgcctgtatcattgccatgagaagtacatacaaagcaagctctttggtcccagaatcacatgcatatggcacagaattgcctgaaccgatcttttagtaagatgcagagatgcccaactagggcccagcctagatcagccaaactccagtcaacctgtagatgtgtgataatgaatgagtattgttttaaaccactgagtttttgagtggcttattatacagtataagtgtggaaagagttcatttataaacctttcagtgatttaaatttctcatttataaaacaaaacaatggtatctatctcgtggagttgtgagagtaaaatgagatagccgtcatgaagcacttagcacagcatctgacatagataaaaggattcataaattttagaaactagtattttatgacctttatcatggttattattgacaacatcaactatgacaatatattttatactcccatggtttattggacttctagtctttgtagaactatttgttcctagttttaacaaggcagcaatggcatttaattaaaaaacacggaggaaccagagtgcatccagagaataagaaaaattttgtcagaataagatagagagaactggatatatttaccttgagaaaaagaaggcatgagaactcttctcagttttgttaaaagagaaaccaagttttatgttgtttcaaaacaccagattacaaatctacataaaacagtcttaaaatagaattgtgatggaagtcatcctagaagaagtgaaacccattttatcaaatgttttttatctaaaagctaaaagattgcctttaagaatattgtagaattaatttcttctgattaagtatctttaatatgtcacaaactgttcaacatttaaagagagaattatatatttttccttttcctcaggctttaagaagttttaagctcaaatgagttgagcttcttagcatgtttaataattttttattgagccgggcacggtggctcacgcctgtaatcccagcacttcgggaggccaaggtgggtggatcgcctgaggtcaggagtttgagaccaacctggccaacatagttaaacgccgtctccactaaaaatacaaaaaattagctgggcacggtggcgggcgcctgtaatcccagctgctcgggaggctgaggcaggagaattgcttgaagctgggaggcggaggttacagtgagccgagagatcgctccattgcactccagcttgggcaacaagagcgaaactccgtctcaaaaacaaacaacaacaacaaaaaataataataattttttattgaatactggacgttgtgaattgcatccttgttcagtgtctgaattgtccccctttaggaagggttgtgctgtttttttcagccagttatttgtggatgagtttgattcatttgtggactgtttttaagcttttttagggtaggtctagagtagtcttcattccagaaataatttgaccttactactaattaataactgctcagaggtcttcaatgaattccttggttttcactgaggactcttcactctggctggtcagagctcaaatgtcttctcatcctctgtgagctctaagaattatttagcttatactccctggtcattctgtgctcgactgtgtggattgtcaatccatacatgaacagccaagtacttagcaaagtctcagatttatgaattctatttatttatttgtatagcttcatcccttccaaaactttgcccttcaatttccacatctgtgaactctgatctctgtctcctcaactcaataaagtccctaggcagtgggtttacctttctatgcccaggatctggaaactgcctccaggcagaaatttgggggcaataacagcaaacagttgttttatatattttgcccagttttctagttgtttgtggtaggaagttaagtccagtccttgttattccatcatggtcagaagtggaaccttgggtaaccttggagagaggctaataggaaataaccatctgggagggtagaagagtgggtgggcttactagaaactttcagtaactttcagtaattactgagaagtaatgaatgtgcatctgagtgtcaggatcatgaatttaaagtgaaagcattttgccatgttaagtgattttctttggaaattattcagcagctcaggagcaagcatgatcttgaagaatggttggcttgaccaggaactagcgtattgccagactagcattatcatgctagaccatgcatttaaaccaatgtagagcaacaaaagcaatttactagtttttttgtttgtttgtttgttgtgagacagagtctcactctgtcacccaggctagcatgcagtggcacaatctcagctcactgcaacctccgcctcctaggttcaagtgattctcttgcctcagcctcctgagtagctgggactaaaggcatgtgccaccatgcccagctaatttttgtattttttgtagagacagggtttcaccatgttggccaggctggtcttgaactcctaacctcaagtgatctgcccgccttggcctcccaaagtgctgggattacaggcatgagccaccggcccagccagcagttctttagatattgtgaagatctaagctaaatttttcagttgctaacaaagatagataattaacatttgaaagagtactttggagcttacaaagctatttcacagatagataactcatctgttccttaaaacagcctcatgagagtgaacattattatttcactttacagatatagaaatcaatattcagagagcaagagactagtctaagactgcaaagctactaagttacggagccatcttaagtcttattgctcttataagtacttaaaatgaggggaattcttttaagcttctgaaaattctagactctttttcccaaaaaattcatagagcccctaattttatatataatttcagataatatacagattccctgaagttcatgcaagtggcagtgtactcttggtttaaaatttctaattttttcagcactgtaagacagggtgggaaaaaaaaatttctagtttttaacttgcatctagatagtagttacatggctattcactttataattttttaactgtatagatatatacatatatacacatatacatacatatatgtacatatatacacatacacgtatgtatatgtacatatatacacatatacacacacgtatatgtacacatacacatacgtatatatacatatgtatttatacacatgtatatatgtatatataaatatatatgttacactgacttttctgtatatgttttataataaaaaataaagcctcagtaatatagaacttctctacttttagttgtgctttgtggatgttaagcattaaaacagagctgtattcctaaaaaatcctcaaaagttaaaaaaatatatattgtgttattcactttgttttcattgtctttctccattattatccatgtgcttcacaacagctctcctttttttaaaaaaacacaacctgtatattacatgtagggcatcgattttgaaactgtgaaagtcagagtcctggaattagctgacaatctccttttccagtttatctttccttctccacaaaaaggcttgataacggagagggaagttgagatttcaggtcaataatgagaaagaaattatggaacaagtaagacaatgcaagtcacccttatttccgtttctcttaggataagcatgagctattttcatgtactttcccatatccttttagtcaggaggatcacaagattatt

SEQ ID NO: 97311 - DNA, 12607 bp, Homo sapiens
ggatataacaaaatttactgtttaaaatagctatattgggcataatatgctgtccatgatgagttcacaatgaatatctgaagacagtgggggtgaaagaacacctcagctgcaggcatgattctctgttttggagcggtggatctctactccaattgcacgttaagattacctagggagagactgggtgcagtgccttgtgcctataatcctagcactttgggaggctgaagtgggcagattgcctgagctcaggagttcgagaccagcccgggcaacatggtgaaaccccatctctactaagatacaaaaaattagccaggtgtggtggcatgcacctgtagtcccagctatatgggaggctgaggcacaagaattgcttgaatctgggaagtagaggttgcagtgagccgagatcatgtcagtgcactccagcctgggggaaatttttaaaatctgatgcccagggctttgcccaagatcaattcaatcagaaatctgggaggaggatgggccccaaacaagtgtttttaaatatatgtatttcccacatgattcttatttgcaataagggttaattaagaacctcttctcagtagaaaacaaacctgcaaatatttctagctctgggcattgtaaaactcacacctctggctattgtaagcaatttattttgctccttttcaaactctcagagatggtgaggcacaatcagatatcagagatgatggaaaatgttggaaatagctctgcaactagcaggcaagctggttctgaaatgtcggctcatcttaatttcagctgtgtttagagaagaccatcttactggttcacagagcactcccttgtggctaaattattatgggccaacaccgattcttgtttgcaaccttctgcaacaaacacacacataaacacacacacacacacacacacacacacactcttctcaggataaaatattttaaaatgctgactttaagatttcaacaaagcattaagtatttttcttatatataaaaagttctttccagaaagaaaatcctagccatatgaccaacaagaggctgcatggatcactgagaaaaccctgagtgtccacccatgctctgtgggttgtggtttaagatgactctttggacctcagattcttcatgtgtcaaatgaatcaatgggactctctgactgcattatactaatgttctataatctatgattcacttttctagaggactcagccaagttggggattcccttatttatctagtagattaaactcttcagactcttaaagaggtagaaggaaatagttcgagatgagcaaagtggttttgttttgttttccttcctcaacccccttcctgcatcattgagctgggtgaacagttgctaagaaaaaagcgaaatgttccaaactaggggactttttggacatagattctgaaacttcagttgtgatgttggctggacacagtggttggctttctttgtggggaatggcacaagagaagagaaagatctgcttttcatatgtcagaactaattgtgaaataagtgggcctacagactaatctaatcatgcttttctttattcacctcatataaaagtctctttagaatgcatttgaacacaatatataataataatactataacatacattgtgagaaacatttgaaaatgataaaatgtccacctgaaacaatgcagtgttcatagacatacattggtcatgcacatttgtgccattttctgtaattactgagtcacaatgctgaactgaaagcatgaaacatattttacaaactgaaactgacatcagtaagaggcctaacaagtgttatcagaagaggcttcacatttgcgtaatttgctacatcagttcacattttattataaaaattcacattgttttattgttttcttttgtaatgaactggaacatgacattcctgcttaatggcaggcaggaggctacctcttcaaagtcagtagttcgggagcattcagaagaatcatctgtgagcaaatgtagtgtttccttttgaaccaaagccacaatgatagtaggatccagttataacccaactcatgcccacatagatttggatagaacctgggtaaaaactacatcccattgccccctgcccctatcaagctatacaaaagtaaaagctcagtataaaccatttagtatctaatgtgagaatattgtttccaaaactggttcataaaggggttgtgcagaagtagcaactcaggcagggaaagggcagaccctttgaacaaaagcccacccctgtcctctctgccaagggggccatatgtctctactaagtgacgtttgggttatataatacacaatacaaaacattacaagaaaaagtcgtaactcttaggcagagttttctacacaaatttaacaccaccattggcaggcaatgttagatatataaattaataacttacaaaacattacattatatacattaagtaataaatacacggttataaacaggaatggaggtgttagcgcagaaggcagtgcaagagaaggacggcagcattacattgaaaacagcctaacggggtgaagagaggaggtagggaacagggccagggactgtacaactcctgtggggggcagggtccaagacacagcagggcacactgctgagttctatgcagactctcacggtgaacgacaccactgctcctttctaccccctaatttgttcaattttattctgtttacagcaaaaagttaaaagtactgttggaggcaggcaaacagagagaagttttaagagtgactgtggagttggactggacaacaggggaaggaagtaaaatgtggttagaagtgtatcctttctgtctgtttgcaaaagtaactgtagtaaagtgaaggatattgcccaagaaagaaggaagactattttctttcccttttccagaaagagtcaaaaaagtttgtcaactttgaaagcttatctgtgtagaagttgatactaaactccaggtattcaacaggcattttaaagacatgaaaatgttttacaaaaaaggcacacaggttggcagacaaagggacaagtgagaagattcataaatgaagttattagtcagtgagttcagtcactgtcggggataagttcccgaaacttagtgcagaatgatctctcagttttgtgtcttccattttcaagccatgtgtcttgatcagaatcggcccccagcaacagcttcagccctctccaccaagcttgccatcaaggcaagtcaaccgtgggatttcctgagctgctatttgcttcctggtcttgctttctgactccaaactcaagtaactgaaaggccaggtggcccttgtcctgtgcaggtcttggcccccatggtgggctggccctaccacatagctggcatgctcatcaaggatagaatgttcatctccacagggagagggggattatgtatccacgggggacttgtcttctgttgcaatgtctatgtcagtctctcccagggaatctctgttttctggatcaatcacacaaagcgtctttgtgctgctgaaatagctgtgtccctctccctccttctcaggtccttcagaatcttcctcatcgagagtcagttcaaactgaaacttctccatcagaccctggcagtccctgttctgctcgtccagtggtggtgagggactttgaggtatcatgctctgataccagttcctgttatcttctaaggtatcgagaatgtcctgagcatcaggctgtaccaaatctgcccatgtctcccacaatggatggacaatgtagtcgatgaaaccaacctggagaaaaataagatgacacatctgttattgtgatggtgcttgaaaagtaaacaaggtttcctggtttccatgcaaagaaagaacattaataacttcagaaagatcaatcataatggattccatgatttgggcactcacaatacagtgggtcttacactgaatgcaatcgatgtattctctcttaatcctggaaggtaagtattgctgtttactatttacaaaggcagaaactacgacttattgagattaaatatcttgtcagaggtcacataactagtgactggtggagctgggactcagtcccagcttcatctgattccaaagcccgtgttcatcttgctacaacagactgcatttccttttatgtgcgccagataagaagtctggatggaatcctcatgatttccagggacccaaagacaaagaatgactttgccactacttggattctgtgagtcattttctgaagaaggcaggcccaggtctaacgtgttttgactcaatattttttccttgttaactttaaaatatgttgctattccaaagtgatgaggagctggctcctgactactctggaatttctcaagttctgtggaatgcttttggctggtagaggagtttgatgaaacacgtgaaaatactttgagccctgaaagaaacacatatcccctcggtggacatccatgcaattgttttggatctacagagcacgcagtcatttccaacaggtgaaagaagggaaaataaaaaacaattaagcagttccttttgctgatgttcctgtgattaaataccaggcttatggctctgttatggtttactcaggggctatgcatcctgcatgagctagcagtgtggccttacgctggcctcctcattgttggacaaacaggaaacactgggggtggggacaagtagagagaaagaacaggcactagttgaatgagggaagggaattcccctgccatggtctggggagctacagagatgctgcattgggatttaggggtagatggtcaaagggcacccacccatgggacattatataggtctctttccacactactggaaactttcctttattaacatgttggtaattggccagtcatttaatacatccaagttgtactgtacacaagaactttggtcatatgtgattctttcataaataaaattatatatatatatatatatatatatatatatatatatatatagtatgatgtgtgtgtatatatatatatatatatgtatgatgtgtgtatatatatatgtatgatatatatatattttcttattcttcttctttctggtgctttcctagccttaaaaaggaagtttcacagcaaagtcagggaatctctgatctatactggttacaaaaactcaaccgtacatgattcagatatttctctcacttccacccactccttttccctcccttttacttctttatgtgtgcttaatgaatgttagagactattttcaaggtgttttccagggacccaaaataacaagctcaaggtaatggagaaaattgaataagctgaacacagtgcagtcatttcctttcttcgcttgttttgcttctgctaagaaatgctgagaatgtttttgaaaggtagctgctagttatttattccctagatcacaggacgagagagctgtatgaatcctgagagcacccagtaaagagctttactgctgggccaatcagacagtgttcagcagagcccattggtgggaaataccagagtggataacgatgtcatggcaacaggaagacctgtccctaagatggagagtgaagagctttggatgagagagctgctgtagtggaccaagaggacagctttgcacctgacatgctggggaaatatctactttatctatcttgcaaggctgtttggggatccaagtaagataatgtatggaaaatgtgtgaaatgctccacagaacatcatataaacataaaacatcactgctattaataaaagggtgttattcctccttactgattcatatcttgttccacttaagcctttgggctattcgaattaaccctcattaacaatgttaacttgcatttttacagtatattagacttcagagcactttcacagatttctttcttttttttttttttttttttttttttttgagatagagtcttgctctgttgcccaggctggaatgcagtggcacaatctcagctcactgcaacgtccgcctcctgggttcaagcaattttcctgtctcagcttcccgagtagctgggactacaggcacacactaccatgctcgaccaattttttgtgtgtttttggtagagacagggtttcaccatgttggccaggctggttttgaactcctgacctcaggkgatccgtccacctcagcctcccaaagtgctggattacaggcatgagccactgtgcccagccctttcacagattttttaaactcatttagttgggtttctctaagaagcaacaaaataaatattgcaaaggaactgtatattaatattacaagtatatgcaaatttggagtatccaggtagtagggaaagaggataaatactgaaaataaacaatccaaatgtttttgggataaagatcttggacagtctatgaactcattctcaatctcagctacttggctcagcccattcgttttcttgaaaaatctttgtatggatactgatactttccattgctgcatattctgcagctattggcatctggacatttctgtattcacccctccagactattgtcccctgtcctgagcacacacagaatgtgttgctttggacacaaccagaaaatgtcagcatgttctcaaaagcatagaagcatccttgggagggaagacaagacagggctttgactatgcagtaaaagagactgcctctggtgatggtcaccgtgggcttgattaaggacagaagataaaaacagagggctggaagcaaggatgaggagtagagttcttgaatgaagacagagctaggagaaatccagagggttgggatggaggagacactgatgttcatattattcagctggatttgctaacatcagagacaactatctaaatgatttagggacacatagtccaaattttgatgggtttctgatgactacttttccccaccctgtgaaactgagtgtaatggagaagtcgcatgagtcctgactataatggaacaaaatgcgtagttgtctccttattgtttcatatatacatattctattggaaaaacggaattaaatagaaccctccagctctataatcagcagagctcacaaaaactttgaaaatctcatattagatacctgggatttttccacagaagctgtgtgtttatcacacattgggctaatttccattcccctctcccgctctttgtctccctgctggaaaaattcctccatgatgcggtctgtccattgccgatacaattccaaggacttggtggggttgctcaggtctgcacagtgtaccatgttgcgaaggacctgaaatcatcaagttttggaaatctcataaaattaggtgtaaatactgccggaacatctcatgcctctcatactagtacgcttggtactaaacccgagaacattttagttgcattataattatgacatatgcaccgaaaaaaaatggaattacaatgatgctagcctgggtcagttatttacttttatagagtcccaaaggggaaaacgtgtgtcttcttagaccgacagtcattgaatttaaaaattggaaggaacattagaggtcagatgctgctatcatttccttttctcagtttggaaagaatgcaaagaattactcaaagtagataacttcatattttccacttgtggaaagaggagaacagctgatggcaatttgtatatccaaaacagacctaacaaacttcaagtcaatgggatttaaatccaaacacaagcttttggaaccaacagtcacgtatgccctattacaaatagattttgcgatttatttatataactaataagcagttccacaaatagagattatttttcctcataaattagaagataaacttgaatgtccattttccttagcttgttcttaaaataagccctaagctataggagtagcctaggatataccaataactgaatttatctttgttttctttttctaattgttgttcagcttagtttggtttggttttgtgttaaatcaaagactttcctcaaatacctgaatgcgatcggtatagttgtctaggagaagaacgcctgaacttgtaactttcttcgtttctaccattgtcttcaggtctgccagcaggctcatatgtttagacatatcagttgctaacaccttgggtaaaaagaaaatgaaaactcttaataaattcagtctatcagagagaatggcagtaagtgaggaatgtagagaggctaaagtcttaccatgtcaataaccatcttcctgagtgtctgacgctgcttcttggtgagattcatgaagatgtcacagtgttcttcttgcagcagtttgaaacccacagcaaggtgatgattttccaacacagattcatcattatacatcaaagcaagttctgaatctaataaatcagaccaaatgatgacttaattaaaaagggatatgatttgaatgttggcattatctcaaagtgaaatcagacctagttctctccaaattatttcaagaaccaccagctacatgtcatttcctcttagagaagcagtggccctctacaaacagaagtcatcagtttctaagcaaaaaatgcttctactggtgtataagctttccctgtgattaaaattcattgtattttaaaatccttttactccttctatatctcagatgaagaatttaatattaggtaagggcattcctgagcagctaaatcctatttttatgtatcttcaaaaattttgtactttggaaaagaacaacatgaaagtaccactaaactttatgaattgtattgagactttcaagctatattcacattttacattctccctaatctccggcaattgtgaattttggatggttaaagataatgcttgatgtaaaacttcattttacccaaatactgtcactttttagagctttctattaatatgatactaaacattactactttttgggaacaattctgatgtcaaattttctgtcttttggctctctccaccagaaattgcaatatctggaaacctaagctgcagcttccagcctgccttttatatagaagaatcacaggcatcttttgttagacagaagtctgcttgagaatatggtcatcagacttatgaaaccacattttctcttaatcaagaataccagacaagtggtggtaatgtgttacttaattacaggttctgttacacatatatcattgctttaacagtgtgctcttagttacaacctccaatgagtactcttgttttgttcatcctgtgatcaaggccacagatctacaagcaggctttatatgttgcagtgctataggtgactgtggtagatagaccatttttctgtgtgaggctaactggcctatatatgattcatgacaccacattctaccaactgatacaatccatgcagacatgtagctgccccaacattttgtttgttcaacagaagaatgaagtaaaaggacccagtgtactccaaacctaggtcattcagatattctttggataaaggtcaaggactgatgatcaggactcttttacagcaagtagctcaaaaagcatttctagaaaactgtcagtacttgatgttattcatgactacaataaccaatattctcaaagtacttagatttccagcacttagagatagtacattatttgagaaaatgaatggattttcaaaggtatgaaaactaaacattttaagcatgacaaaagctttgagtatggcttggaatcctaaggctagaccacccctggtcactcaggtcattgctactcccaatccataatcaaatctatgcagttggaagaaaatgtatggaacttttaatgacccttccttctgaactgtggaaactcattccagtgctttttatggcatcttatttttacctggaggttcccatgtgcagattcaacatttgtggctgcttcccaagcagatagggacagtagtgagttactatgctctgtgcgagagttttgcataatataaaaagtcattatcatgggatccccaaaccttttattgttctttatgaataattccatatctattattctttccttacatattgtatttgccaaattttgagtactttttatggctcccctatgaccctctccaagttctccatgcagctcaaacattgtgttgccagattggactgagtatccacgaaaggcctgaccagtttgagagaaatggaaggattgcctcattattatccttgtgattatccataatgaaaacattaggaggaaaaaaattaagcagtgaatcatacaattatctggaatgactgctgtagtggtgaactcacttgtgttgatgagaaactgattggagactccaggatgatcaacgtcatggatggcagctgcaaaaatggcagccaggatctccaaatctgtgaagacagcctgtcgggcaaataaacacatttaactacacatccaattcgcctatcctgcttattcagtttcatttgtaaagtatcctactttattcttgttgggagagggattgttgatttatgtaatatctcaatatactaatttaagtaaatgtagattctgttcatcatcataaagtctctgatgtgaaagggatgatggccagagctcaatctcacatcaagcctaaaggctgatgcttggaaagatattagcacaaatctcatggagtgtgtaaacgtctaatgtttgtttcttggaccagtgatgtggcagcatggtgcttatgtaacacaagcagatacaagtcaaagaagcaagtcagactggctctgctctgagacataacaaccttcatatactcttagctgaataacttagagaaaaatggccaaactcccgattcataagataagcaataaattatttcccaaagctaaatttatggtgtggtcacaagctttcagatattattcattcattcagtacgtacccactaatcacttactaggggaagatttgagaacctttctaagaagtgaaacctgaggccccactgctgaattccttcatgtcatgtcatgaatgcttctctgcccccacccatgcacaatgattcaaacctagtattaataaggtatatactggtgctcattctagagctgaaatgtctttcctcatcctctgtgattagttaaatcttctggtccttcaaatgccagcttgaggtgggtttccacctctcctataaagaccaatcacattacccaagcactcattgagctctcccttttctaaaaagtttgcagcactcatcattgtcaatttctggccacacagcaggtatactattaataacagtgagcagttgatagatagtgttgcctcactctatgatacttacacagggtataaaaacagtactctttctctccttcagagggatcaaacacccttagctccatctcactttctcaagatttcttggatttcttttcttagaaaatatgcaacacaagcaatagagttgccacaaaaaagttgtggccaatcttttttcaccttccaaactgaatctgtaaaggtgaggctggacagggcatggccagtctcttcctgcagtggtccagcacattttgggagtacttgaccatcattttcatttgtcaagtaagagtatgacctgctgtacacattgttgatgatatcggtatacacaaatgcattaatctatgaaggaagggagccacggccaccttctcagagttggtatggcaaatatgaatattgtttctccttgtttcagcatcattaattcttctgttctagatttttagttactacttcttcaacacattgcatcagttttataattttttaggagactaagcctctggatgcttattactaataagaaatatagagagtattttatatttctgtgatatcccccttggaatatagtgctctatatatacctagggtggcattgggcagttcagataagtaattgcatattgagaatatactatttaccggacactgaacaagacattttgagatacactgcatcccttagtagaaatacaatgaagaataagacatgattcctgccctgaaattctgttaattgctttacagttaaatacttttaatagtaagagatgtaaagggaaggttactctgatattagaaagcaaaacaagtagaaatgtcattcattttttataaatagctcagttaatggatgtgatacattttataaagaacctgttcaagtatgcagggtggtctaattacattaattttgtaagtatattgtatattgtaaggcactttttaaattttttttatttttatttttttagagacagggttgcccaagcgggagtccaggggagcaatcatagctcactgtaaccttgaacccctgggctcaagcaatcctcccaactcagcctcccgagtagctaggactacaggcacatgctactacatccagctgatatggcatttttgaaggaggatgggcaggaatgcaaaacaggtcataactactcacgtctaatgctggtgtagaaaggagaacat

SEQ ID NO: 97312 - DNA, 12621 bp, Homo sapiens
aaaaaaaaaaaaaaatcaaggtggcaatgttatgctggtggttaaggacagagcctctcctaccacagtgccactgacttgctatgtgaccctgggcaagtcacttaactctaatatgcctcagttttcttctgttaaaatggggataataatactgagctacctcaaagggcagttttgaggcatgactaatgctttttataaagcattttgggatccttcagcaaaggaattctcaagacctgagtattttttataataacaatgtccaccatgaacttgatctgtctgtgtgtcccggaagctatcattagtctatatggttctctaagagactgaatgaatccattggagaagtggtggataactagccggagaaaatttgagaatgcttaaactcattcccatggaaacatacacaggacaccttttctttgatgaggtgggatttttccctttttatgtggcatactagtaatttgtgacctaagaataattttggaataatttctattaatatcaactctgaagttagttatactgatctgagattgtgtttgttcataacaaaagtgaaatgaatctggaaaaaaaaaaaaaaaaaaagacagcacctctgtgcacatttcattggctaaagcaagtcacgtggctatgcctacctgcagagggagtggggaaggcaagcctactacatgtccaagagaaggagtaactaagtactcctttgtgagaagtcctaaggcttatcatacccacaaattgacttcatgaccactaatgattcatggttgtgagcgataattcagaaaacactcattgaaaggtttcgtatgctaacctacagtctggctcactacaacttccttctactggtcccagctctgcccctggggatactcaaaacacatctgcttcccctgcctcagaacagtcctagttggagacaacatctctcttccctaagtctgtctttctcctggcgaaatactcccaattcccccagttctccccagaatgagactttcagtttcctctccatcccagtcaccctcttcagccagtacacctcctaaagtgtcacctcaaaatatggtctgaacagcttggagctcaaaagttcccatttactcagagagataaggctgagtaaacttaaggacaggactgactttcagaagcaatttctgtagagccagttatttaacttcctcattcagtaaattctgataatcatattcccactggggggcccatgaaatctgatcagatcattttccaccttaaaactccgacaatggcttccagttactcaggatggaatacctattccttcaagtggcccagaaagccctgttgtaggttggcttctgcctgcttctccagccttgtgtttcacaaccattcctttctccttacactgcaggatactggacctctttcagaatctagaatgtcctctttcctgacttcacattcacacgaactgttccctctgctagggcactcccaacatcctcctctgcctcactaatttaactcctctttatcttcagctctgtttaaacatctcttcctccaggcgaggttaggtccctcaggtatatgcactttacatttctctcagtacttggctcactcataatttacttataactaattgtaattgcttgtaatttacttgtaattacttgtctatcttgcccactagattgtacatcccatgagaacaaggacttttttctgctctgttcaccactctagcgtctacagttaagcctagcacataggaggtactcaaatatatactaactaccaaataggtactaagcatgttggtacttgggggttagggatgcaaaaataaataccagcttactgtccctaacaattcctagtttggagatgggtaaagaagaaaaagtggccatggaaagtgctatattcattgtattatagagaaggttggggagcacagaagaggatcaacccagctttagaaggattagagaaagcttccagaggggtggacatttgagctagcaagaaagcacaagggaaaaggcatttagacagaggagacaatttgtcctgacccagaagcattggggtatgctatgcatggatagacaaagaatttgtgcaaaaggggagcagcaaggcatgacagacacagataaaacagcatcaacaaccagggatcagggcaaaagtctggacttgatcctgctggcaatggagagagaacaaaggatctttctgtaaaaatgggttctccctatgttgctcaggctggtctcaaacttctggcttcaagcgaccctcctgccttggcctccaaaagtgccgggattacaggcatgaaccaccatgcccagcctaaagaacaaagaattataagcagatgaatgacactcagatttgtgttacttactaacacaaatgacatatgttaaaattttatttaaatttacttaaccatttccaaaacttactggcttaaaacaaccactactttatttgttcatgattctggaggtcagcgatttaggttggtcttggctggggtcactcatgctgtttgggtcacctaaccgtttaactgagcttaggaggtctaagacagcttccagcacatgtctccagcaggttggtccaggcttcttcacagagccgcagaagagctccaaaatgagcgtggaagttgcgaggcttcttgaggcctacatgcagaagttgcacagcatcccttccaccagactttactggtcaaaacaaatcataagatcagcccagattcaagaggtggggaaacagactccatctcttaatgacagaagcagcaaagtcacattgtactgggacaggatgggaggaattattgtgatcggcgatcacacaacagataaggggtggcatgagaggatgggggagaatggaagaatttagggctgattggagtaatagaaatgagttttgaggctactgcctttgatcagtgagaaatgataaggccctacctaaggtaggaatgctaggaaggagagaaatataagcgacatttcaagaaaggaatttcagattgtggctgggcgcagtggctcatgcctgtaatcctagcactttgggaggccaaggcaggctgatcacttgagctcaagagttcaagaccagcctgggcaacatggcgaaaccccatctctactaaaaatacagaaattagccaggcgcggtggcatgtgcctgtagtcccagctactcagtaggctgaggcaggaggatcacttgagcctgggaggcggaggttgcagtgagccgagatcacaccacggcactccaccctggtgagagccagaccctgtcttaaaaaaaaaaaaaaaaaaaaaagaaatttcagattgtaactttttgagttacttaagcaatctaagcttgtttccttctctataaaatgggactaaaaagagtatatcagctgactctggatttgctgcctatgagttagccttactctgcaaggagcagtactgttcaataaaagattgctgtctaacaccactagcttgcccttgaattctttcctggctttctcccaggctaagccccagttttgaggcttgcctgccctgcaataaaaacacaccataaaaatagtgcaaagaaaagccacaaaatggatgaaaatgttcaaattaacgaataactctttcaaagttttataataaataggcaacaacaaaaaagagcatatcccagggtttctgtgaaagtaagaaacaatgatgtaagtaaaacaatgcttttttcacatgggcctggctcaggtacgttcgatatacagtagtgattactgtcactgcatcaaggatagctgcagtttctggcatgggcagcagggtaaagggtggtgttaagtttggagatgaagaatgcagatgggaagaagggcagattggcaggggtgagagtggtgatttgagttgttactggggtctctgcttgacccccttgccttccactaaagaccctcaaatctgagatcttctaatccaaaggttcttaacttgggggagataggccttaggaagtaccaaagcccctgaaattatatgtaaaatgctatggtgttttttgtctttatttttctgagaacggccaaagcttttaccagtctctcaaacagatttgtgactcctaaaaggtgaaaaccatagatccaagctatcaatgtatattgacccataactgccccaatacctgaccctctgctgtggttcaactgttgcaaatcacaaggaaagaggagctcatgaacaagactgaggcaatactgctaagcttccaggtctctcaatatgatccctcctacattaagccatattttgcattattattctctgtgggcttggttctctacccactttttttttttttttttttttttttgtatttttagtagagatggggtttcaccatgttggccagcctggtctcgaactcctgacctcaggtgatccacctgccttggcctcccaaagtactgggattacaggcatgagccaccatgccaccatgcccagccaacccccttctctttttttagggagacctcagatgtacaaaattgaattaatcataatctttgtttataacatacttttatcacttttgtcatgaataacaaatttttatgtataactttttattaacttagctgcttttaataattcaataagcaccaaacataaaagctagagccttaacaataatctaactttatgttccctccagccccatcctatccccctacctctaagaaccattatactgaattccatagtgagaaccattctttccttcttacatggttttactgcatacatgttctttttacatgtttttaaattcttaattgtatttaattttatagcatcactactcattagagaaatgcaaattaggaccacaacgaggtatcaagatacatccactagaatgaagtttttatttattatttatttttgagacagagtctccctctgttgcccaggctggagtacagtggtgcaatcccagctcactgcaacctctacctcctgggtgcaagtgattctcatgccttagtctcccaagtagctggaatcacaggtatgtgccaccacacccggctaatttttgcatttttagtacagacggggttttcccatgttagccaggctggtcttgaactcctgaccttaagtgatccgcccgcctcggcctcccaaagtactgggattacagacataagccacactgcccggcccactacaataaagtttaacgttgataatcctaagtgttagtactaagatgtggagcaaatggacctctcatacattgctgatggccgtgcaaaatggtagatccactttggaaaacagtatggtggtaccttataaagttaaacatacatttaccatatgacctagcaattctacccctaagtatttactcagaagaaaacatgggctgggcacagtggttcacacctgtaatcctagcactttgggaggccgaggtaggtggatcatctgaggtcaggagttcgagaccagcctggccaacatggcgaaaccccgtttctactaaaaatacaaagaaattaaccaggcatggtggtgggtgcctgtaatcccagctactcaggaagctgcagcagaagaatcgcttgaacctgggaggcgggggttgcagtgagctgagattgcaccattgcactccagcctgggcaaaagagtgagactccatctcaaaaaataaaaaaagaaaagaaaacacgtactcacaaaattatatgcccaaaaggtattggcagcattactaataatagccccaaactggaagcaactcaaatgtccatcaactggtgaacagataaacaacatggtggtatgtctgcaccatggaatacaattcagcaataaaaaggaacaaaacattaatactcacaacaaactgaatctcaaaaacattacactaagtcaaagaagtcaaacaccaaagactacatattgtatgattccatgtatatatgcaaaaattttccaagaccaaatatttgaaaggattatccaggcttcacagagcataatcacttaagatttttatttaaaggcaaaggatacagggcagcaagagaaagactaggtaggtaaacatcaggaatctcagaattcccaaatacaagctccccatggtccttatgcacatgtggactgcactgcaaagtgcctttggattgaatcatcatgatctatgtgaggcatccatcctggttttggaagagctcaaatcagaagttcccagcagggcttttatgttgctctggccatgkaatcaagccagacataygtaactggttagaccagctgcaaataatcaataaaaggagtgaccagtggagcttcagactttatttatttatttacttatttatcgaaatgaagtctcttgctgtcgcccacgctggagtgcaatggcgctatcttggctcactgaaacctccacctcccaggttcaagcagttctcccgctccagcctactgagtagctgagattacaggcacctgccatcatgcccttttgtacttttatagagatggggtttcaccacgttggccaggctggtcttgaactcctcctgacctcaggtgatccacctgcctcagccttccaaagttttgggattacaggcgtgagccaccgcacctggccgagcttcagactttaaacagcacattataaatcccaatgcctttttttttttttttttttttgagacagagtctcactctgtcaccctggctggagtgcagtggcacaaaacggagtctcactctcttgcccaggctgctcactgcagcctcaaactcctgtgctcaagtgatcctcctgcctcagcctcctgagtagctgggaccacaggcacatgccagcgcacccagctaatttttttttttttttttttggtaaagaccaggtctcactacattgtccaagctgatctagaattcctgggatcaagtgatcttcccaccttggcctcccaaagtgttgagattacaggcgtgagccactgtgcctagcctattttctattttctacatcttgatggtgactatactattatatacaattatcaaaatttattaaacaatatatttaaaatttatgaactatattgtatgtaaagaataactccatagaaaagaaaaaacctttcatttagaaagggcatcatgctacatttactcttctgggattaaacttttttcacttaattattttattgctcagattcatccatatggttaggtatcattatagttcatttgacaattgtataatgttctattatgtgaatattccagtttacttgtccactctcttgctcatgggcatctgggttatttctaggcttttgcttttgtgaatagggttgctatgaatattcttgtacacatctcctggtgtacatgtatgagtttctctaggatttatccccagtattggattaactgggttatagggtagctgaatgttcaattacagcagataaactgttttccaaagtagttctctgcttttcttatctaggtctgcctgtccccaattagatgatgactctagaggcaggggaccctctcattttgaattaccactgcttagcattcaattagcactaggctggatatccaggagtccaagggcagaagcccaggcacctgaggcctcttagcctcagcgaatactaagtactatacagagtgaacagcatgcagggaccatatgccacgcacggaggcggttacggtcctactcagagcactagccatgctccttaaagctccatcttcctagcttcacctgattttgagtctcagagatcttccagggccctcaattacaatgcaaatcccaaaagaaggcttaacctcagctaaagtccctcctcaactgacacctctaatacccaaataaggatgagcaggaaagacagaagggacaaaaagagtggcaggaagaggaggaataaggaaagtggaaaagccaagaagccttcaggtattctaaaattatatacccttttctgcacaggatgttttccaggaaaaaaaaaaaaagtttaaaaataaaatatctgcaagtgaccctgagcaattttttatatccctgccactaaaggttactttcttttggctaaagttacaaaaacaacatatcgagtatgcagtcagtaaatgatgaaatcttgccctgaacacagtgtgtgcagtgaagccctgtgatgctgagggaagagttagggattagggggtgggccaaagaacaggcaccagagctcagctgcagactagaaacaacaaaaagtctggaatccaacaaaacaaaacatcaggaaattcctaggtgttcagaaagcaaaaggagagttaccattctaaaggatgaggaagcccagtaatctcccacaatcccaactgctacatctccaagagctccctagctacctgtcatacacgaggtctgggaatacctgctagatgaatgaacaaagaacaaggcacgcacaagagtatgacggttttgtggcagaagcagcctcctaagccacatttgggcagcagtattgttgacagcaggaatggccagaattattcagctcagagggtttttccaatgtgagtaggtaagcagattattttgcactggcttaacatttttagttacttgttccttaaattagatcatgagccatatggaaaaaccaggcgggcttaattgagcctgttggctgctcaagactggtcaggtggaactcacttcaagggtgacaggggctcagtaactggctggtacaaatggaactaatggcatttgcactgacatgaagtccccaactgcagccccaggtctatagagtttcaacaactttattggccaaatgcttctcctatgtttacaacttagtgtgagcctgctcactggcttctccttctaagcccctaagcgggcagcaaactttagtacaggcctggagatggggtaggggttaatgagtgagttggaaacctgctgatgctccacaattggacagcaggacagcaaatcttctacttcttattgccgaaaactgcagaaagacacgaacaggatggagacaggaccgagagtgcatctctgccactggtcccagtttccagtttctggtgcatccaacagagtataccctttgtattcttgcttcagggattgggtgatactatgtcagcctacgcattttgcagaagtacatggggccaaaattggccatgaggtttggtattaccagctccccaacctgacaggatgagaagaaacaaaatgtgtccatgaaaacccttcggaagtgagtcagatcttccacctgtacctggatgctgtattgattggccaggagctcaatggcaccttgcaccacatactcgttctgtaagtgtgagagtgagcaggtagaatagacaacatggcctcctggtttggtggcaaggagtccagccctgaaaccagaaagagacagaagcagtgactagtgagcttcccagcagtagaagagcaacataaggagctggaaacatggataagggaaggctactacaggatgggtagctggttagactgcctctcaagtcccttccacaatgacactgtctgaaaagtcactctcaaggcagatagcaacccaaccttactccatgagctcttcactaggaagtctccttacaatgaccccctgagctcttgtttatggaccaaattgctatgctggctatagaatgagtccttactctagcagctatttttcaaacatgtgctactcactggtactgaggatgaaatagcatgagtcaatctgtgcagcccactctagtatatatatcctactagatagggttgcttttttgtttttgtttttgttttttgagacagagtcttgctctgttacccaggctggagtgcagtggcacgatctcagctcactgcagcctccacctcctaggttcaagtgattctcctccctcagccccctgagtagctgggactacaggtgtgcatctccacacccagctaattcaaatagggtttttatgttccagagatgatcccatttctgtctcctctaggcagatctccagccataagattcttgtgtgggttatggtcttggtaagagcttccagtcccccagtctcccagagcactctggcacaaagtcctgagtttaaaaatctgtcactcacgcaagaagctgcacttgcagcacaggcaatatctgtcgctccttcttccttgaccgcttaaagatgttgttctcctcctcatgaagggagtggcggtctgtggtacagggcacatccaccagcacctacccagagtgttaaagggtaaagtattaaagatccttataggcttctcttccttaggccagagatgttttaggcccctggcctaagtttgtgaaatattccctctgcccatccctcctttgcagagtacctgacaaagttcttcattttaacttggtagacaattgtgaaataatgagtggaaaatagtatatttgggaatattcatggctggtcaaaaacccaaaactaacacacaagtaactataattttttttttttttaatttttagagacaaatcttgctctgttgcccagactggagtacagtgatgtgatcataggtcattgcagcctcaaactccctgggatcaagcaatcctcccacctcagcctcctgagtagctggggccatagatgcaaaccaccactccagactaatttacatatatatatatatatatatattttttttttttttttttttttttttttgagatggagtcttgctctgtcgcccaggctggagtgcagtggcgcaatctcggctcactgcaagctccgcctcccgggtttacgccattctcctgcctcagcctcccgagtagctgggactacaggcgcctgccaccatgcccggctaattttttgtatttttagtagagccggggtttcaccgtgctagccaggatggtctcgatctcctgacctcatgatctgcccgccttggcctcctgaaatgctaggattacaggcatgagccaccatgcccggcctaatttttgtatttttgtagggacagcattttgctatgttgcccagactaactataagataattctttaaacagtacacttatgatttggtcacttctgtattatactccaataggaaagttattacagtctggaaaacatagtgagaccccacctgcacaaaaaaaattttttaattagccgggcgtggtggcatgcacctgtagtcccagctacaaaaaatttaaaaactagccaggcatggtggcacacacctgtaatcccagctactcgggaggctaaggcaggagaatcgcttgaacttgggaggcagaggttgcagtgagccaagatcgcgccattgcactccagcctgggcgccagagcaagacgccatctcaaaaaaaaaaaaaaaaatttagccgggcgtggtggcagcgctcttgtagtcccagctactactcaggaggctgaggtgggagaattgcttgaacctgggaggcggaggtagcagtaagccaagaccgcgccactgcactccagcctttggcaacaaagtgagacttcgcctcgaaaaagaaaaaaaaaagcttactacaggacacaaaaataaccacaaaacttaaaaggaaacacgactccttgagcaagtcagcagaaacagcaaccagtaaaactaaattcccagtttatttgtttgtttgtttttgggatggagtctggctctgtcacccaggctggagcacaatggcacgatctcggctcactgcaacctccacctcccgggttcaagcgattctcccacctcagcctcctaagtagctgggactacaggcgcacaataccacgctcagctaatttttgtatttttttagtacagacggggttttgccatattggccaggttggtctcgaaatcttgacctcaggtgatttacccgcctcagcctcctaaagtgctgggattacaggcatgagccatcatgcctggccggccccaatttgttttttcaatgagactagtcaactgctggagtgagaaagggagaaagagcaggagtgagaaggggagaaagagtagacgaagttccatctgtaactgattgtcaacaatagttttgatataggaattatccaatgtagaattaaaatattaatataaaccttcctaaataacaaaagaagttaaaagaaaaacaaaacagcaaggacagagaccccacagtgaaagaaacatggtaaataaacacagtaaaataatttgacaggtgtcaggcacagcggctcatacctgtaattccagcactttgggaggccgaggcaggcagatcacaaggtcaagagatcgagaccatcctggccaacatggtgaaaccccatctctactaaaaagacaaaaattagctgggtgtggtggcacgcacctgtagtcccagcta

SEQ ID NO: 97313 - DNA, 215485 bp, Homo sapiens
  misc_feature (1)...(215485): n = A,T,C or G
gtcaagagatcgagaccatcctggccaacatggtgaaaccccttctctaataaaaatacaaaaattagctgggcatggtggtgtgtgcctgtagtcccagctactcgggaggctgaggcagaatcacttgaacccagggggcagaggttgcagtgagccgagatcgcactactgcactctagcctgggcagctgagactccgtctcaaaaaaaaaaaaattacagtagcctctttatacatctgatatggtttggctgtgtccccactgaaatcttgtcttgaattgtaataatcctgtgtcgggcccaggcacggtggctcacacctgtaatcccagcactttgggaggtcgaggtgggtggatcaccaggtcaggagttcaagacaagcctggccaagatggtgaaaccccatctctactaaaaatacaaaaattagccgggcatggtggcaggcgcctgtaatcccaggtactcggaaggctgaggcaggagaatcgcttgaacccgggaggcggaggttgcagtgagccaagatcgtaccactgcactctagcctgggcaacagagtgagactccgtctcaaaaaaaaaaaaaaatcccatgtcaagggtgggaccaggtggagataattgaatcacgggggcagttgaccccatactgttctcatgatagtgagttctcatgagatctgatgattttataagggactttcccctttgcttggcactcattctctctcctgctgccctgtgaagaggtgccttctgccatgattgtaagtttcctgaggcctccccagccatgcagaactgtgagtcaattaaacctcttcattataaattacccagtctcagaaatttcttcataacagcatgagaacagactaatacaatatctatatctctctatagagatagaaaaaacatagagcaagagtgagagacagagaatgatgaagcaaatgtggttagatatgggtgaaaagtatgtgggattttggggtactatttttgcaacttttctttaaatctggtattattccaaaataaaaaaatcgaaaaattccacaaacatataacattttgaactatttccttctaagtatcatatttatatattttgtaagtatataaagcacataattgggataatagtcttttgtacttaacactgttttttattaacttggtattgaatcataagcagttttcaatgtcatttaaaattatttaaaaacaattgttaatggatgcataatagttctttgtgtagaggtttttttttgtttttttttgatagagtttccttcttgttgcctaggctggagtgcagtggcatgatctcggctcactgcaacctctgcctcccaggttcaagcaattctcctgcctcagcctcctgagtagctgggattacaggcatgcaccaccatgcccggccaatttttgtatttttagtagagatggggttttgccatgttggccaggctggtctcaaactcctgatctcagatgatccactcgcttcggcctcccaaagtgctgggattacaggcttgggccatagtgcctggcatgtggaggtattttaatttatttatttagggttttcctcacattatgtcataaacttacagtaaaacctacaattaacatctttttgcatctatctttgtccatatatttatatttgattagttacatatcctcatctcctagaatgagaactgctttgctaattttttaaaaataattttattttatttttagaggcagggtctcactctgtctctgaggctggagtgcagtggggcaatcatagattactgtaacctcaaattcctgggctcaagcgatcctcctgcttcagcctcccaagtagccaggactacaggctcttgccaccatgcctggtaattttttttttctttttgagacggagtttcgctctgtcgcccagtctggagtgcagtggcacagtctcagctcactgcaacctccgcctcctgggttcaagtgattctcctgcctcagcctcctgagtagctgggatcacggacacacaccaccatgcctggctaatttttgtatttttagtagagacagggtttcaccatgttggccaggatggtcttgatctcctgacctcgtgggctgcccacctcggcctcccaaagtgctaggattacaggtgtgagccaccgtgcccggccgggagtcttattttttgtgggccctgaaatttaaaggaaaagttctaaaaagtcactgagcatgtgggatgcaggctatctacagtctgatgagggaagttcagttcagcttaacatcctctggggtgtactttgtgctgagactggttctagggacacagatatgaatcaaacactgaacctgtcaaacaggggcttacaatttggtaggggagacatataagtaaatagatactgactgtagagtgatgagtagttacaaattgggaagcacaaggattaataggagcatggaaggggttttgtgtcttcctttaaacaaacttttatacagtatttacttgttttttttttttttgaaactgagtcttgctctgttgcccaggctggagtgtaatggtgcgatcttggctcactgcaacctctgcctctggcgttgaagcgattctcctgccccagcctcccaagaagctgggattacaggcactcgccatcatgcctggctaatttttgtatttttgtagagacagggtttcaccacgttggccagactgatcttgaactcctgacctcaggtgatccacatgcctcatcctcccaaagtgctgggattacaggcatgagccactgcacccggccagtatttactcttatatccaaatagaatatgcattcatcaattcttcctttttttcattcagttcacttataatttattgagcatatatcctagaccaaagtgagtggcagtggagttggacaggagaagagaaatttaaaaagcaaaaaagtaaaatttatcaggctttgtaactacttgcccaggagaaagacacaagagttaagaatgaatccaagatttttggcttgggcatctgggtggatgatggtgccatacgccaagtcaggaaacgggtatctttttggcctgaattttaaaaactaattttaaagagcaaagaatattttgcttggggtgctagtgcttaaactcagttgaaaaaagattcttagaatattggctttctacaggatgtagacagtataaaaatgaaagtggggaggtctaccaggttgggaatagacattttacggttgctagctaataggggaaatcaatgaaaaattgagatgagggtagccaaatcaattgacagaagcccaagggagattaaaatgaacaagagatttacagtacaagagaggaaaacaggtgagagacattttagaagcagagggcaaactgaaaacgatggaatgaaattgaagaggatgaaatgatttaaagtggactactccgatcagcggggaggttgtgatgataaaggcagctgctttcagcaacaaggagagaaagtgtgaagcaagaggaaactggtcttgggaacaaatgaatcatcttcttcatgtagtagctatgccctgggttgcatgattattcataaacaaatgcaggtttcctgtggtggcagtgatctaggcatgaaaaatacagtgctaatattaggttacagcgctaatgatctcaatcagttgaagggcccttttcccttgactaaacattttttagcaacaaatgacccttacagcattttgttaatattgttgaaaggactgttggggcatcaggttggggactgaagggaatctcagggtctacttccagctcttccttaggttggatatatttcacatgtaaaatggtagcataggacctaactcatagaatcactgcgaggatgaatcatggtttccctttgagccccagtttctcttgttatagaaagggcatagtgatttttttgtgactcaggagtatgtggcaaaggcacacttaggattatgcaggaacagctttcattaagagagctactaggtgacatcttctccatggtggctgctcaattattaaatgaatgattcctggagaccttttgtagtttctattatttatcatcattaggccataacctaaggtaaggtgagattgccttataacattttttatacataaaaaatactggttgcatgctgctatctgctgtgcaacagaatgtcataggatccagtgtatgaggctctattcttccatggaggggtgttacataaacccattagtgaaatttagggaaatttcacccagactagggaggatgaagaatggagcatctatcttttgacaggaatacagttacacacacacatacacacacacatacacacacacagagagagagagagagagagagagaatgagaaacaaaaacagaggagtacaaaattgagcctaagaaaaagaactggaaccaataaaaattgtaactaacatttattaagtatcttctatgggccagtctctttatctccaatcttcaacaaccagcaaggcaggcaggagaaaactgaagttcaaaaatgttacataacttccccagggtcataaagctatatatacatgacagaactggaactggtagtgttggtatgtgtctgacaccaaaatcactacacattctagtataccactctgttaaaaaagtgtatttggaaaatttagggatcagaggatttggagaattttctttccctacttcccctctgacagtcgtgtttgtttttggttctgatgtttgcaccctagaggctgactgggatcaaatatggggcatctgtaaacagaatgattccatagcccccactgtgtaataatttccttccttcagagccttactaggatttgcctgggatgaggggtggaaaggtgggagagaagaggttgggagggagaggatgttagtaaaagatgggtgattctttgcttacctttaagttgtttatgaatttcaggacaacccgttggctattctcttctctggcttggcatatatatatatgtatgtatttttttttcatttttgttttgtgggggtggtggtttaggtgttaagggtttggttgatatctgtagaaaatttcttaatgatctacacagtagataaaaaaacaagttaaggtcaaagacaattccttcgtctgttttgggagacgagtgtgtatgtttgaaaaaaaggtttgttctgggtcactcttctttcatccagacgcattaaaggaattagaagggggtctccctgccacccccgaaaccgtgagagtcaaacggagattcccttatattcctgctctcaggtgcgggtccgagtgacaagaacgttcacgtatcttcgggagagaacgaaaaggtgctcgggtctggcgggggcggggaacgccaggggttggtgggaactgaggggcttccggttcccgggaagcggagtcccgggccggccgcgggccgcgggctacgcagggagcacggggccctcgccgcccccaggccgcgctccttagcgttccctgcggctcgtgcccagcgcggccgccgcagtcccgacgccgtagccggacgtggggtccagggggcgctgtggcccagcggcgccggcggcaggagcggccacccgacgctggaggcttcgctgaggatccccgcctgccgcacctcggtcgtcccgccgcagccttgcgcccccggcccggctcggcggcgctcctccgggatccgcgtggctgccgcggcccgggcgccgatgcggctgggcgggtgccgggccttagcagcagtagcagccgcagctgcggctaccgcagctcctacaggagtgggaggtttcgcggcggcgcctggggccgcgccggtgccctccggaggaggctttcggctcagggacgacccccgtggccatgctgaagcggaggcggccgctgctcgaggtgagtgtggcgcggcgtggtccggggctcgccsgcctcccgccgcctgtgggggccctggcggcagaccgcgggccgggcggacggggcgtcctgccactgcggtcgcctcccccaccctgcggtcctggggcctcagccctttctccccgcgtcccccgggaggctgaaggccgtggggggcgattaggccccgcgccgttgggaagccctcgctccggcctcggttccggcgcggccgggtgtgtggagctgggggccggcaggagcacggccgcctttcgggtttgcatgggcccgggccgagcgcagcctcttagcccgggccctgcacgtacatcccggagggaggcagatgacgcctgtttgcaaacaagctttggcttccacgcgtcccataccgagtccctcagaatcccggttgtggcggggaaagggggaggagaggaaggccagggtgagaattgggggtgcagagagtgcgggaccaagagagcccctgctactcctggagtgtcattcatggatctggcttgctcgagaacaaccttttgcgtcttatttgaggtgaaatttcatcacctgccggttgctcattcctgcctctttatattatatcttgcctctaagcgtggtctgccttggagaaagccccatcgcatctttgcgatgctaagttttgtagataaacactcacagttataaaaacgtcttttacaaaggtctgccccccacaccccgccagaagaaatatttttatgcttcagtgttcggtacaaaaatgttccacttaaagagatccagagaatagttggcaaaaggattttaagtcctctttaagtgccagctaccctaataaatacctgaaggaaatgggatacatgctaaattttagaaataaaatgatttgttctgatattaatgttgaaaatgctactgattacagtttgataccgtaagtcagatatttatgttttgtgagaaatgtgattacaggttattcttgttttcctgttatgtatgtgaaagttataagacttataggtacttgcaaaacttttataatcatgaaaaaatatgcttattgtagaaaacttgggaattatagaaaggtaccatgttggctcttaataaatatttaataataggagaaatcacccataatctcacagattgtaaacagtacaggtttataatgggctcgtactgacagtgatttttaaaattattatttctgtatattaggtttaaaattatctgactgttccattttacattgtcatttgtataagacctgtaaaaatattttactaaattacattggaaccatgttgaattcatcaattaaaacagaagaatatgggtaactacctaaaagatccctgacttaaccttctatgcagcatggggtctccatctagggagaaagtttggcatggtacacgtttttgaagacctactgtgttagatgctgtagccttgcattgtttttgtcagattttaagtatttcttttaaaaattggcttcattaccagttatttgggtaggttaatctcgatttttaaaagtctaattcaggcaaagtgtgatggctaggcctactagggaggctgaatggggaggaccccttgatcctaggagttccagtcctgcttgggcaacgtaagcaagatgcccctctccgaggygggtggatcatgaggtcagaagttcaagaccagcctggtcaatatggtgaaaccccgtctctactaaaaatacaaaaattagctggcatggtggtgcccacctgtagccccagctactcgggaggctgaggcacaagaatcatttgaacctgggaggcagacgttgcagtgagccaagattgggccactgactctagcctgggcaacagagcgagactccatctcaaaaaaaaaaagttgaatacagttmtcagtgtgtccctcaagaccaccaacattagaatcagttgagagtgcttgttatatatataagtattatatgtaatatgcagattcttggtcccttgaattgaaattctagggatgacgatggcccaaagaactttatttttatcagtctccctgattcttagacctactaaagtttgagaatcactgatacagtaagtttaaaattaactaaccttgctgagccgaaggaaggtgtctattttctagcaaaactataagtctttagtggcaatagtcatttctttcttttttttttttttttacttccttgcagctccagctcaaaggatgtcatttttcgtagtaaataatcttagaaagaaaagtgatattttgagggacagctgatccaatcagcaaccatttattgagagcctcctgtgatagctgtggtgtgctaaaagaataccttgtcatttactttggcacttaatggacaccaatgtcattgtctgtaaaatgcatatacttcagttattatgcttaccttgcgaggcttttaggataaataaatctgaaaaggtattataatctgtaaaagatttttatacaattttggcttttaagtgccaggtcctgttataggtattccaggaaacacaaaaatgaccaagggctctactaaacttgtcctgtggaagcaggatacctttaattaactgttacaaggtaggtcagacaagtgttgaaattgagtggaacgtgctaaatctctgtttaaggcttctgtgtctcatcttgccgtttaaggacattgataatactttttatgtatgattattcctttctcttccaattcctgattcagtgttttctttaaggaaataattgcttatattgcctggtgatagtttcctattaactcttttagaaaggtagagtgagtagagatgataattccttcctctgttgctaagctaccactgttcattccattcagtaaacttttatgtggcaccttgtaaacgtgctagccacagactggttgcaaggcacaaagcttgtttaaaagataattgcctggattttagcttaagttcttatgttcctaaagatatggcgtatatatgtgtgttttatggttgttaattgcataatgtggtacagagtatggagtcagatgtgagcaggaatccttactacacctcttaaagcgatgtgacatttagattctgagtttcttatgtactattggggtaacactacccctcctagcaaagtagaacaggttccatgagataaaagtaaccgaaagcaattagctcagtgtttgtcatgtaggaggtgctcaataaatgtacatttctttcttccttttgggaaaaacaaaaatcaggcattgggatttctgcatgacttaaarcttggttgctttattttttttagactaagtctacttttgggatttggaattttttatggaaaacaatttcgattttagtatgttttccatttcatttttagccaataaattagtattccctttatatagggtacacttgttgcaaattatttattttcagagttttacattgatctttaattttacttgtgtatacttgacctgcattatatagagcaacattcttagtacagtcagatctctgtatctgtgggtcctcccagccaaggctcaaaaatatccacacacacacacacacacacacacacacacacaaaagtaatcatacaataataaaaataatacaaataaaaacccaatacagtataacagttgatttgcatagcacttacaattgtatttggcattgtaagtagtctagagattatttaaagtatacaggaggatgttcataggttatatgcaaatactgtgccattttatataagggatttgagcatccacagattgtggtatcctgtgggttcctggaaccagtcctccacagatacagagagacaactgtatataataatcattggaaaagatgtagttgcaggcactgaatagaaatagttcatatatttagttttcaaaaaactctcaatttattaaatttacttaagaactgttttcagaacatagatttttccttataaactacagtaggctagaactagattttatagcctgccagtcttttcttataaccttggacaagtttgttaccctctttaagtctcaattttcttttctataaaatgcaactgataatagtcaccttacaggattattgtaagtattaaatgatataatgggtaaatcagagctatagttcagtcccatgagtcctggtaaatccggactctggaattggaaaatatatttctctgagttttgaaaaaaagaggttgaaagattgttaattatttatgtagtttactattaataagtaaaatcarcataatctaattttgaagtattagagattgctaaattaaggaggaaccaaggtgtcagtagaattagcatttagttatgtagtagaataccttatattttataatggtaaaatttatttaataaaataatttgaaaagtgctgtttttacaggttgagcatccctaatccaaaagtctgaaattcgaaatgctcaaaggtccaaaactttttgagcactgacatgatctcacaagtggaaaaattccacgcctgatctcatgtgatgggtcacaatcaaaatggtcaaaactttgtttcatgtacaaaattattaaaaatagtgtataaagttacctttaggctatgcgtataagtatacatgaaacaaatgaattttgtgtttagacttgcgtcagaattctaatctgtcccaaatgcttctggttccaagtattttagataagggatactcaacgcataaagtattttctattttacaaattaattaatacttatatttttcttttaaattatggtaaatagcccatttacggaactggaaaagttagaacagtattatatattcacagagttgtgcaaacatcactgctgtctaattttagaacattttaatcactccaaagagaaacttgtacccattaacagtcactcccaggatctccctaatcctcccagccctaggcaaccgctaatgtactttctgcctctatggatttgcctatcgagacatttcatgtaagtggaatcatacgatatatgactggtttctcttacttagcataatagttttagggttcagtagcaagtgtcagtacttcatttctttttattgctgaataatattccattgtatggaaataccacattttattcatcagttagggctgtttccactttttggctactataaataatgktgttgtgaacattcatgtgcaaattattgtgtggaaatatgctttcatttctcttgggtatttrtagggatggaattgctgggccaaatggtagctgtatgtttaacctttcgagaaactatcagattgtttttacaaagtagctgcacctttttacaatcccacctgcgttgtatgaaggttccaatttcttcacgtcctcaccaacacttgttatctgtttttttgattataaccatcctaatgagtgtgaagtggtaatgtaaggctctatctgcggttcataactttttttttttcaatagaggcgaggtttcattatgttggctaggctggtctggagctactaacctcaaatgatccacccacagcctcccaaagtgctgggattacaggcatgagccaccatgctcctggttaataacttttatttacagtcattaggtaaattgttgaagcttttacttgcagatgcattgccagattctttgatgatagggaatgtttttggcctgaggataaaagttgtaggccaggcgctgtggctcacgcctgtaatcccagcactttgggaggctgaggtgggccgatcgcctgaggtcaggagttcgagaccagcctggccaatatggtgaaactctgtctctcctgaaaatacaagcctttcggttcaaaatcaccactatatggtggcagatacctgtaatcccagctacttgggaggctgagacaggagaattgcttgaaccagggaggcggaggttgcagtgagccaagactgcaccattgcactccagcctgggcaagaagagcgaaactccatctcaaaaacaaaaaaagctgtaaactttctagtttcctgtttagtaaacagtgaactctggttaatagaactgattaaccacattgggtggtgataggaatggtggtgtgaggacttcagctgtataaaaggctgtcttctattaatatgaatatttctttcttttttttttttgagatggagtcttgctctgttgcccaggctggagtgyggtggcgcagtcttggctcactgcaacctctgtctcccagattcaagcgatcctcctgcctcaacctccctggtagcggggactacaggtgcgcgccaccatgcctggataagttttgtaattttagtagcgacgggatttcaccatgttggccaggccggtctcaaactgacctcaagtgatctgcctgccttggcctcccaaagtgctgggattacaggaatgagccactgttcccagccttaacatgattttttttttttttttttttttttttttttttttgagatagactctcgctctgtcaaccaggctagagtgcagtagtgtgatcttggctcactgtaacctccacctcccagttcaaacaattctcctgacccagcctctcgagtagctgttactacaggcgcctgtcactatgcaccgctaatttttgtattttgagtagagatggggttttgccgtgttgaccaggctgatcttgaacatgtagaatgaaggtctaaaacttgcactttgtttactcaaacaatggttccctgtagtatttcctaactggtttgaaaaaaaactttagaaacattagcaagtaattattgctgactttgaactatgtcctaaaaaacctcataggaaggctttaataccttgaatgagtgctgggattacagacgtgagccaccgcgcctgggcaatatgaatatttcttaagaaaaggcaattgtaatgcctgagtttagtttttctttaactctactgaaacatttctaaaaatttacagtctagtttcatattaacatttctaggcagtcaggcatgacagattttaagaattgccgttacctctcaatgatacataattttatataaatacaaatgtcattgtttgtcttgtatgtagaatattacccgatgttttggttactcattcaaggtatgccctgccaccacgcgtggctaatttttgtatttttagtagagacggggtttcactatcttggccaggctggtcttgaactcctgacctcgtgatccacctgctttggcctcccaaagtgctgggattacaggtgtgagccactgcccggcctgtagtggtgattttaagctgaaaggcttgttctggtttattatacaatcttttagttcctttggatgatatagtttccgtataaagttacaaaaacagtagttctggagcctttctggtaggattaatgaaaagatatgcatttctgtttgcaatatagtttggttcttttctaacctttcatgattaaagtttgctgtttatctgtgagatttcattttattaaaatgaagaaagagtaaattgtacatatttttatatgttacatagcccaacagagtctatctcaaaattctctttactaaaataaactgactggtgtggtggcatgtgcgtctagtctcagttacttgggaggctgaggcgggaagattgcctgagcccaggagttctgggctgtagtgtgctatgctgatcagtgtttgcactaagtttggcatcagtatggtgacctcctgagagggggtgacctcctggaagtcggagaccaccaggttgcctaaggaggggtgaactggcccaggctgggaatggagcagctcaaaactcccatgctgatcagtagtgggatcatgtctgagaatagccaccccactccagcctgggcaacatagtgagacctaatctctaaatagatagatagatagatgatagatgatagctagatagatagctagatagatgagatatatagggccaggcacggtggctcatgcctgtaatcccaacgctttgggaggccgaggtggatggatcgcttgaggtcaggaattcaagatcagcctggccaacattgtgaaaccctgtctctactaaaaatacaaaaattggctgggcgtggcgttgggcccctgtaatctcagttactcaggaggctgaggcaggagaatcgcttgaacctgggaacccggaggggaggtgcagtgagccgagatcacgccactgcacgccagcctgggcaacaggggaacatactgtcttaaaaaaaaaaaaaaagaagaaaagatagaacaagcaatgtcaaaattttgtaaaaacaccctgtcaggatttatacaaactttaatctccatttttcattttcagttgagcaggagaaacagtccctaaaaggtaattaaaataaaacactgccagtttgaaacttgaacttcacagtacatcatgtaggcctttttgtgattctggtgataattgtctttttttttttttttttrgtagtagtagccgaggtaaattatttttgaagttattgtgaggtcactcatggaaatttctgctcagtgtttaaaaagcaaggttgagattctttaacctggcatacagccttcatgatttggttccaagctgatcattcctccctcctgtttttgcatcctgttcttccaagattccaggtttatggagttttccttgattcttttaccttgtattactttttgtggaatataaaagctttccctgtagtgtgccatctttctggtaagtgtttcacatatgttatttgtaactcttactaaggatattataaggtcattatattattatgcattttacagctgagggaactgaggcttggagagttttattgattttcctaagcttaagcccacattgatgattcaaacttatatatcaagctcatatatctctgactagaaagtccacactcttttttcatcctgtgaatcttgtcctgtgtctatgtgtgtgtgtatgtgtgttttttctttttttttttttgagatggggtctcgctctgtcatccaggctggagtgcagtggtgtggtctcggctcactgcaacctctgcctcccgggttcaagcaattctcctgcctcagcctcccgagtagctgggactacaggcacccaccactacacctggctaattttttgtatttttagtagagacaaggtttcaccatgttggtcaggctggtctggaactcctgacctcaagtgatccacccgcctcggcctcccaaagtgctgggattagagacatgagccacctctctgagcccatccaggatttctaaagtatgttccctaggagcaaggagatgttctttagtcaaataagtttgggttttcagcttactatatatcccttaggtagaagtttgcaaatgcacgttagtattctaaagactgaggagtggaagaaacttgtttaactttgttcagctatgtattaccccaattttttttttgagatggagttttgctcttgttacccaggctggagtgcagtggcaccatcttggttaactgcaacctccgccttccaggttcaaataattctcctgcctcagcctcctgattagctgggattacaggcatgcaccaccatgtctggctaatttttgtatttttagtagagatgggatttcaccatgttggccaggctgatctcgaactcctgacctcagatgatccacctgcctcagcctcctaaagtactgggattacaggcatgagccagtgtgcctggctatattacccaaacttatttggttgtggaaccccttttttccacgtaggccttagtaattaayaccctttactgatgtaggtcaacttttacctgttttttaaagtctcaccctcaccrtatccgagactttgaactctcagatgataggccctgattacttcctgaaggtgctcattctgcacgttattagaatattagcagtattatttctttttatattcagccaaaaatctagctttttttctagtatatatccttttgctcttttactctttaaaattacacagaataaataatcactcttaatatctaaagatgacaagacagtatcctgtctctcccagcatagtgattaaattacaggctctagagtcaaactgtctgggttcaaatttaattctcctttcactttgtgatcttgggcaagttaataacttctttgtgcttcagttttctcacctgtaaaatgggactaacaataatacatcagtgggttaaataaacagatacatgtaaagagctaagtacatagtgtattggttcaggtccgctgggaagcagacgttgaaatggatgtagtagcacaagaggttttatgggatggaatgcctatgaaaggaaatggggagaaagcagaattgcctagggagagcctcagtctgtgatgcagatctgaaaaaatctcagtcaacctaacagggaacttcagagcacatattgcctgttagaggaggcctgcatgggcagaaatggccagattttagtacacccaccatgtttagtcactggctagagctgcccaaggagagcatggtcatgactgggaagctgagatgaattctgaacatgctgcagctggaggctgttagctaaccaaactccttggacctgaatggcaattcttttttgaaggaagatccaagtgattgctacagtccattcctcatgatgcacagatccatatcttcacagtttctgagagcagctcctccaagggaggaaatgtagaaagagattagtgagacaggcctcaggctcatcactgtagctggtctcagagccacaaagttctagagccatctccactatgtagtctaaattgcccttgccctcagctatcatttctgctggtgttggttgtttacctagtggtttgacccaaaccctcatttctgaggggtctgagactggagtggttgcatttgcccattcatagtcactactgggcagggagtattaagtggtatcctagggaatcatctgagtcccacacatattctttcttgttccctttgtgtaacggcagccctacttcctcctgaggatgagggttaattaatcttgccaagatgggcattcctcttactgctttctagtccttggacacaaggaatactcagtattcaggctgcagctgtaaattgtagttcactgtgacctttcatgtgtctcttggcaaaagtgtgcccgctttgggtgccaggacttctaactccgtagagccccacattgcagagatgggaagcacaaagtagatcattgggaatgatggcgagtaggggctatttccctttccacttcttggttctcagacccatgtattcttcttactgggaacctagctctaaatcagtgcatgtactgcatacaagaggatagcacaccatttttgtctctgagctagtacattagctgtgcctgcagcaggccattccaatactctctaagactggtccttttgtatggagctgttatggatataactactggagcttatggttatgggcctactgccacaaatctttcactgtgaagtgattcccttggctggattccatgtctgttgattaagtgctgtataagtctatatttagtggtactggctaggtctctatggacaggaaaggcaaacccatacctggaataartgtctaatcctgtgaagatcaatcactggcccatccaagatggaagaggcccagtgtagtcagcttaccacttaatagtctgttggtctgcctgaggcataatgctatatgggggcttggtgttggtctttgttgctcataggttggatgttcagagttggccttggtaaatgggagtccatgtctccttctctgcttccatctctatttctgccacagtgacctctccatttatgtccccatcttgccacttctgggtgaccgatgtcagctagttgagtcattttgtctccttggctgttcattggctcttctgtattggatactttctggtgggcattaacacatgaaacaaagattttcatactttccacccactcccatatattcattcatttccctccacccataccccttgcctttgtccttctccttaaaggcctctaaccagttggccagtctacttgccattgcccgtgagtctatatattctcaccccaggccacttttctttctgcataaaattcataaccaggtgcacgactcaaagctctgtctgttaagaagattttcccttttcattgtcaaggtcacccctaagtgtggctataatgaactccgttgtttttttcagcttgcattcacatactgagctgacctacttataagcaaaactttggcttttttctccttcttaagttggtcttataggataccccaaatagctatagatgtgagctgaggaaatggtgctagtatggtgagtgccagggaagtcttggctgcctgcttatagcagtcttcttgtgccttttggttctgtttcattttgatccttgatgtgccattcctatcttataatggattgctgctatgctcacctggctttatgacctggcgagtcctagtgaatgcagatcattatggaaagtctggacacatggtgcccagtgatgaagcattgtatctcttaataggacacagttgcacaccaggagctgtttttcttttttttctttttttttttttttttttgagacggagtctcgctgtcgcccaggctggagtgcagtggcgcgatttcggctcactgcaggctccgccccccggggttcatgccattctcctgcctcagcctcccgagtagctgggactacaggcgcccaccacctcgcccagctaattttttgtatttttagtagagacggggtttcactgtgttagccaggatggtctcgatctcctgacctcgtggtccacccgcctcggcctcccaaagtgctgggattacaggcgtgagccaccacgcccggccacaggagctgtttttctaatagcatggccttcctgcagaactctaggggcctgcattttgattctcttccttgctataaactctacactgcatcttttcccaccattggtacctccaacagcatagggattgcttgcactacagcctggacttgctgcagagttgttgcccctactcaatactagcagcctttcatgtcaaccagtatatgggccacagtggtattcctggatatagaatgtgttacttctagaatctgaaggagcctaccagacattgtgcttccttttttgtagttggggatgcaagatgcagcaatttgtcttttgctttggaggggatgtgttggcatgattgcgaccactggactcttaaaactttgctgaaatggaagatccctgaatattggtagggtttttctttaccctctttggaacacatgtaccccaccaagttcttcagtatgctagccacctcttgctcatcttgcaagatcaacatgtatcactgacgtgatggatctatatgctttgagtccagatctctgcagactattatgatagagtggagttaacatagccccaaagcaaaaccatgaatgcattttattgtttgttccatgtgaaagtgaactgcttctgatcctcttttctgattaggatagaaaggaacttatttgccatataaatggctgcatgctgtgtacccaaggctatatttatctgctacaacaaacatactacatctagcatggcaatgtggtcatggctgctacttgtttgagcttgtggtagatccaactggttcctgcaggggctagacttttgaattacatggatatatatagggactactgcccttgaatctttgagatccttaaaggtgacactcatcattgccattccctttacctctgccccctacacaattttggttttgatttacacccaggggayggagagctattttcagaaggtttcacttggccattctctgtctgatagctcttactcctcaggtcaaagacccggggtgggagttacccccaactgccaagtatgccaatcccatttatacattgagggactggggaagtgactgctgggtaggtctgtggaccagtggacccattaaaagctagactttggccaggactccatttattacttggttcctgtatttctactgctataatagggccacaatgatgctccatgtttctgtataccaatatcaagtcagactctgtgacccatagtctttgaaatgtctgggtattttcctttccccactttagtgacattcttttttttttttttgagacggagtctcgctgtcgcccaggctggagtgcagtggcatgatcttggctcactgcaagctctgcctctcgggttcacaccattctcttgcctcagcctcccgagtagctgggactacaggcgcccgccacctcgcccggctaaatttttgtatttttagtagagacggggtttcaccgtgttagccaggatggtcttgatctcctgacctcgtgatccgcctgcctcggcctccgaaagtgctgggattacaggcgtgagccaccgcacccggcctccttccccactttatagttgcctgagtaaatggccataggttcctttcgggatggacttgggaataattttacatatatatatgagtttagatgtgaaaactggctcaggtccaggaactgggaaagggatagtaggtttttattggtgcaatcaccctcagcctcctgcttatccaattctggccttgttttgattatatatattaagcagcactgattttgactatctgtctgtttttttccttatggcaccatattctcttttttttttttttttttttttttgagatggagtctcactctgttgcccaggctgtagtgcagtggtgtggtctcagctcactgcaacctccacctccccgtgttcaagtgattctcctgcctcagcctccccagcagttgggatgacaggtgcccaccaccacaccyggctaatttttgtatttttagtagagacgggggttttcactatgttggccaggctggtcttgaattcctgaccttaagtgatccacccacctcagcctcccagagtgtgctgggattacaggaatgagccacattgcccagcctgcaccatattctcttaactatytccacagctccctgaaagttaagtcttattggctgtctttcaacatgaatcataatggtaagagttcactagcttctggtgtttaagtgccaccacctggcccctattgctatcaatgagcctttcctttagaggagcgccaccactgaacttcttagtgatgctggtgcctctctccccagtatattcctgatagctttgatgcatggtcttctctcctcacatggtatacacagctctatcatacccactttcctgagctttttaatcctgtcctctgctctctgctatgtcaattcagtcatttcagcctgacttaggttgggccatcattttctccaggctgctaggagccaccctgacagcaagtttatgccatctcccaggtccctgccacagtgttaattctcatatcctgagacagcccctttctcaaccagtaaacttgaccttactcagtctaatgttcctgcttgcttaagcaccttgaaaatctagcactgtggtttatgccagtcctgctggtaccctggctaattcttgccattcttttggggattatagtctctgttctcctttatgaggtccaagatgtccttggcagggttagcactagctattatcatggcatctaggaatgcagatagggacagatcctgagggagcccctgtgttgccttgcaggtgacagacctctgaagtgtgctgctgcgcagcagggagtgctaactcatccctgaagactcagagttcaaaggatttggaaatgacaatctttgggggcagccatctatccgtaacctgtctatcaggcttctaggttttccaaatcaggatcctgaccttggcgtaacaaacctgccttggctgagcattcagccaccgtgaagcagtggtctgtagccatcctgagtttgttcttcatcttttactgcctcccttcgtaggtgataaggacctgtttgtgagctaccaaagagccctctgaccttcacgcttagttttcagttgtttgttagctgccctttctagggagcctgggcaatctaacagctagccaactttattgttcttgtatttttttttttttttgaaactgagtcacccaggttggagtgcagtggcacgatcttggctcactgtaagctccgcctcccaggttcacgccattctcctgcctcagcctcctgagcagctgggactacaggcgcctgccaccatgcccggctaattttttgtatttttagtagagacggggtttcaccatgttggccaggatggtctcgatctcctgacctcgtgatccgcccgcctcggcctcccaaactgctgggattacaggcatgagccaccgcgcccggctattcttgtatgttttgtgttccccttcccaaatatctgaatctttacaccagtttgagtgttcctctctgggaacattctcccaagtcacaacttgcgtgttaacacttgggccaccagcttgtgccagggcctgtcatgcctcacataccacctgggatgagagcttcattgtcagttgggcagtaagttatctaattcctaagccccatcttagctcctgctttcttagtcaatttctggtaccagctgtgccagtttgagtccttcaggaagcagctgctgagacaggactataagagatacatgaagtaggagaggacttccgtgaaaggaaagggagaggaggcacaattgtcagggagagtctcagagtgcgatgcaggtctgacagagtctcagacaacacagtgaagacttgaacaaaaattgttcattaaaggagtcctgcattggacagaagtggccaggccttagtgcctatgttatgagtagtcattgggtggggctgcccaggaagagtgtgacttcagcttgaaagctgggcatcctgaagggactgcagtaggaggctgtcagctaactgtgcacctagaagcttattggaaagttatttcataaaggttgatataagcgacatacctccatggctgcaacatgtaataagcaaatgtttattgttaggatgattttgatgacatttttctttttctttttttttttgagatggagtctcgctctgtcacccaggctggagtgcagtggcragatctcggctcactgcaagctccgcctcccaggttcacgctgttctcctgcctcagcctcctgagtagctgggactacaggcacccgccaccatgcccggctaatttttttgtatttttagtagagtcggggtttcttttttttttggtagaaattacttttatgttaaaatattcattaataagctagcaattattcatgtgaaggagcgtccagaaaacaggttcatgactgaattatccttgtccttgattatagagattcatgaattacacacataacactattctctggagtagctgtgaagctctacgaggctgtgaggttggaggcgcttctccctgcctgttaagctgctcccatcrcatcacgacaggatggactttatttttctcttttcaattaaatctttacaacagttcgaatgctctttccagaatgcatcagttcaaaggctttgttgatttcctcaaaagacagattgtgagtcacaaattcatcaacttttatctttttggacatatattcagacaccaactttgggacactttctacattcttccatcctccaaaggcagtgcctttctatgtgtgacctgttaccagctggaatggacgagtggcagtttcttcacctgaarcggctactcyarccaccacgctgatgccccagcccttgtgacacgcctcaagtgctgctctcatgaccttcacattaccaatacattcaaaggaatagtccatagagtcgggcaccgtgttagccaggatggtgttgatctcctgacctcgtgatcygcctgcgtcggcctcctgcagtgckgggattacaggcgtgagccactgtgcccggccttgatgacatttttctaagttgctttgattctttatgaataaaaaccttttagacatttttcttattttctcttgaatgtgtttttgtttgttaatatgtaatattaactgaaattgaaaacaatatttcagtgtggtctggcacatagtaggtgtccagggaatgttggttgaaatgaaccatgcagttgatcagtatagcatagaacatgataatccccactctccttattctggacatttctagtgcagtttgagattgcattagcctgtttactgatgatattttctgtgacagacaattcagtagtttgggtctttttattttattttttcaaataaattaacttttatttgaaaggagactacttttccccacatgtatcttctaaggattctatactatatgataacctgcttatccatagttccaataccaaaatttctaacagcaaattatatagttgctctaggtaataaataagggttgtccttcactgattaagggaatacttaaacttcaataaatttaacaaagaaatcacactttagtttttaagttttgacagatgtattttattttatttttttttggagacagagtcttgctctatcacccaggctggagtgcagtggcgcaatctcagctcactgcaacctccgcctcctgggttcaagcgattctcctgcctcagcctcctgagtagctgggacagcaagcacgcactaccacgcccagctaattttttgtatttttagtagagacagggttttgcyatgttgsccaggctggtcttgaactcttgagctcaggcaatccgcctgcctcrgcctcccaaagtgctaggattaccggtgtgagccactgtgcctagccaaagttttaagagatgtattttaaatacatctttcataggagtctgcaagctttttatctctaaaaaatgacttaatttttagggctcaaaaattccattcttcaaaagaaatgtccaagtattttcttttatagcttcaaactttctgcacctaactacttgactgttccatgccaccccaaacatgacatgactgaactaatttatgtgttactgtcttcctcaaaagaaagtttaaaaaggagttcttcataaatgcagatctctaatacaatatctaacacaaaagaagctttaaaaaggtaatttcttatttgattagctaggagtttatgttagtaaaagcaaaaaaaaaaaaagtttacggagtataacactagggttgcttttatactcaagatgtttactcaaaatgacaacaattacatctttaggagtataatgtagatactaaataaaccaaaaatttttttttcttaaagactaggaagaatcagaagcttagggacatccagaattaaaaaaaaaaaaggagaggaaaaagaaaataaagaggaaaaaaatgtccttcattgcaaccatttcattatcaatagtgtcttgggctgcaggaatgagatcttgattgtgatctgtatcgactataataaggagaaggtgatcatcttctgtaccggtaatcatagtcttcatatctgtcatatccacgatgatatcctctatcatagtaagaatctcgacgtctgtgaccacctccactgccgcctttgccaccacctccgccaccaccactatgagttctgcccatatagatgcctggtataggtgtgcgcattgtcttggtaatagaataatccacccgaatttcttctatcatccagctcctttctgtttgcccttaccatagcctcctttgagtcatctattccctaaaaatgcacaaaagcaaatccttgagatcgcccagtttgctggttgtaaaccacattggcaccattcaaaggtccatatcaagaacatacttcrcgaagatctctgtctgttgtgtacaaactaaggccaaacactctaaggcaagtgttgggatctggatttgcccttctgccagtgtgtcttctctggttagacattggagaatgacttcggctccttcactgccagtattctggtgtatatgagctacttcgtctcctgtgagagtggtatctggatcaagagtgggatctggatcaagtgtgtaacgtcgatgagaatgcctccttgacattttgatcttgatcgagaatgggattcagagtgtttgaaaacccttgaaggactacgagatcctgaccatctctccaattttacacaagcaggagttcctgttggagattttgactgagagtgaagactcatttacttaggacccatttattcttccagattcttttaattctacttcactcttgctttctacttctcttcattcttgagtttttcactttttgtactttgcgtattcttccccaattcaaacaattcaaaatagccttaaaaaaattcaagtgcttctatccgaccaatcttctgttcagttttttcccccattcaattttaactttctgatccttaatactttccattagccttcttttaccttgatttatcttcaacatttttggaaaaaactcttcagtttcttcatgaacattaactatgcccttgaagttgttctcctctacatcactcatgtctatgaggtgctccccagaactaaatatgagacaagtcttggctcgagggccaatggcctaatcaacctgctgaccaaactgtgggagagaggaaagagttggcaacaaaggccgctccactccactcccacttggttgcaggctccagcaaaatggtgctgacctattttatttttatttattaattttcttttagtttaggtctgttagagatgatttagtttagtattctaacattctaatttggttagatctttcgaatactgattctttgatccagcagattcagctgtcatacttttctttatatccatcacatatttcattattgtgccataaatggccacatccaaatcattaataaaaatgttaaacaggaccaggcacggtggctcacatctgtaatcccaggacttcgggaggatcacttgagcccaggagtttaagaccagcgtgggcaacatagtgagacctcatctaaattattaaaaaaaaaaaagttaaatacgataagaccaagaatcaagctctaggccatgcaattggtgatgtgctttcagatgggtagatatttatggtcaacactattcagcctgttaaaaattgaccatattgaatatgacccaaatttctaccttttttttaagacagggtctcactgttgcccaggctggagcgtagtggctcaatcactgctcactgcaacccccgcctcctaggctcaagccatcttcccaccttggtctccccagtagctgggactatagatgcgcaccaccacacctagctaatttttttttttttttttgtagagacgggttttcaccatgttgcccagactgaatttctacatttattgcttaaaagacaatgagtatatatcttttttgtttgtttgttttttaagatggggtctcattctgtagcccaggctggagtgcagtggcatgatctcggctcactgcaacctctgcctcccaggttcaagtgattctcctgcctcagcttcttgagtagttgggattacaggcatgcaccaccacgtccagctaatttttgtatttttagcagagatgggcttttaacacgttggccagtctggtcttgaactcctcacctcaagtaatccacccgcctcggactcccaaagtgttgggattacaggcaggagccactgcgccaagccgacaatgagtatatatctttatacatctatctatctatctatctgtttgcaccgagccaacaatgaatatatatctttatacatctgtctgcgcccagctgacaatgagtrtatatctttgtccgtccgtccatccgtccatccatccatccatccatccatcctttgcagacatgcactagaccaaggctaacaaggcattgaggcagaaaaggaaatgaagctatttggctatagatgattgctgctttcctttctaagtaagcacttgcttttggcttttatctgccagtaatcagctgggtgatcttggaaaagtgactcagcctttcaggatttgagattcttagcagtraaataatatgattgggaagtttgtagagacaaagcagaatggtgtctgtcagaagctatggggaaggggagatggggatcagtgtttaataggtagagagtttcagtttgggaagatgaaaaatttctgaagatggttggaggtaatggttgcacaactgtgtggacatatttaatgccaccaaattgcacacttttaaaaatagctaaaatggtaaatatgtgtattttaccacaataaaaaaaaatccagaaaataagagtaggctggtattgaacaatagtaacaataatgttaagggaccccactgcctttcttgtttttaattatataaatataataaaaaactcatatcagacttagtggtgaaatactgaaagaatttttattaaagtcagaaacaaaagaaaatgtccaccttcaccattttcagaggaactrtcagtgtaattagacaagaaagaaagagatcactagaaaaaggcaagtggtttggtggaggggcctcattgagatctttcaatatgaattagagaaaaggaaggggaaggataataggacccctgaacagtctgtgagggagttttgtgtgtatacatgcatgtgtgtgtatatagaagggaacagaataaatcagttgagacctgggggaaaatatgattgaattagatggcccgcagaatcaccactgagaataggtaaatgggagatagaaggcaaatttatgggatgtatgtatctgaacttttctatatgctgcttcaatcagagcacttttctgtgagctcctattgggattctgctgttaatagaggttttgctgttaagagtttagaaccattggcttagaactctggattcttctgacagaaaagtttactatttcaggttcaattcaatagtgatcagcatagttcctagaacgtggcaaagtgattgaaattgtcagaacaatcattgaagagatgggcatataaataataacagcaaatttgtcttctagactgtgtcatcaattattggaggattggaagcatatcttgtatcctacttagctcctcttctttgactctcctgctatttgtgctctgttttaatgccctctgttctttgaagcaacagtagttacatggaaaaaggggtgagtttgcataccgtcacactttggtatgcagtagaagtgccttcttcatatttccattttgtcacacagaatattaaaaagactttactcgagttgagatttaacaaagttaataatttttattgcttcatcagtcaagtgaaactgacgttttagaacaactgagagtgcatggcagtgaagaataagactaccagtatagtttggtattgctgccttgattattgctaaggtgcaagcagttctacccatcattgctattgtgctttcactacagttgtcaacatggtgaaaagggcatacatactaagatgtggattcccgcgagtctgtggactacaatttgagaaccactggagtaatctgaactcatcccatttttagtttgaatgttgcaacctgcactttacctcataagattacctagcctgtttaaaagtttttataaattcaacaacctggttagataaactctattgagtgtttaactgacttaatcattttaaaatgttttaataatacagggcttaatctatatccttcatgatttttcatctgaacactttattgtttgcttatatatactaattctaccctgatgattaaaaaaaaaagttttaggctgggtgcggtagcttatgcctgtaatcccagcgtgaggaggccaaggtaggagcattgcttgagcccaggagttcgagaccagcctagacaacatcttgtcccatctctacaaaaaacaaaaaagtcaggcatggtgacacgcacctgtagtcccagctggaggctgaggtgggaggatcacccgagcctggggaggtcaaggctgcagtagctgtgataatgccactgcactccagcctgggtgacaccagatcttaagaagaaaaaaaagttttaaggcttacatttcatgcttatttactctgaacaaatctttttaaaaaatgtatcaattgatctttataaaaaataattcccattagcagaataaagattatgtattgaatatgattccaatataatttaaaaagttttgcaaaaggagtcataaaaagaaatgtctgcttcattaaagttgcatattaatacaaacacatggtatcagtaagaactctgccattgtcaggattgctatagtttaggcctcttgtttctaagtcctcaggcagctgcagttgctctgtatatcacattacatagctcaccttctgtttctcattgaagaaaaatgaggcataggatgtgcagtgatccaatgttaggtacttccttgaccccatcaatcttggtggataaataagaaaaatacattttaagctttgaaacatgatttcaagcacttgatagtgtttcagcagtagtcttggtaagtggacgaagccagtgatttggcctgccttggatggataaatgaaattgcacgttgccatgaagacccatctcactcaacagcgcatgagatacatatgaatcctcgccttggtaatgttctagaggtgaatattagcatagatctaaaaataacctacccttttaccctgatatatgatgccaccgtcacttgtagagtacaaaaacgtatacaaatcttgccacactttggttacaggacacccacttctcagaaacacctcatcagaaagcacatacaaatcatcaactgtcattgctttaattttgatgtgaagccaatcaagagtacagtaatactcttgattctgcatatccaaacaaagtcacagcaacaagcagatgaactgaagataacttcaagagagccttcatgataccaggtccaaagcaatgacctctcagtgtgcagacagcagaatcacagttgatctttggaacattcagatcctgtgagatgcttgcagcaaaaatctttgtttctgtagctttttggagaaaaggcaaataaatttaggattagtgaaatattttcagcaggctgttgaaaggagttagaagtaagttgcattatagtattatatgcattttgtcattgtgtagatcatagagtggtttctgtgtgaaatttggggcttccttaggagttaggagggactgctttcatttagtatacttcttatttaagaaaacttattaaaatctgtcataaagcaaatttgaaaatagaaacaaattaagtttgtgttacagattagattcctcctcctcttcctcctcttcgtcttcttttttttttttttttttttttgacagagtctcgctctgtcatccaggctggagtgcaatggtgcgatctcagcttactgcaacctctgctgcccaggttcaagcagttgtcctgtctcagcgtcctgcattgctggggctacaggygcacaccaccacacccggctagattgtgtattttcaatagagacggggtttcaccgtattggtcaggctggtctcaaactcctgacctcaggtgatctgcctgccttggcctcccaaagtgctaggattacaggcgtgagccactgtgcttggcctttttttttttttttwaaagcaacagggtcttgctctgtagcccaggctggagtgcggtggcttgattgtggctcactgtggccttgacctcaggctcaaacaagcctcccatctcagcctcccaagtagctgggaccacagacacacaccaccatgcctggctaattttttactattttgtagagacaaggtcttcctatgttgtccaggctggttttgaactcctgggatcaagcaatattcctgcctcagcctcccagagtactaggattacaggtatgagccaccacgcctagccagattagattctttaaaagcaaattctagatgaggtatcaggtttcttttaatgtattgaaattttgttgtattgatttttgctggaaataagtggcagttggccgaccctaatmtgacccccctggaaactcctttcctatcatctgctactctttccctcccttaatctgtgctttrttcttgctgtccctctgtttttaactaccttcctctgaattcccagattgctccctgacatccagatcttgatgtgactcagtgagactttctctggctgcctaatttaaaattgtaaccccctagtcgagtgcagtggctcatgcctataatcctagcactttgggaggcagaggcgggtagattgcttgagtccaggagtttgagaccagcatgggcaacatgataaaacccaatctctacaaaaaatgcaaaaaaactagccagacgtggtggtacacgcctgtactcccagcttgggaggctgagatgtgaggttcacctaagcccaggaggtcaaggctgccatgagccatgattgtgccactgctctccagcttgggtgacagagtgagacactgtctgaataaaataaaataaatttataaccctcaaattttcctctctctttatttttcatcttaacacgtcatctagcatatcatatattttacatgtttatcttgttgatcattcatttccatccattagaatgtaatctctgcgagggctcaggttttgcctgtttacttgctgtttcatctccagtgctaatactcaaattcaacaacctggttagataaactccactgagtgtttaactgacttaattattttaaaatgttataataatagagggcttaatctgtacccttgattgttgaaggaacacagtaaccaggtgctcaagtattggttgagtgaatatttatataaatgtgaattatgtggagatttttattgtaattatgttgtaatgagatttgaccccaaaacttgctattatgaagtatttgtaccctaactccttgctatcctcttattttcaacttggtctaggactttagtaagctaatacatttgttgaatggatttgtcaatcagtaagcctcaattttttcctgcagaaatacattttcgttatgtgatgtaacagttacatacgttggaacagccaagaattcgttttgaccttttgcagattttacttaagaagattttgaaaaattttattgctcttttttaaaaattcttcctatcttcatttaatattcagttcaaagcttttcatgaagtcttgttagataattctaagctgtaataattgtttcctcttagtttctataacattaatttatgaacatactaatatttgtaaatccattgcatcatttattcatttgacgatacttattgacccatttactcttaatttgctggcatatagtttttcatagtagccactcatgatcctttgaatttcttggtatcagtaataatgtctcctttttcatctctgatttcgtttgagtcttctttttttcttagtctggctaaaggtttgtcaattttatttatcttttcaaagaaactgacatttgtttcattgatcttttgtattgttttcatttcaaattcatttcttttttccttttaattttcaaattcatttattctctgatctttattacttcttttcttctaattttgggtttggtttgctcttgcttttctagttctttaagatgcatcattaggttatttatttgaaggtttttcttttttgatgtaggcacttagagctataaattgtcctcttagtactgcttttgctgtatcccataggtttcggcatgttgtgtttccattattatttgtttcaataaaatgttcaatttccttactggccattcaggagtatattgtttaatttccatgtgtttgtatagtttccaaaattcctcattattgatttgtaattttattcccttgtggtcagagaagatgcctgatatttccatgcttttgaacgttttaaggcttgttttgtgaccgaacatatggtctctacttgagaatgatccacatgctgaagataaaaatgtatattctgcagttattggatgaaatgtcctgttaatatctattaggtccatgtgttctatagtgcagattaagtccgatggttttttttttttaattatactttaagttttagggtacatgtacacaatgtgcaggttagttacatatgtatacatgtgccatgctggtgtgctgcacccattaactcgtcatttagcattaggtatatctcctaatgctgtccctccccgctccccccaccccacaacagtccccagagtgtgatgttccccttcctgtgtccatgtgttctcattgttcaattcccatctatgagtgagaacatgcggtgtttggttttctccttgtgattgtttactgagaatgatgatttccaatttcatccatgtccctacaaaggacgtgaactcatcattttttatggctgcatagtattccatggtgtatatgtgccacattttcttaatccactatatcattgttggacatttgggttggttccaagtctttgctattgtgaatagtgccgcaataaacatacgtgtgcatgtgtctttacagcagcatgatttatagtcctttgggtatatacccagtaatgggattgctgggtcaaatggtttttctagttctagatccctgaggaattgccacactgacttccacaatggttgaactagtttacagtcccaccaacagtgtaaaagtgttcctatttctccacatcctctccagcacctgttgtttcctgactttttaatgatcgccattctaactggtatgagatggtatctcattgtrgttttgatttgcatttctctgatggccagtgatgatgagcattttttcatgtgtcttttggctacataaatgtcttcttttgagaagtgtctgttcatatcctttgcctgctttttgatggggttgtttgtttttttcttgtaaatttgtttgtgttcattgtagattctggatattagctctttgtcagatgagtaggttgcgaaaattttcttccattttgtaggttgcctgttcactctgatggtagtttcttttgctgtgcagaagctctttagtttaatgagatcccatttgtcaattttggcttttgttgccattgcttttggtgttttagacatgaagtccttgcccatgcctatgtcctgaatggtaatgcctaggttttcttctagggtttttatggttttaggtctaacgtttaagtctttagtccatcttgaattaaattttttataagatgtaaggaagggatccagtttcagctttctacatatggctagccagttttcccagcaccatttattaaatagggaatcctttccccattgcttgtttatctcagatttgtcaaagatcagatagttgtagatatgcggcgttatttctgagggctctgttctgttccattgatctatatctctattttggtaccagtaccatgctgttttggttactgtagccttgtagtatagtttgaagtcaggtagcatgatgcctccagctttgttcttttggcttaggattgacttggtgattcgggctcttttttggttccttatgaactttaaagtagttttttccaattctgtgaagaaagtcattggtagcttgatggggatggcattgaatctataaattaccttgggcagtatggccattttcacagtattgattgttcctacccatgagcatggaatgttcttccatttgtttgtatcctcttttatttcattgagcagtggtttgtagttctccttgaagaggtccttcacgtcccttgtaagttggattcctaagtattttattctctttgaagcaattgtgaatgggagttcactcatgatttggctctctgtttgtctgttattggtgtataagaatgcttgtgatttttgtacattgattttgtatcctgagactttgccgaagttgcttatcagcttaaggagattttgggctgagacaatggggttttctagatatacaatcatgtcatctacaaacagggacaatttgacttcctcttttcctaattgaataccctttatttccttctcctgcctaattgccctggccagaacttccaacactatgttgaataggagtggtgagagagggcatccctgtcttgtgccagttttcaaagggaatgcttccagtttttgcccattcagtatgatattggctgttggtttgtcatagatagctcttattattttgagatacgtcccatcaatacctaatttattgagagtttttagcatgaagtgttgttgaattttgtcaaaggctttttctgcatctactgagataatcatgtggtttttgtctttggttctgtttatatgctggattacatttattgatttgcttatattgaactggtcttgcatcccagggatgaagcccacttgatcatggtggataagctttttgatgtgctgctggatttggtttgccagtattttattgaggatttttgcatcaatgttcatcaaggatattggtctctaattctcttttttggttgtgtctctgcccggctttggtatcaggatgatgctggcctcataaaatgagttagggagggttccctctttttctgttgattggaatagtttcagaaggaatggtaccagttcctccttgtacctctggtagaattcggctgtgaatccatctggtcctggactctttttggttggtaagctgttgattattgccacaatttcagatcctgttattggtctattcagagattcaacttcttcctggtttagtcttgggagagtgtatgtgttgaggaatttatccatttcttctagattttctagtttatttgtgtagaggtgtttatagtattctctgatggtagtttgtattcctgtgagatcggtggtgatatcccctttataattttttattgtgtctatttgattcttccctctttttttctttgttagtcttgctagcggtctatcagttttgttgatcctttcaaaaaaccggctcctggattcattaattttttgaagagtttttttttgtctctatttccttcagttctgctctgattttagttatttcttgccttctgctagcttttgaatgtgtttgctcttgcttttctagttcttttaattgtgatgttagggtgtcaattttggatctttcctgctttgtcttgtgggcatttagtgctataaatttccctctacacactactttgaatgtgtcccagagattctggtatgttgtgtctttgttcttgttggtttcaaagaacatctttatttctgccttcattttgttatgtacccagtagtcattcaggagcaggttgttcagtttccatgtagttgagtggttttgagtgagtttcttaatcctgagttctagtttgattgcactgtggtctgagagacagtttgttataatttctgttcttttacatttgctgaggagagctttacttccaactatgtggtcaattttggaataggtgtggtgtggtgctgagaataatgtatattctgttgatttggggtggagagttctgtagatatctattaggtctgcttggtgcagagctgagttcaattcctgggtatccttgttaactttctgtctyrttgatctgtctaatgttgacagtggggtgttaaagtctcccattattattgtgtgggagtctgagtctctttgtaggtcactcaggacttgctttatgaatctgggtgctcctgtattgggtgcatatatatttaggatagttagctcttcttgctgaattgatccctttaccattatgtaatggccttctttgtctcttttgatctttgttggtttaaagtctgttttatccgagactaggattgcaacccctgcctttttttgttttccatttgcttggtagatcttcctccatccttttattttgagcctatgtgtgtctgtgcacgtgagatgggtgtcctgaatacagcacactgatgggtcttgactctttatccaatttgccagtctgtgtcttttaattggagcgtttagtccatttacattgaaagttaatattgttatgtgtgaatttgatcctgtcattatggtgttagctggttattttgctctttagttgatgcagtttcttcctagtcttgatggtctttacattttggcatgattttgcagcggctggtactggttgttcctttccatgtttagtgcttccttcaggagctcttttagggcaggcctggtggtgacaaaatctctcagcatttgcttgtctgtaaagtattttatttctccttcacttatgaagcttagtttggctggatatgaaattctgggttgaaaattcttttctttaagaatgttgaatattggccccyactctcttctggctsgtagagtttctgccragagatcagctgttagtctgatgggcttccctttgtgggtaacccgacctttctctgtggctgcccttaacattttttccttcatttcaactttggtgaatctgacaattatgtgtcttggagttgctcttctcgaggagtatctttgtggcgttctctgtatttcctgaatctgaatgttggcctgccttgctagattggggaagttctcctggataatatcctgcagagtgtttkccaacttggttccattctccccgtcactttcaggtacaccattcagatgtagatttggtcttttcacatagtcccatttttcttggaggctttgttcgtttctttttattcttttttctctaaacttcccttctggcttcatttcattcatttcatcttccatcactgaaaccgtttcttccagttgatcgcatcggctcctgaggcttctgcattcttcacgtagttctcgagccttggctttcagctcctttaagcacttctctgtattggttattctagttatacatttgtctaagtttttttcaaagttttcaacttctttgcctttggtttgaatttcctcctgtagcttggagtagtttgatcgtctgaagccttcttctctcagctcgtcaaagtcattctccatccaggtttgttccattgctggtgaggaactgcgttcctttggaggaggagagacacgctgctttttagagtttccagtttttctgctctgttttttcctcatctttgtagttttatctacttttggtctttgatgatggtgatgtacagatgggtttttggtgtggatgtcctttctgtttgttagttttccttctaacagataggaccctcagctgcaggtctgttggagtttgctagaggtccactccagaccctgtttgcctgggtatcagcagtggtggctgtagaacagcggatcttggtgaaccgcaaatgctgctgcctgatcgttcctctggaagttttgtctcagaggagtacccggccgtgtgaggtgtcagtctgcccctactggggggtgtctcccagttaggctggtcaagggtcaaggacccacttgaggaggcagtctgcccattctcagatctccacctgtgtgctgggagaaccactgctctcttcaaagctgtcagacagggacatttaagtctgcagaggttactgctgtctttttgtttgtctgtgccctgcccccagaggtggagcctacrgaggcaggcaggcctccttgagctgtggtgtgctccacccagttcgagcttcccggctgctttgtttacctaagcaagcctgggcaatggtgggcgcccctcccccagcctcgctgccrccttgcagtttgatctcaggctgctgtgctagcaatcagcgagactccgtgggcataggaccctccgagccaggtgtgggatataatctcctggtgcgccgtttcctaagcccgtcagaaaagcgcagtattggggtgggagtgacccgattttccaggtgccgtctgtcacccctttccttgaccaggaaagggaactccctgactccttgcgcttcccgagtgaggcaatgccttgccctgcttcggctcgtgcacagtgcgctgcacccactgtcctgtgcccactctctggcactccctagtgagatgaacccggtacctcagatggaaatgcagaaatcacccatcttctgcgtcgctcacgctgggagctgtagaccggagctgttcctatttggccatcttggctccccagcccgattttttttttttttttttgagacggactctccctcttgtcacccaggctggagtgcaatggcaggatctcagctcactgcaacctctgcctcccaggttcaagcacttctcctgcctcagcctccccagtagctgggattacaggcatgagctaccaacctggctaatttttgtatttttgagtagaaatgagatttcaccatcttggccaggctggtcttgaactcctgacctcatgatccatccgcctcgccgcacaaagtgctggattacaggcgtgagccactgcacctggcccaagtctgatgtttctttgttgattttttgtctgggagatctgtccagtacatgacccatgtactctctcaagaccgtgcttaagtgctagatatagaaaaaggaataagacatctgtgccatcaaggaattaaaggactagttgggaaggcaaatatgtaaatgagtaaatacaccaaattgtgtgaagatgatcagttccatctggagagatcgaggaaagcttgactgaaatggtgacacttttgtttagtattgaaaaattaacaggagttctccagatggataaagatgagaggggtgttttaagcagaggaaaacctgggcacaaacgtgtagcagtatgtggaacaacatatgctatctaattggggaactgcaaatagtgtgttatgctagttttgtaggctgaaaggaattgagggcaagaggtraagtagatacttagacacaggagctagattatgaaagacttcatatactatgaaaagtagtttttttttttttttttttagcagggcatggggaaccaatgaagaatttaaaataataggccgggcacagtggctcacgcccgtaatcccagcactttgggaggccgaggcgggtagatcacgaagtcaggagatcgagacaatcctggctaacaaggtgaaaccccatctctactaaaaatacaaaaaattagctgggtgtggtggctggcgcctgtagtctcagctacttgggaggctgaggcaggagaatggcatgaacctgggaggtggagcttgcagtgagcccagatcccgccactgcactscagcctgggtgacagagcaagactccatctcaaaaaaaaaaaaaaaaaaaaaaaaaggtaggctacttgggcatatttgggctttttttttttttcgtttttgagacggagtctcgcactatcgcccaggcaggagtgcagtggcacgatcttggctcactgtaacctccacctcctggattcaagtgattctcttgcctcggcctcctgagtagctaggacccaggcacccaccaccatgcccggctaatttctgtatttttagtagagacagggtttcaccatattagacaggctggtcttgaactcctgaccttgtgatccacctgcctcggcctaccaaagtgctaggattacaggcatgagccacctcgcccggcttatttggttgaagatttagaaagattattttgttgtctgtgtagcagatgggttgaatgagggccagaatggatacagggttatcattggggaaactattgaagaaaacaaagccagagacaataatataaattagagtagtaacatctagaatggataggaagggatggattcaagagataattacttatttatgagacagagtctcgctctgttacccaggctggagtgcagtggtgtgatcatggctcattggagcctcgacctcttggcccaaacaatcttcctacctcaacctcctgagtagctgggaccacaggcatgtgccaccatgcctggctaatttttttgtttttgtagagacagggtctccctttgttgcccagggtggtcttgaactcctgggctcaagcagccctccctccgtggcctcccaaaatgctggaattatagatgtgagacactgtgcctggccacaagagatatttagggtttgaattgttaggattgattggtgggtagagtggttcttagatgtctgggtttggatgattgagtgtatcattcaggcttagatgaggygatggagtgcagaagacatactaggttttagggagtagttaaagccacaagggtgaatgagatcatccagtgaaaccatgtagagtgaagagacaagaggtcatgagagagaacatgagactggattaaaagtcacatttaaggccgggcgtggtggctcatgcctgtaattccagcactttgggaggctgaggygggcggattgtgtgaggtcaggagttcaagaccagcctggctaacgttgtgaaacctgtctctactaaaaatacaaaaattagttgggcgtggtggcacatgcctatagtcccagctacttgggaggctgaggcaggagaatcttttgaacccgagaggtggaggttgcagtgagctgagattgtgccactgcaytccaacctatgcaacagagcaagattgtgtctcaaaaaaaaaaaagtcacatttaagtgacacagtggaataaagtccacaaarggagacaaagaaaagaagaggaaaatcaatagagagtatcaagtttttataggagcggaggaggagagttttaaaaaagagtgttcctgtggataggctaaataaaaaggatttaaagtgtctattagggggcacagctggcttcagcaattggaaacaagatgcaggaccccaacgcagacactgaatggagtgacatcttacacaaaaagggcatcttaaagtctgaaagaattggaagaggaggcagaagatgagcagcgcatcctccagcagtcagtcgtgacaacataggaagatatgactttggaagagctggaggatcgtgaagacaagtttaatgaggaggatgaatgtgctattgaaatgtacagacagcagagactggctgagtggaaagcaactaaattgaagaataaatttgaagaagttttggagatctcagggaaggattatgttcaagaagttaccaaagccagtgagggtttgtgggtcrtcttgcacctttacaaacaaggaattcccctctgtgccctgataaatcagcacctcagtggagttgccaggaagtttcctgatgtcaaatttatcaaagccatttcaacaacctgcatacccarttatcctgataggaatctgcccaygatatttgtttacgtggaaggagatatcaaggctcagtttattggtcctctggtgtttggcggcatkaacctgacaagagatgagttgcagtgaaaactgtctgaatctggagcaattaagagggacctggaggaaaaccctaagaagccagttgaagatgtattgctgtcctcagtgcaatgctctgtccccatgaagagggacagtgattctgagggtgactgaggctgcagctgctatcactttyttgtgacaaattgtctggattttttaaaaaaggataaagtaagaatgaattcttctggtttttagttttgtacaaattatgtttcaaatctttacattttagaaataatcattgctgggccgggcgcggtggctyacgcctgtaatcccagtgctttgggagsctgaggcaggcagatcacctgaagttgggagttcgataccagccttaccaacatggagaaaccctgtctccactaaaaatacaaaaatagccgggcgtggtggcgcatgcctgtaatcccagttactcaggaggctgaggcaggagaatcacttgaacctgggaggcggaggttgcagtgagctgaatcaccccattgcatgccagcctgggcaacaaagagcaaaactccgtctcaaaaaaaaaaaaaaaaaaaaaggtagaaataatcattgctggaaattctgttaaatattttggaactcgtccctctccctctccctctccctctccctcactttctccctcacggtctccttctccctctctttccacggtctccctctgatgccgagccgaagctggactgtactgctgccatctcggctcactgcaacctccctgcctgattctcctgcctcagcctgctgagtgcctgcgattgcaggcgcgcgctgccacgcctgactggttttcgtatttttttggtggagacggggtttcgctgggttggccgggctggtctccagctcctaactgcgagtgatccgccagcctcggcctcccgaggtgctgggattgcagacggagtctggttcactcagtgctcaatggtscccaggctggagtgcagtggcgtgatctcggctcgctacaatctccacctcccagccgcctgccttggcctcccaaagtgccgagattgcagcctctgcccggccgccaccccgtctgggaagggagaagcgtctctgcctggccgcccatcgtctgggatgtgaggagcccctctgcctggctgcccagtctggaaagtgaggagcgtctctgcccgcccgccatcccatctaggaagtgaggagcgcctcttcccggccgccatcccatctaggaagtgaggagcgtctctgcccggccgcccatcgtctgagatgtggggagcgcctctgccccgctgccccgtctgggatgtgaggagcgcctctgcctggctgcgaccccgtctgggaggtgaggagcgtctctggctggccgccccgtctgagaagcgaggagcccctccgccckgcagccgccccgtctgagaagcgaggagcccctccgcccggcagccaccccgtctgggaagtaaggagcgtctccgcccggcagccaccccgtcggggagggaggtgggggtcagccaccgccaggccagccgccccgtcccggagggaggcgagggggtcagcccaccgcccggccagccgccccgtccgggagggaggcgagggggtcagccccccgcccggccagctgccccgtccggagggaggtgggggggtcagccccccgtccaggagagaggtggggggtcagccccccgcccggccagctgccccatcggggaggtgaggggcgcctctgcccggccgcccctactgggaagtgaggagcccctctgcccggccaccaccccgtctgggaggtgtgcccaacagctcattgagaaggggccatgatgacagtggcggttttgtggaatagaaaagggggaaaggtggggaaaagattgagaaatcggatggttgctgtgtctgtgtagaaagaagtagacatgggagacttttcattttgttctgtactaagaaaaattcttctgccttgggatcctgttgatctatgaccttaccccgaaccctgtgctctctgaaacatgtgctgtgtccactcagggttaaatggattaagggcggtgcaagatgtgctttgttaaacagatgcttgaaggcagcatgcttgttaagagtcatcaccactccctaatctcaagtacccagggacacaaacactgcggaaggcygcagggtcctctgcgtaggaaaaccagagacctttgttcacttgttaatctgctgaccttccctccactattgtcctgtgacccagccaaatccccctctgcgagaaacacccaagaatgatcaataaaaaataaaataaaaaataaaaaaaaataaatattttggaactcttttttaaattatagtatttcctttaaaaaaaaaataaaaccagctattggtatggcacatgtgtattttcctcatttatattttaagtaagccataaaacctagtcactattttttgacatataactataaaaagaatatttagttttaaatgtgaataaattaaaaaaaataaggtgtctattaggattggcaattagaaagtcattgatgaccttaggtagagcagttttagtagattgaaagtaagaattgaaagtaagtaaaggtcagtaatttttttcttttaaaagaatgtggctgtgaaaagaaggcgaaagggcagtaattagagggaaatgtagggttgaaggagaggttttaatgtttgttatcaaaagatgttgaggatgtttacagaccgtaaaagggaaaggttgaaaagacagaggacacaggcacttagagtatgttgtaaagtagattgtttcaaaattaattaacgtatatattgggaagtaaaccagttaagtagactatgaatgtttgggatatatgtttgttgtaacttatagcaatcaccaacatatagaatactcaaactcaattttagaagtcataggaaactaagagattttctagaccagtttctttattaaacatatgaggaaattgagacctgtgtttgtacttttgccttttgagttattaattttattcaaaattatttatgtatttatttgtttgtttttgagctggagtctcactttttccctggctggagtgcagtggtgcgatctcagctcactgcaacctctgcctcccgggttcaagtaattctcctgtctcagccttccgagtatctgggagtacaggtgcgtgccaccacacccggctaatttttttgtgtattttagtagagacaggatttcaccatgttgcccaggctggtctcaaactcctgagcttaggcaatccacccgcctcggcctcccgaagtgctaggattactggcgtgagccaccgcgtccagcctcagctgtgtctttaatgtataagcttgtcagagcttttcttttctatctttctttttttttttttgagatggagtctcactctgtcacccaggctggagtgcagtggcatgatcctgaccttgtgatccacccacctcgacttcccaaagtgctgggattrcaggcgtgagccacygcacctggccaagcttttctttttataaaaataatttttaaaagacacagtaaggtagagtagggctgcagagaggacatcatggagttatgtcataaattcacacaacggtcaggtgatttgatatagttcacctttttagttggcagctttaaattaggtcatttcatggttctatttgtccttttggcatttctttaatgacaagtgtcattatatatatatatttatatatatakatatatatatatatattttgagatggattttcactcttgttgcccaggctggagtgcagtggcatgattttggctcactgcaacctctgcctcctgggttcaagtgattcttctgtacctcagcctcccaagtagctgggagtacaggcgcctgccaccaagtccagctaattttttttttttttttttttttggkattttttagtagagatggggtttcctcatgttggccaggctggccttgaactcctgacctcaggtgatccacctgcctttttctcccaaatttctgggattacaggtgtgagccaccgcatctggccaggaaaataattttgaagtcagccttttccatttttgggtggcgggtggtggggagcgggggtgggcgggggtgggtcctcaatcagatacttaatgtracaacaaagaaacaaattcctctttgactatccaggacgattattccagatgaccatcctttagatttaaatagctgctaatgttcagtgtaaaagaattgaaaaactgagtgcggtgacctataatcccagatgcttgggaggttgaggaggagggatcacctgaggccaggagttagagaccagcctggacaacatagcaagaccccatctcaaaaacaaaacaaagactgggcacggtggctcatgcctgtaatcccagcactttgggaggacaagggggaggattgtttgagctcaggagttcaagaccagtctgggcagcatactgagkctctatctctaagctaaacaaaacaaaaaaagaattgataaaatgttttgccaagtctgatgacgtacaacattttttgtttgtttgcttgggagtggaacctttgggtctgcctccgcattgcagtactatctccccacttgctaacactcatcccaggtttatgcttttcttaagaggtgttcaacaatttaatacctactagttcagctttttcattgaagagggagtaataattataccttacagagtgctttcttttttaattttcattaacaaagggttggaacagatatttttattatcctcatttaagaagagaaaaaaacaggtagaagctaagcaagttttctaatgccacaccatgctaaaagattgtaaattcccatggaaagacttattctgacaaaattatcaatggttagtgtatttttaatgaaattaaaaatgaaattataagcctgggaaatgttattgaggaatgtctaaaattctattgcttagctctgttaagtagctgtagagtattagtccctaattaataaaccaaataagtaagatatgctatttattgagttggaagttttaatatagagtattgctaagcacttttaaatcctttgttaaaaataaaattggttagatgcagaaaaggctcttgatggccgggcacggtggctcacgcctgtaatcccagcacttttggaggccaaggcgggcagatcacaaggtcaagaaatcgagaccatcctggccaacatggtgaaaccccatctctactaaaaatataaaaattagctgggcatggtggtgtttctgtagtcccagctacttgagaggctgagactggagaatcgcttgaacctgggaggcagaggttgcagtgagccgagattgcgccactgcactccagcctggggacagagtgagactccgtctcaaaaaaaaaaaaaaaagcttttgataaaattcaatatcctggttgggtgcagtggctgatgcctataatcccagcactttgggaggccgagacgggtggatcacttgaggtcaggagttcaagaccagcctggccaacatggtgaaaccccatctctactaaaaatacagtattagctgggcttggtggcaggcacctgtaatcctagttacttgggagcctgaggcaggagaattgcttgaacctgggaggtggaggtttcagtgagccaagatcatgccactgcactccagcctgggtgacagagcgagactctgtctcaaaaaaaaaaaaacaaaacaaaacccaaaaaacaacaacaaaaaagcctctcagtaaactaggtattgaaggaacataccttaaaataataagagccgtctatgaccaacccacagccaacctcatattgaatgggcaggagctggaagcattcccttgaaaactggcacaagacaaggatgccctttttcaytactcctattcagcacagtattggaagtcctggccagggagatcagggaagagaaagaaagggcatccagataggaagaaaagaagtaaaactatcatccatgttggcagatgacatgattctatatctagaaaacctcatagtcttggcccaaaagctccttcagctgatagcttcagcaaagtttcaggatacagaataaacacagaaatcactagcattcctagacactgacagcagccaagctgagagccaaattagaaacgcaatcccattcacaattggcacaaaaagaataaagtattaatacgtaggaatacagttaaccagggaggtgaaagatctctacratgagaattacaaaatattgctcaaagaaatcagagatgacacaaacaaatggaaaaacattccatgattatggataggaagaatcaatatcattaaaatggccatactgtccaaagcaacttacagattcaatgatattcctatcaaactatcaatggcattctacacagaactagaaaaaaatattttaaaattcatatggaaccaaaaaagagccccaaagccaagggcatcctcaggaaaaagaacaaagctggaggcatcatattaccccactcaaactatactacagtgctacagtaaccaaaacagcatggtactaacacaaaacagacacgtaaaccaatggaacagaatagagagcccagaaataaggtccatacctacaaccatctgatctttgacaaaagctgacaaaaactagcaatggggaaaggactgcctattcaataaatggtgctgggataactggctagccatatgcagaagattgaagctggaccccttctttataccatgcacaaaaatcaatgcaagatggtttaaagacttaaatgtaaaacccaaaagtataaaaaccctggaagacagcctaggcaatacattttggacataggaactggcaaagatttcatgatgaagacaccaaaagccattgcaacaaaagcaaaaattgacaaatggcatctaattaaacttaagagtttctgcacagcaaactaccaacagagtaaacagactacagaatgggagaaaatttttgcaaactatgcatctgacaaaggtctgatatctagcatctaaaaggagcttaaacaaatttatgagagaaaaacaactccattaaaaagtgggcaaaggacatgaacacttttcaaaagaagacatacatgtgcgaccaacaagcatatgaaggaaagctcaccatcactgatcattagagaaatgcaaaccaaaacctcagtgagataccatctcacaccagtcagagtggctattgttaaaaagtcaattaataacagatgctgacaaggttgtggagaaaagggaattcttatacactgttggtgggagtgtaaattagttcagccattatggaaaaygattcctttccacagtgattcccttgttttgtgattcctcaaagagctaaaaacagaactatcatttgaccaagcaatcccattactgggtatatacccaaaggaatataaattgttctagcataaagacacatgcatgcatatgttcattgcagcactattcacaatagcaaagacatggaatcaacctaaatgcctatcaatggcatattggataaaggaaatgaggtacatatactccatggaatactatggcgccatacaaaagaatgagaccatatgctgtgcaggaacacggatggagctggaggccgttgtacttaggaaactaatgcaggaacasaaaaccryataccacgtgttcttacttataagtgagagctaaatgatgagaacacacagacacaaagaggggaacaacggacactgggtcctactggagggtggaggctgggaggagggagaagatcagaaaaaataagtattaggtactaggcctttacctgggtgacaaaataatttgtacaataaacccctgtgacatgagtttacctgtataacaaacctgcacttgtacccctgaacctaaaatataagttaaaaaatttttaaaataaaattgcctagtttatccaacagttagaattggcatttgatgaatattttgaataatatgatttcattaaaaataatagttttgtaattttgtacaaaaaatagttttgtagcctataaaatgaatttataggtatgagaggactggctgctaatttttctatcttataattgaagatgagttgcattggtttatatagtagactgaggtacatggtagaataccaatgttaagktcaggcrgatcagaattacagtatttctagttttagttcttgtttttaagatagctttttttttatgtttttaagatagctttataacaaaattcacctgttcaaagtgtagaattcagtagttttcagttgtgaattactttcagtagttttcacagtcatgcggtaatcaccactgtcttattttattttatttttatttatttatttatttattttgagatggagtcttgctttgttgcccacgttggagtgcagtggcatgatctcggctcactgcaacctctgcctcccaggttcgagtgattcttctgcctcagcctcccgagtaggtgggattacaggcacctaccaccacgcctggctaattttgtatttttagtagagatggggtttcaccatattggcccgggtggtcttgaactcctgaccttaagtgatccatccaccttagcctcccaaagtgctaggattacaggcatgagccaccatgcccagcctatttttttttttttctttagataggatctcactctgttacccaggctggagtgcagtggcacgatccaggctcactgcaacctctgcctcctgggttgaagtgattctcctgcctcagcctcccaagtagctgggattacagtcgtgctccaccatgcctgactaatgtttgtatttttagtagagatggggttttgtcatgttggccaggctggtctctaactcctgacctcaaatgatccacccacctcggcctcccaaagtgctggaattacaggtgcgagccactgagcccggcctaatttgttgatttttagtagagatggggttttgccatgttggccaggctggtctcaaacttctggcctcaagtgatttgcctcactcagcctctgaaagtgctgggattacaggtgtgagccaccgcacttggccttaggttgtttttttttttttaaacttgtgcttttggtgtcatattgcttagtgcaagtccacaaagatttgctcctatgttttctttgaagagttttagctcttatatttggatctcttatccattttgagttaatttttgtatatggtgtgaggtaggtccaactttattcttgcgcatgtgaacatccaacaccatttgttgaaaaatgttctttccttatggaattgtgttagtatcctgggcttgggatactaaacaggcaacacctggcctcttctgaaacctgcagatgtatttttcacccaagaaaatttgaattttgagacccattctcttggataactatgttgatgagaagtgagtatatatagacctcatttcgtaagcccagtataahacccgtgatcatgttctgtacatgactacaaaaagtgcaaacggtagccagttcccatttttctaccacttatcaacttggagctgctactttttgtttccaataagattgtgttttacgttgatgtccctctgcagggtacctctgggttccttcataatacctgtatgtttcttcagaatgatgttgacattttctggaatgtcaatagcctgattgctgagaattgttttcattcttgcagtggatgtggcaaagcttcaactgttactgttgaattgtctatttctcacttcagttctgtcagtttatgcttagtgtactttggggttccgttaggtgctttggttttaattttattgtgcatcaaaattatgcacaatatggattagattctctgtatgttaatactgttgatgactaaataaaacaatgtttctgtctcatgtgctgtgaccaataagtggagcttgttttgatatggattagatgcttaaaagattttcagtttcatcaatagtagattgtcatgtctggattacataaagaagcacttgtctctgagaaggctcttgacttcattggggctgtggttcattataagggtctgtgtgtatgtgagtcacagtgaactgcagcactttaaacatggctgagataaagtacttaaatcactttgtcagtatattaatttttattgagattaaagggtagaagatagtaatatttcttgactttccctagaagaatttgtgtcagtaactattaatagcatctactttttatacaaccaagtcttaaactatatctggcttgacaggaagaagcaaatagataaatatctattatattttatggatattcattcccttcctccctcccttccttccttccttccttcagctgtagtacagtggcatgatcccagctyactgcagcttcaacctccgtggctcaagtgatcttcctgccttagccccctaacgcctccagtgggtgggactataaatgcatgccaccatgcctggctaatttttgtatttttttgtagagtcagggtttcaccatgttgcccaggctggtcttgaactcctggactcaagcagtccacctgctttggcctcccaaggtgctggaattacaggcgtgagccaccatgcccggtcaatgaatattatttccttttaatcttcatagcaatattttgaggtgggagatagtgttcttactttacaaatgagggaattgaaacccagagcccagagatttattaatttggctaaggtcactgaaaagttctcttttcattctgtcattctttcaacaaatatgccaggctttgaagatgcagccatgacccagtcagacacttgccctcatgaagtgacttgtctggtggagtccttttactgatacttctttgagccatatttcatataatgacatatatttgtagaattctttatgaagtatttctgcattgtcatctaattttctaatccttaccacagtcctatgacccagatgggttagatattatccccatttgaaagtagggaaactgatacttagggttattcaggtcatatagttagtaaatggctgaaccagtacacaaacccagatcatttggctccaacaatcctgcactttttccattacaccacattgtctcgtgatttctcatgaaactgtaaggctagatcaccaagagtgatatcctggaaagaaaccagtctagcggcacttagcaaaggagagctcaaccagggaatggtatgtgggaaaagaataaaatccagagacccaaaagctgtgtctagtgtgctgaaatggacttattgttaaataatggtagtgagaagaaatttggagagagactaaaacatgaaaaatattaaatggacatggtcttaacagcatctagacaggcttaggacacagtaattggcaggggctttttttttttttctaraacaagcacctgaaacacagtgaatttaagaggaagatacccaaacatcagactctgtgcagagctacctgccactgcaaatcagggtgtaatcttagaggaggggattgctttgttttacattgattactttggctactttcatgtatgttcagagatggcaatctatcctataaaaacatttgagtgctttttctgtgtaaaagcacttttaggcattgtgggagtgataccaaggtaagtttgacaccatcattacccataagaagtgtgtaacctagtaaggagattctgctgcattcaaacatgcttgttcatccggagtctattatgtataagaccgtgtaccaggtatttaggagacaagagtagataagttagaaattgctcctaagcctttggcttatactgtcagttgcttagagggtatttgctayctccttcccttaaatctaagtaattacaaaccttttaaagtagagagcaggacttgaaattctcttggcaaaacagtagtcaattctgccatccttgtgatttggccacaaacaaaacctgacagcccatgggtcagagcataggtgtcatactagaaaatatttgcatcatatttaacagtcaaaggattaatgcacaggatatgtaaagactctgacagatcattaaggaaaaatgcaaacatcataacagaaaaaaatggacaaagaatttgaacaggaggtcatcgaatgggaaattcaaaaggctaaaaaagtaaaaatatatgttcagtcttactttttatcaggaaaatgatgatcccataatgaaacattatttctgcctctcattggcaaaaataatagtaatagcaaatttaagtaataagaaatctttgagtactttctaaactgtaggcagaacaatccacagcaatcctatgagataggtactattattattattactgttttattgataagggacttgaggcacaagaatagatgtccaaggtcagacatctcatgcttattgaacccccatttgaactcaggcagtcagtgtctagagcctgcactcttttttgttgttgcctaggctggactccaacttctgggctcaaacagtcctcctgcgtcagcctcctgagtacctgggactacccagcacagtttaaagcctgcactcttcatcaccagagtagtgcccttgtctgggttggctattatgctgtgtacccagcctctagaacagtgcctaacagaaagaaaacatttaaatacctgttgagtgaatggatacaggtaattaattttaaaacaaaagcatattaggcacatcattttggagggtaatttgtcagtatcaaaaaaaaaaaaaaaaaaaaaggatacacatggccgggtgtggtggctcatgtctgtaatcccagcattttgggaggccaaggcaggtggatcacctgaggtcaggagatcgagaccagcctggccaacatggtgaaaccccgtctctactaaaaatacaaaaattagctgggcatggttgcaggcgcctgtaatcctagccactcaggaggttgaggcaggagaattgcttgaaccgggaaraaggaggttgcagtgagccgagatcgtgccactacactcaagtytgggcaacaagagcaaaactytgtctcaaaaaaaaaaaaaaaaaaaaaaaaagatacacactaatgactcagtaattgtgcatcttaatgtcttaatgtttatcttcaaacacacacgcacgcgcgcacacacacacaygtgtccaaggaggcatatacaagggtgttaatgggagcattcttggtaatcgttgaaaaataggggaaaatgtaaatgcttattcgtgctttatataactgataaataacaggaaaattatgatatggttatattttagaattctatgtgtacaattaaagtagttgtaatcccagcttctcgggcggctgaggcacgagaatttcttgaacctaggaagygaaggttgcagtgagctgagatcgtggcactgcactccagtctgggcgacagagccagactccatctcaaaaacaaacaaagtagtttatctggaaagatatctaggatatatcattgagtgagaaaaacaagttatagagccttccccaccaaaatagattctagatgatgaaagagcgaagcaaacaaaagcaacatgaaaatagcatagaaaacataggctaatgtgttcataatattggtataaaaaaggctttttctaagcatgatatgaaatacagaagccaaaaatgaagattggtgaatttgactacataaaatggaagaccttcatataaaaaaaaacctcactcaaacattaaactgagactaagattctaaacatgatacatataaggaatatttgtaggcagtttgcagaaaggccaataaacatatgaaagatataaatagatgtttagcttttattcataatgaaaaatacaaattagaaaataaagttccatttactacctgtgagattggtaaaagattgattttattcaataatgattagagcatgaagaaaaaattcttgtatatacccatttgaggaaataaaaacaaacagcatgtttggtggaaaacttggcagtatttattaaaatttaaaatgtgcactacctttctctcaaactttgcttttagatatttattgcacgttaaagggtaaagatacaggtacaaggatattcattatattgttgataagcataaaaacatggaagcaatctaaaggcttattgatagggataagagctaaattgtagtattatatgtctatttaatggaatgctattcagctatttaaaaagacarcaagtctagatgtacatgcatgacttatttaatactgcactgtgtagtgctgattgattataatgctatgctaaatagcatgtatgaatatattataataatatataacaatagacatgtatrtatttttaaaatccatggtagtaacctgttaacctatacctctctccctgctctgtagtgcttactgcatctgtagtgggagtattaataaattcagatatactatagtgtttatatgttattaaactatattttttcttttcctttttctctttctcttttctttgcaaaacagtgagcacagcttctagctcatggaagcattttttacactgaaaatatttctaaagggtgaaaagaggtaaaggaggaatgttgtttccaaatatatacatacctagtggttaagaatctgagacgtgaaaccagattgcctagattcaaattctggctgtgtcactgtgtgtgaccttgtgcaagtcacttaaattctttttgcctccatttcttcattatccattcaacaaatatttgactgcttactatatatcccagacactgttctgggtgccagcaatgcaacaaagagcattaagagaagatctctgccctcttgtagtatacatcttggagggcctaattatacccactatttaggattgtaaagaaaagtaaaagtttaatacctaaaaagcacttggaagagtgtctggtacatagtaagtggtcaataaatattattattccctctcttcttttctgcaaaatagacacartgttttttatttttattttggacacagagtattaatgtattaactagtttatgaaagtttttgataaatgcaatagcattaaaagatacatgaagtctgtttcagtatagtcttttttttttttccctccaaggcagagtctcactctgtcgcccaggctggagtgcagtggcccratctcagcacactgcagcctccgcatcatgggttcaagcaattctcctgcctcagcctcccgagtagccgggactataggttcgcggcagcaagtccagctaatttttgtattttttagtagagatggggtttcaccatgttggccaggctggtctcgaactcctgacctcgtgatccgcctaccttggcctcccaaagtgctgggattacaggcgtgagccaccgtgcccggccagtatagtcttatatttgtccacaatctgggtgctcccatacattgtttgtcattgagctctaacttggtagacttgtacactactggccagtaaatcttaccatatgccatgttacaaaagctctcaaacagtgagtgctctgtcacatatttagaatgtgctaaatgttgaagtgaaaattttacagtggttcttttaaggagtcttgatggaaatgatagagaagtcaagagtgtgaagatcaacacattataaaaattggtaagttggccgggctcacgcctgtaatcccaacactttgggaggccaaggtgggtggatcacttgaggccaggagttcaagaccatcctggccaacatggtgaaactccgtctctactaaaaatacaaaaaattagccaggtgtggtggtgggtgcctgtagtcccagctactcgggaggctgaggcaggagaatcgcttgaacccaggaggcagaggttgcagtgagccaagatcacaccattgcactctagcctgggcagcagagcaagacccggtctcagaaaaaattggtaaattggaggtcatgataaacatcaataaagcctggaaggattgattattaattgtatagcatttaataggagaaattttttagtggtatttattaacttgtaaatttataaaatctcagcatttattcacatggataaagaatcagaggtgggaaagaacatgatactcttgaggaataagatgtcagtgtagatgtagagaagtaagcaaaaaagaaagtgacaaaagtataaactggagaggtaggcaagtgttaaaattgtgccagacctcataaggtcttagtaaggagtcttgatattatatttaattttattatcaagatatatttaatatcaaacaattgaagaatttcaggtagaagaatcacttgaatagatctttcaaaatataagtttaacagctgaatggagaatggattggaggaggaggaggcagaagtagatataagaatattattgaagatagtatttcagtaatccagatgtgagataatagtagcttggatgaaggtagtagttgtagacagaaaagtaaattggttttcattaaatgagaacatgatttaatgttgattgtgagcattatggggagagggagtgatagagaattactatagcrtgaacaactgggtagatgatatagagaatagagaagaaaacattgattagtatgaaaatagatgtatgtgttgagatgtgtgtggagcatggagacattgagtaggcacttagatgtatagctttagaacccagaaaagaggtcactcttttaaattggaatttcttaacagatggtgtttgaagcaatcatagtagatacaattctcttggaaaacagtataaattgagaaaagaagaggactgagtacagaactctgaggaatttcaacatttaagattgggtagaagaggaggagtcagggatgaagatgagagatagatgtcaaaaaaaaatagaagaaagtartttgtagtatcacacaagtcatggaagaagagtttcataaaggaggaggatgtgatctaatataattgaatgttgctaaaatgtcagatgaagttaggaccaaaaagtgtccattagttttaacaatatggaagttatcagtgacttgaaacaagaatggtggggaagccagagaagagtgagagcataagtagaaggtggagaggaggatgcacagaaagtagacaactctcttgagaaaatattcctcttgaatgtgaagggttcactgtttgaaatttgaggtgtagtggaacaaccagatggagaactatttcatatcagataggtgaagctgtggcctcagaatttgagtgagaggtgatgtttatagaaatctgagtcattcgaatggaggtggtaaagactttggaagaaaagggagccaaactggaagagcacctataggcagagattttctttgggttgtcattaaataatattgtagtgtttttttttgtttkttttttttttttttttgagatggagtctcactctgtcacccaaactggarttcagtgatgctatctcggctcactacaacctctgcctcccgggttcaagcgattctcctgcctcagcctccacagtagctaggattacaggcacccaaccaccacgctcagaaaatttttgtatttttagtagatgtggggtttcgctggtctcgaactcctgaggtcaggtgatccaccygcctcgacctcccttacaggcatgggctactgtgcccagcctgtagtgttctttaatataagtaatttgagcatggatttgtttcatctaactgttgtcctgagctttgactgagacaattcaggttatgttcttttcaaatttgatgtggttaaaagttagaaacaatgccctaaatgctcgcaaagagttgtcaagataggagcatacataggatctaattttactgcaagtgttaggctatatgattttgtgaacctaccaatttggctagttttccaattggtactttgtaagtgaaatatatcacttgcattgactggatcagtagtgattcataacgctgctttatatatacactctgtcttttttagtagactttgttttttagagcaacttcaagttcacagcaaaattgagaggaaaatagagatttcctgtgtacctcctgccctcacccacgtatagcctccgccattatcaatatcctccacaattgtttcagtttaagaacctacatggatacatcattatcacccaaagattattatttacattggggtttactcaatggtgttgtatattttatgggtttggacatatgtttaatgttgtcatttatcataatgatataatacagagtggttttaacaccttaaaaatctttttgctctgccgattcattcctctcccctagtctttgacaatcacggatcttttttttttttgagatggaatcttgctctgtcactcaggctggagtgctgtggcgcgatctcgactcactgcaagctccgcctcccgggttcatgccattcttctgcctcagcctcccgagtagctgggactataggcgctgccactacgcccggctaattttttgtattttttttagtagagacggagtttcaccgtgttaggatggttttgatctcctgacctcgtgatccacccgcctcggcttcccgaagtgctgggattacaggagtgagccaccgtacctggccaatcacggatctttttactatttctgtagtttcgacttttccagaacgtcacatacttggaatcatacagtacgtagccttttgagattggcttctttcacttagaaatgtgcctttaaggttcttccatatctttttgtggcttaatagctcacttctttctagtgctgaatctattgtatggatgtaccacagcttttatttacctaccattcacctactgaaggacatcttagttgcttctaagtttggcaattatgaataaagctgctataaacatctatgtgcaggtttttgtgtrgacatgttttcagctcctttgtgtaaatactgaggagcacgattgctggatcatattttaagagtatatttagttttgtaagaaacagccaaactgtcttccaaagtggctgtaccattttgcatcctcacaacaatgaatgagagtccctgttgcacccacatcctctctagcatttggtggtgtcagtgtttctgattttggccattctaataggtgtgtggtggaatctcatagttattttaatttgtrttttccttataacaaataatgtggagtatcttatcataatgcctgtttgccatctgtgtaccttctttggtgaagtgtctgtacaggtctttggcctgttttttgatccagtttttttttttttattattgttttaaaagttctttgtacattttggataatagacctttatcagataaatctttttcaagtatgttctcccagtctgtggcttgtcttttcatcctcttaacagtgtcatttgcagagcagaatttttattttttattttttattttttttagacaggctctcactctgtcacccaggctggagtgcagtggtgcaatcacagctcactgcagccttgacctcccaggctcaaaccattcttccacctcagtctcctgagtagctgggactataggcacatactaccatgcctggctaatttttatattttttttgtagagacagggttttgtcatgttgcccatgctggtgttgaactcctgagctcaagcgatccacccactttggcctcccaaagtgttgggattacagatgtaagccactgtgcctggccacagagcagaaatttttaattttagtgaaggtgcaccttatcaattcttgttttcatagatcattcctttggtattgtgtctaaaaagtcattgccaaatcaaaggtcatctagattttctactgttatcttctagcagtttaatagttttgtgttttatatttagttttctgattcattttgagttaactcctgtgaaaggtataggggtctgtgtctagatttatctttttttatatgttggatgtctagttccagyaccatttgtaaaaatactatctctgatccattgtattgcttttgcttttttgtcaaagatcagctgactatatttgtgtgtgtctttttctggcctctctattctgttttatagatttatttgtctatcaccaatttgacactgtcttgattacagtatatcttgaagtagggtagtgttaggcttctaactttgttcttctctgtcaataatgtgttggttattctgggtctttctcctccatataaattttaggatcaatttgtcaatgtttataaaataactttctgggattttgactgggattgtgttgaatctgtagatcaagtcaggaagaaatgacatcttgacaatattaagtctttctgttcgtgaacatggaatatcttttcatttatttggttcttttatagtgtttatcagagttctgttgttttttcatatagatcttgaacatattgtgttatatttatatagaagtattttgtttattttggtgctaatgtaaattgtgtttttaattttaacttcaacttattcatcagtggtatacaggaaagtaattggcttttatatattaaccttgtatcctgtaaccctgctatagtcacttattcctggagggtttttggtaatttttttttttttttttttttgagacagagtcttgctctgtctccaggctggagtgcagtggcgcaatctcggctcactgcaagctctgccccctgggttcatgccattctcctgcctcagcctcccaagtagctgggattgcaggtgtgtgccaccatgcccagctaattttgttgtatttttagtagagacagggtttcactctgttggccaggctggtcttgaactcctggcctcaagtgatccacctgcctcagcctcccaaagtgctagaattacaggcatgagccactgtgcctggcccaggtcttatttattgatgcattccgacagtctgtgtcttttcattggtgcatttagaccattgaccttcaaagcaatttttaaaaaaaaaattattttatgtatttatttatttattyttttgagatgaagtcttactctgtcacccaggctggagtgcagtggcacgatcttggctcactgcaacctccgcctcccaggttcaagcaattctcatgcctcagcctcctgagtagctggaattacaggcatgcaccaccatgcctggctaatttttgtatttttagtagagacagggtttcgccacatgggccaggttggtctcgaactcctgaccttaggtgatccccccatcttggcctcccaaagtgctgggattacaggcgtgagccaccgcgcacagcccaaagtgattattratataatctccttcacttttgaaggacaattttataggggtacagatttttaggttggtctttttttyctctttcttcytgcttatatggtttcttcactcctctttctccttgtttaggtttcttaggataaattagttgtaattcttttctttactcctccgtaggtatagtgtttttttgttttgttttgtttttttaagacagtgtctcactcttttgcccagactggagtgcagtggcctgatctcggttaacctcaacctccacctcccaggctcaagtgatactcctgcattaggctcccaagtagctgggattacaggcttgcgccactaccgtccggctaatttttgtatttttagtagagacggggtttcactatgttggccagtctggtcttgaactcctgacctcaaatgatccacctgcctcggcctcccaaagtggtggggttacagacccgtcttttttttttttttttttttaagagattaaaaaaatttttttttattttctatagtttgaatataactatgtataggttttttttggcatttttcatgcttggtgttctctgaactttctgtatctgggaattggtacgtggcattaatttgggggaaattttcagtcattttagttacaagtatttttttctcttttccttctggtattcttattacacgtatgttacaccctttgtagttccacagttcttgagtattttgttctattattattattattattatttcactttgcttttcaggtttggaggtttctgttgagatatcctcaaactagagattctttcctcagtcatgtcctgtctcctaaataagcctatcaaaggcattcttcatttctgttatcgtgtttttgatctctagcatttctttttggttctttcttagaatttttctatactttcattgcccatctgttcttgcacgctgtctacccgttatagcccttagcatattaattatagttgttttaaattcctggtctgataattctagcatctctgctatatctgaatctagttctgatgtttgctctttctcctcaaacttttttttttttttaaccttatgccttgtaatcttttcttgatagctggacatgatatattgagtaagaggaactgctgaaaataggcctttagtaatgtgataagctgttgggggaaggggagcattctatagttctacgattaagtctcagtcttttagcaagcctctgcccctggactgtgaacttcacaagtgcttctcagttttctcccctgtttagaggggacaggatagcaagaatgggctggagctgggtgtttcctttccccaggtcagttaggctctgatataaccccagcaggttaggctttcgtcaaatagtttctgctgagggcagaccgtattaagaatagaatgctcttaggctggggtggcacatgcctgctaatcccagcactttgggaggctgaggtgggcagaccacttgaggtcaggagttcaagaccagcctggccaaaatggtgaaaccccgtctctgctaaaaatacaaaaattagctgggcatggttgcgtgtgcctgtaatcccagctactcaagaggctgaggtgggaggatcacttgaacccaggaggtgaaggttgcagtgagctgagatctcgccactgcactccagcctggacaacagagcgagaccctgtctcaaaaaaaaaagaaaagaaaaaagagtagaatgctctggcttatttcaaaatggttccctttcccctttccctgccagaagaatgaggggatttcccccttgatgctgtgagatctaggtcaagcttcccacgaaagtgtgggagtccccttgaagtttttaactcgcagagttgtccacactaagcctctagcaatttgtcaattataattcaagcttttctgcccgacatctggttcccacagaggttcctgcttgtgggtttctgcttaggtaatttgtgactttttttgtattcacctgtctgtcccttcgaatttgggtcagggtttgtgctgtgaattttttttttttttttttttttttgaagacaggacctcattctgtcgcccaggctggagtgcggtggcatgatctgggttcactgcagcctcgccctcctgggctcaagcaatcttcccacctcagttccccaagtagctgcgactacagccgtgcaccaccacacctggcctatttttgtattttttgtagcgatagggttttgcaaagtggcccaagctgatcttgaacttctgagcttaagctgtctgaccacctcagcttcccagggtgttgggactacagggtgaagccaccaaacccagctttttgtttttttttaagagatggggtttcactctgttgccgagtctggagtgcagtggtaactcactataaccttgaactctgggctcaagcgatccttctgtctcagtctcctgagtagctaggtctacaagtgtgcaccaccatgcctggctaattaaattttttttttttttttaaatagagactgggtctcgctatgttgcccagactagcctcaaactcctggcctcaagcagccttcctgccttggcctcccagagcactgggttacaggtgtgaaccaccatgcctggccacctcacttcttttatgcatctaagaagagttgttgatatttcagtttttttactttgttgttcggatagaatagtgacttccaagctacttaaatgctgcactagaaactggaagtctrtgtatactcttgttgttactcttggttcacacaatttgtggtatacaaattatatctccctgttagattgccacctagaatgatccgaaatataagacccatccctctttccatgaatttatcccttgtttattatctacttgtagaacatagaatatctcagtttagggtctgatctttgaaggtataggtgcccaattaaagttgaaactgattttgatgccatttgcctcaatttatatcatactattgggatatatttgttaagattcttgttgcaggttaaggcaatccactggagctaagttagaaaaaaaaataacagttataaggatatgacaatatctcacagaatccaaaggcagctattgtagctgtatctttcaggcatagcatagaagggtctgtaattcattcaacttagatcaggagctcacaccaggctaataaactggttaggagctcacaccaggctaataaactggttaggtggataggttttccctgaatatggcgttttatcttgtgatgaaagtatatgtgtgtatggcgtggtggtagacagttctataattctgttggcaaagataatccaagagatgtctaacatctcaaaatkggagatacagactttggctaatatggtattaattaatatttcagtcatggataaacaatttatataccactttagtttctccagagaaacagaacyagaaggagatagaggtttctgttttgttgttgttgttgttttgttttgttttgttttttgagacagtctcgtggtgtcacccaggctggagtgcagtggcatgatctcggctcggctcactgcaacctccacctcccaggttcaagcattttcatgcctcagcctcctgagtagctgggactacaggtgcctgccaccacacctggctaatttttgtatttttagcagagacggggtttcgccatgttggccaggctcttctcgaactcctgacctcaggtgatctgcccacctcggcctcccaaagtgatgggattacaggcacaaaccactgtgcgcggcccggagatagaggtttctagcttgcagacagtaaatcatgagatatgtcagcctccataattttgtgagtcagtttcatttgataagtctcattatgtgtgtacacacacagagagaattatatatatgtatgtaggcatgtatttatatcatggggagggcaatccggtgtactcagttccattcaaatgcttatctcttctggaaacattctcccagacacacccagaaataatatttaatcaaatgtttaggcattccttgtcccagtcaagttgacatgtaaaattaaccatcacagggatgttgtatatctcagtagtttctgtccctatgacatgtatatacaaatttatgtcattttgagtctgattactccagacgtgagaattaagcatgctccttcttttagtcccaatcgcagatcagttgctgttctagcgatttcaatgcctatgtatatttgatacgtctgttatcacattttccaatatttgttaaactactctgctttttgtttggtgtgaactaggtgaaaacactcaccttgttctttatagctcttgactgggaatttgatgtttgtgaaagatgccagatggatatsctggaaattgaagccctgtgtgaatgtggggaagcaacaatgtcagcttcccagatcctattctcttaatgtattttggtcttgatctgcaggaataaagctcttttcagagcttatttcatttcttttttctgccactgtaagggtgttcatattcaaagggtgtctttttaggatcaaatttacttagcctcttcagaaagttgaacatcaggttactttttcgttcctagttttctgtttcattgctcagacttgagttgatcacttaagaccagttgccctaatggattattaattgtataaacaaactagtccactgattggtttcatggttcaaattgcatctttgcctttctgttctaattctttcacacaaattgcttttttgatgatgaataataatagctatcatttattgagcagttacatatcaggtctgtgcaaggcactttatataaataccttcatcatcattaaaaatatcccgcaaagtatagttttcatataaagtgtaaagaaactgagattcagagaggttatcttgctcaaagtagcaacagctattaaacaatatagcatgggccgggtatggtggcccatgcctgtaatcccagcactttgggaggccaaggcaggaggattgcttgatcccaggagttccagacaagcctgggcaacacagcagaaacctgtctctattaaaatataataataataaaataaataatagaacatgaattcaagcctggatcagccagatttttgtaccagtgttgcttctaccaaactccagtgactcttcataaaagatgttcatttggattaaatatcaagccaggtatgttccatattgctaatggttgatttaaaattccagactcagttttgccagatattccattgctgtagtcacactcttgaatcatactttttctttctttaaaggtaaaatatcgaactaataggaactttctgataagttgtgattgtgaatagacagcacaaaaccttgagaaaacatggtttaagtctgaattgttcttcttttttttttttttttgagacrgagttttgctcttgttgcccaggctggagtgcaatggcgtgatcttggcctggcgcgatctcagcccggcgcaatcttggcccaccgcaacctctgcctcccgagttcaggtgattctcctgccttagcctcctgagtagctgggattacaggcatgcaccaccatgcctgactaattttgtatttttagtagagacggggtttctccatgtcagtcaggctggtcttgaactcctgacctcaggtgatccacccgccttggcctcccaaattgttgggattacaggcatgaactaccatgcccggccttgaattgttctttagtatgtgttggcattaataaactttgaaatagtaagtacattgaagttttagtggtcccagtacaactcttgggatcctttgtatgggactatttcccaggtggaagttcttcgaaagtaaatcctttagttattttaatttgatttacaagtagtgagcacatgctgtgtattatccatggtatcatacactagggatacaatgacaaaagaagcaatctctatcctgagaaaccttaatagtctggaagggagagacagttttagaaaaatcatggatcagttcataagtgctctgataggggtaaaaggtacacaagatcgaaggggcacctatctcagacctagatcagaaggacttaatggaagaagtgatgtcttggatagaatgaggaggacaagtaagagtcaactgacaatggcaggggcaaagtttggagagggttcaaggcttaaaaaataatatggatgaagactttttttttaactggtttttaagatagaattcatatatcataaaattcacttttaaagcacacattcagtggttttcagtatattcacagagttgtgtaaccatcaccatttataattccagaacattttcatcaccccaaaaactccctacccattagtagtcacacgccatttcctcctctccccagcccctggcaacactaatacactttctgtctctgtggacgtgcctattctggacatttcatattaatagagccacataatatgtggttgtttatgactggcttctttcacttagcataatgttttcaaggtccattcatgttgtagcatgtattggtatgaaggtgtgttttggaaaataggcaagattgagaattgagggtttgtgttgatcaagatgactactgcatagagtaagaatttgagaatagagaataagatgtcatactagagaagtaagcagaaaccaaatcaaacagaacagaacattgtcagctatgttatggaagtatggactttatcctaagggcaataggatgacattgaatgatgttaagtatggaaatgatacaatcagatttgggttttgtatttgtgtggagaataggctagatgggtacaaaacagggggcagggagactaggattcttgcaaaaatctaggcaacagaaagatggaggcattatgggatatggcagtgggaatggagagaagtggatggatttgaaagatttaagaggtaarattgataagacttgatgttcgattgaatgtagagttgggaggagaggatagtatctagaattgtacttaagtttctgagtttatgagacaagtggatgataatgcacttactcattaaggagctggctgctaggtaagttcctgcggtgccaatatataagtagtaaaatggcactggaacattaatgagtcagaaaaaatgcatttactggaaccctacttagtagcagtgtatgtgggttggaggaaaactttgataagctactgtagatggagtaaaacccctctcttacctcgctttttgcctgagtaacattagttgtttcctaaactgtactctaagagacccaaagcttgttttattgagtggctaccatcagtgggtcatcttttttccctgtccctattaaggtttttattcttctctttaaaatgtttatatgagattggtttggagactatcagattactaacctgctgttccatttgaattacaccaaaatgtagtggtttaaaataacaatttaattatctctcatggttctggggattgattgggcttacttaattaggtggttctctctctctctatttttttgagacatagtctcactgtgttgcccaggctggagtgcagtggtgcaatcttggctcactgcaacctccacctcctgggttcaggagattctcatgcctcagcctcccgagtagctgggactacaggtgcctgccaccacagctggctaatttttgtatttttagtagagacggggtttcgccatgttggccaggttcttctcgaacttctgatctcaggtaatctgcccaccttggcctcccaaagtgctgggattacaggtgtgagccaccgcccctggccaggtatttctctcttagggttttcatgcagttgtagtcagacagtggctgggctagagtcatcttgaggcttgctcattcacatgtgtagagattcatggggcagatcaccgaaatgtgggctttccgtgtggtttctctggcatggttactgggttccaagagtgagtgtcccaaaaggagtggtcagaaactgtattacctttcatgacctggtcttggaagttacatagtttcccctttgttatactccattagatgaggtagttgtgaatgtctgcccaggtttagaggaaggagacatagatttcaccactcagttgaaatcacccatcccacactatcttcttaatgtgactgtgacacctgagtcacaggtgctacgtcacaatcacattaaaaaatcatgtgggatgggagatatagtagcagccatttaaaaaaatacaatctgccatccctacctgagaaccctgctcagactaagattgggaacagaaagaggggacttggaagattgaatgtgattttgtacctgttgagtttgaacactttgtcagactttctggcagaaatgttaagaagtttctttactgagccgggtacagtggtgtgtacctgcagtcgtagctactcccagcctcaggaggctgaggccggaggaacacttgagcccaggagtttgagtctagccttgtcaacactgcgagaccccatctctaagaaataaaataaaatttaagagtttgattactggtcagatactgaatttgtttacagagaatagtattaatcacagccaagataggaaacatctttaactgataatattttcaaacatatcatcattttattttcttttttaaaatctatggccaggattttggaaattttcaccctcacaaataattcttctgttataaacatgttcatatcagagattcctatgaatttcttgcattttatattttaagcatcatctttatacctgtgacctttccttataagtttatgtaagaactaaaatctttgtttcttaattttaaatgatggttctttaacgttccttcatattacagttaaaattttagtcttctgttatacatcccagggagataatctttttagatccttatctttcccattccctttgcttttcagtttttatatttcaaagtaaaacatttatttttatttatttatttttttgagacaaggtctgactctgttgcccaggctggagtgcagtgtcatgatcacagctcactgcaacctccacctcccaggctcaagttgtcctcctgcctcagtctcccaaatagctgggactacaggcacatgccactatgcctggctaatttttgtatttttagtagagatggggccttgccatgctggccaggctggttttgaactctcctggcctcaagtgagccacccaccttggcctcccaaagtgctgggattaaggtgtgagccactgcacctggccagatttatgattttagaaagctatttcagttaagattatgaaggatatattttatagagaaatgaaggcaataacactagtttggtaactatatgaaccactctaggcgagaactgatgagggcctaagctaaggcagttgtagaaatgggatgagggtgatgaaattaggaacttctttggaatctttgccatggtagtgtgttatatgctatacttaattaaataattaaatcattccacatattttgaatactactatgtgaaaagaattgtgytggggccttggaataaaagtatgaataaaaagggtttcctgtcttgggtgaacttatggtttagtgtagtcgttttgtaaagagagaaattacatgtaatgtgaaatataaacattatgggaacacagagaactatgtgattaattattgtaattattaatttcacattgggagatgacatttgagtggaatattagaggagttctgtgaaattctttgttttcctctcatgtatcttgaactgtattgaagacatttgtactgttttatgttgtatacctatccatctatccatttactaaacttcttttgttccttccaaaaaatgattctgtaatgtcaaaaggcaatgaataagtcattactgtaatgctcattctgggtaaaaagtactggcgttatttgtctctttatctgagaagcatattctccatgggaggtgatggaattcttcttttcactacatattgcttgttggtttctctctgtgtctccctttcccttcctttatttttctgaactatttctttatttattagggcattagcaactttaagtctacttttaagaatgaatgcaataattttattttattrtatgtcacttctcaaaggtaagaatggagacttacaattaaacaggatgaggccaggtgcggtggctcacgtctgtaatcctagcactttgggaggctgaggtgggcggattgcctgagctcaggagtttgagaccagcctgggcaacatagtgaaaccctgtctctactaaaatacaaaaaaattagccgggcctggtggcgtgcatctgtagtcccagctactcaggagtctgaggcaggagaattgcttgaacccgggaggtggaggttgcagtgagccgagatcgtgtcactgcactccagcctggcgacagagcaagactgtgtctcaaaaaaaaaagaggatttattgacccttcctcacacacaccatttattttctttctttcttgaaaccctcataaaatggtaagaagtaagaacagaagaggagataacagtggatgaaaggtttcagtaaatggaaagagtgaaggtcttcaaactgaagacgcaataagctgcttgcctgcggaggaagatatgttgagaagccccacagcaccttagagagatttgtgatatagagactccaaggttctctaagggcttaggtgaggtgtggtactgaaagtagattggctggaatatgatacaaagaatgattagttttgcagaatcctatgtagccaagtaactttccccttcatcctgcaggggtctagaagtttattttctggaagaattgaatagaggatactttgaattgaaggataccaagcatatcaggaggggatgaggtgcaggttgaaagtagattaaggaaaatgtaaagttataaatgtggccgggcgcggtgcctcatgcctgtaatcccagcactttgggaggctgaggcaggcagatctcttgaggtcagtagtttgagaccagcctgggtaacacagtgaaaccctttctctactaaacatacaaaaattagctgggcctggtggcagatgcctgtaatcccagctactcaggaggctgaggcacgagaacttcttgaacctgggaggtggaggttgcagtgagccaagattgcaccattacattccagcctgggtgattgagtgagactccatctcaaaaataatgaaataaaataaaataaaatagtaaagttgagactagccactagtggtcttgtgtgattttccaccagccagatttcagctacttaggggaatgtatgtagtaggtggatggttggatttagctagagttgaggctttgccagctgagactggaatataattccaatagaaaaacctgtaatattatttgtattagggttctgtaaagaaacagaaccaatagtatatggaggggtgtgtgtgtgtgtgtttaaatttattataaggaattggctcacacatttatagaggctgagaagtttcccaatctgctgtctgcaagctggagacccaggaaagctggtggtgtcattctgagactagagggccaatgatgtaagtcccattctgagggcagaggattgatgtcccagctcaaccaatcagagagaattccctcttcctcaagccttattttattcacgtcctcaatggattggatcatgtctggtcacactggggagggcaatctgttttattcagtacactgattcaaatgagattagctcatccagaaacaccctcacagacatacccagaaatagtatttaatttgagtaccccatgtctcagtcaagttgatatataaaattatctattattggacttgcctcacatattgaaaaactatatatatgatttgaccttgaatctatagagttaattttgtttaagaaaatctttaatcagctaggtattagaggagtggttactttactttcattctcattttgaccttggtttgtatttttattctttcatacttctgatatgacttagtcctttatttaatagatataaatctgtttcttagtgtcagtagctcttctcatttagagtatatcatagcatgtgcatatttttctagttctcaagacagggaaatcttttaccagtgattttcattctttattcttcattgggtcttggaaacttgaattttaggccttttacttattctcttattttttattaagcatatcattttcacatctgataatagaatatttgtaatgtcaggaaatttttcttgctgcctcagtttatctttaaaattaagtagtgttcattaaattatctccaagatacttacgtgttctgaaaatactatgattatgtgttagatattttatactgataatataatattcatagtcttagttttattctgattagcttcaactactaatcttgttcaaggctaaattaggcccttaaagaattttacattgtctctaagcagttatagttgggctaccataacttaatggatattgtcgtattttcacaagaaggaagcaatatttgaagagcctttgtcttttgcatgcatgcctgatagtgaaggttaatactgggttaatagatccattgcttctaagcagttggaggaggactggaatcaagagactccatttggagaaaaaaaacagtttggcaataaaaatcacaactggaaacttgtgaaactcaagaattctacatgtatagaaaaaaaatcacactagaaggacattcttgtgaagcagcagttttcttagctttggattcttggagggcctattataaggcaaattatatacttatgaattaacacaattaaagtcattgggtagaaagtgcctgctgttgatgtttctcactttgcattatccattgaaaataaacgtgcaaaaactcttcttcattgaaacatttaacttttggcctttcagacaataaaatgtctctgttgctaccttgtatgcaagccaggtctttgaatccaaaggtataattttatctactgtttcagccctattgctttcatttgtctggctatggtagatttatatgaagaaaatgagggcttattgtttcagcaagtgtaatgagcaatgtgtttttcctttaggatcaaacagagcatactgaatcagcaggactggctggtggtgcagcagacatcatgagtaagcaccgagaagtctgttccttatcacgtgtgtaaggggaaaaaggtaagaaaatgtttttatttctcttagagattgaacttgagaaaccaatgagatctatagaagataatgctgatgcatatatgttacttgcatcatttataacattgtgtcttattaaatcaggagtatgctttttttcaaaaagatttgacttaaattcagaggaaaagggtatttaaaaatcactgttattttgtgtcacartggtcacaatgttaatttccctcccagtgctggctccttcgttttagagtttgttgaccatagaaaggtaatttcagaaaaaatatggatttgagcaatatttaagctcatgcaagagctaaacaagtaaagctaatttggtgatggggaatcagaaatgtaaatttaattatgttattttattttgtatttttaggtaagttattatgtagagcaataatttccagcagaaaactggaagtattcttgtagaacaggaatccttgtctttttcctaactaggagtcatgttgttttttttcaagtcttaagattatttaagggtgtgaacccccaatatctgtgttggaaacaagtgcttgatgtagccaaaagaaacccgcacttagacagaaattttctcagcaaggcacttttacttctgcagaagggtgctgcttgyacctattacaaatgcaagagcacaccgaacaaaggaaggaaggggtttttaaccctaacacagttcctgtttctgtatcttttccctattggctagggttggattgcacaatctaagctgatcccaactagccaaggcttaaacttttccaaacagggtaaatgtgagatttgtgaaggggcggggtgggtaaagaagaaatggttagacttaacagaagcgggggtaggattgtttacaacttatgaccaggaagttgagtctttgaagaggaactcaagtcgtcccaacaatttcccctcttctgtcttacagttcttcatcttcagatttctttaacaggatctggctttgttgttcttcttgattatcaaggtgcgagagcttatctgagtacggagggggagaggttggggaggtttttgtgagagctgcttctatgagcctttgggttaacccacgaatacaaggtatgatacagcaaccgacaaggatgagtacatctttaacaattgcaagggaagtaaagattgaggtcatgagtcccttccattttccaaaccacctttccattaggcctgtaaaggggtcgtctattccagagtttttggctaattgatttgctagggtggtaaggccttgtaaggcttttatgattgtcccatcaggggctgtattattaggaataaaagtacaacactggaccgtgatcatgacatagactctgccttttttggccaacaccatgtcaagggttattctgttttcccagaccatctggctgatggggcctagtttcagcgattccttttatggcatctctggtataattgatgaattgctgctgattgtagtatatgtgatttatccagtctacgtttttgtttatagtggaccaccagaataagatagactcgaacctggcggctatttggttttgagctttgaattcatttggtaccctccgcaggaccctgatgctgtctatgtaaacttgagggtcaaaggacccatttattggggcttctttttttcttctggttacctgcttcctgatgaaatgccatggtgaaagccatggccagttgaatcagagcacaagtgccactccagttgcttggcagtgtaccaaatattggtcccccacaataccaccatacatcctctcrgggatggactagggctgactgattggttatctcttgaaaaggtttaggcccactacatcccatcaggtttccaaggaatgtcaaattttccccttgttgtgaaagacacaaggtaaaattggcatcgagagctggaagttgaatggcccttgggggctgtcccataggggtcctgacctttggggaaaatagtgagtgagtggcacatgacatgtttccccaggctgtggggtgctggaagagagctaccatacagtctttgcctgatggattggcccatccgagtgggaggggaacagtttgggtttctggcctgcctgttgcacaagcgtaacaatctgttttatttagggtgcgaatggaatatttaatcaattccagctaggcatttacatcttgataactggtttctatggctagggtttgctgtaaatccttaacttctactatagctactttggttttgtcagtaggcatgaagcgagaaatggtttgatttttgtggttttgggaagcgggtaatggggggagatggaggaggaggagcaaacctcatttcaaagatgcctgtagggtcttttgcagtgacatctgctcctaggccataaaggtgctctaaagtggggatagggtcagtggaggtggggataggaatagagagaagtactgggttacactggtggttttggcaatttgagggggtggttcctttggtgaagtggaggtagggttttagggcggtgcgaccctctgaggaggtccagccctgatatttcgtggtccagataatatctccccaactataacataacccctggaaggcttgtggtcgttgattgcaagggtcgggggtggtgctggtttttctggggatggggggcagaggtacttttctgaagaagctagctgtctttgactatggaggtttccacagggtatgacaagacaggcatcgaatgtaattgtggggagggtgatcgggttacattgataataaggtgtccttgggtagctaaaggaagaataaaaagacagattaaacctttttgaatgttagtttggagggtattgatcctggaatgatggtccatgactttgcaatggttgcggccccttttagcccagtgtggtgggtccatgcttttttggccgttcagattgctgtctcagtggttaggagtattagataaggagtattagataaggtccttcccaggttggttcaagctttccttctttccaacatatgataaggacgtgatctctgggctggtgtcggtgaattgggaattcgaggggtggagtttgcgctaggaggccttgagtcctgagggaggaaagggtggaagacagaccaaatatatatatttttagaaactgatcttttgtttcaaatgtgggaaggtcagtagtggaatttagataaggcagcccatagagcatttcaggccaagatcttttgtgtgtgtgtgtgtgtgtgtgtgtgtgtgtgtgtgtgtgtgtgtgtgtgtgtgtgtggcagagtcttactctgtcgcccgggctggagtgcagtgatcttggctcactgcaacctgcacctcccaggttcaagcaattctcctgccttggcctcctgagtagctgggactacaggcaccagccaccacgcccggmtaatttttgtatttttagtagagacggggtttcaccatattggccaggctggtctcgaactcctgaccttgtgatccaccctccttggcctcccaaagtgctgggattacaggtgtgagccaccacaccctgccaggccaagatctttttgaggggcagtttggattcttagtaaggcaatgggaaggcattttgtccatggtaactggatttccaagattaatttggttaggtgattttttagagtttgattaattctttctaccctccctgatgaaggtggatgccagggagtatgatattcccattttattcctagtgcttgggttagccccttaatgatgtgtgcagtgaagtgagtctcattgtctgaatcagtgttctctattagtccaaacctggatatgatatgttccaacagtgctttgactacattactggcagttgtgcttgggaagggtatggcttctacccagtgggtgagatggtctactatgactagtaaatacttgaggcagccgattgggggcatttcagtttaatcaacttggatgctttggaatggccttaaccctgggtttcttcccgtgggaggctgcttctttagggtttccttactagtttttctgcacatgatgcaaccatcttccacttgcctagtactctatacacccatagactctgagggctacattgcacatagcttgaggaccccagtgagttcctggatgaagctgtgacaatatttccctcatgaggggcttagacagcatttcccttccatctggtaatgcctgctttccctctgggctctcctgagctcctattttctttagagaaaggtctacgtgggagaagatggggatcgcagctggagggggaracaaagggatagatggaaaatgggtgccttttcrgaagaggcagcttgcttagctgtttgatctgcaaggttatttccctggctttcaaaagatggattcttttggtgtcctgggacatggacaactgcaatttcttctggcagctgaagattttctaatacttgcaaaattaattttttgtggaccaaatcttggcccttactattgatgaagcctcgttcagtccagatttttccaaaggtatggactactctgaaggcatacttggagtcagtgtaaatagttccttcttgattctgcagggattttaaggcttggtttaatgcaaagaattcacagtttgggcagaccagttatttggcagtcttcctgactctacctctgtgaggatttccccatcaactgtggagtacctgttgtacctttttccttcaatgatccggggggaaccatctgtaaagaggtgatgccctgtttggaaaggggttttgcttagatccagtctgactctagtttgagaactgattagatctaagcatttatgcgtagattcttctgggtttggatttcctgttaggaaagcagcggggttgagtgaattgtcagtggttagtgttaggtcatccctctctaataagataacttcatattttaaaattcttgagtcagtaagccatctctctgccttctgattaagaatagttctgacttgatgaggggtacttatgatgaggtttcccccaaaggttattttcctgctttcttctgttagcaaggcagttgctgctatggattggacacattcgggccatccacgggttacggggtcaaggatttttgacaggaaggctacgggccattggtggcctccgtgtttgtgggtgagtactcctaaggccactcctttgcttatattaacaaaaaggtggaatggctgttctaaggagggcaaggccagaatgggggctgttacaagtaggtgttttatttcttctacctgttggatctctgatggggtcyagaggagggtttacagggtctggtctttcttgagtgagtttttgatataggggctttgtttttaaggcataagagttaatccacagatgacaatatccaaccaatcctgagaatttcctaagttcctgctttgtttcaggtaaaggcaaagataccataccttcaatttgtttgggtcctatctttcgtttgcctttactgattaggtgtcctaggtatttcacctcaggttctacgaattggagtttattctttgagacctgtaacccttgttcccttaggaaatttaggaagttaactgaaattgctgttacttgatccttgttatctcctgagatgagcaggtcatccacatattggagaaggcatatggatgaaggcagggagaaattttctagaacttgttctaatatttgaccaaatagatctggggactctgtgaacccttggggcaagactgtccatcagtactgttgttttctatcagagtcagggtcctcctactcaaaggcaaacatgtcccgactatcttctgctgaagggcaagcccaaaaggcatcttttaaatctatcaccatgaaccattggtggttgtatgggattctactgacaatggtgtaaggattgggaacaacagggtgggcggtttgaactatttgattaatagcctggaggtcttgcactagccgggatgacctgtctggcttccttacaggcaatattggagtgttataagggggcatacagggttcaaggagtccatcgtggacaaggctttcaattatatgttttaaacctatcctggcttccaagggaatagggtattgttttgtttttactgcttccctggtagtttttaatttggcatggattggaggaacctgtagctttcctcgatttccttcctttgaccatatgtcgggatggatttggctttcttccgaagtggtgaccaggtttaaggaagtaagttttccctgattaacgtataggcctatgcctaaccttaacattaagtcccttcctaataaattagttcctgctttgggaattaataagaacttagtagtggccgacttattcttatatttgactttggtttcctctagaatttttgccctgaatccttcccctataaaccctgagacagtatggttttctgctgaaaatgctaagcctgatgggagaaaacatagggaaagcgagctgctcctgaatcgactaagaaagtgactatctctgatttgggtcccaccattaaatttatcaggggctcttggtgggactcaagatggaagatgtagagtacctgaccccgctattcttcttcaaatgtcatgagtggaaggactttcttttccctctcccattcaggacattccctcttaaaatgtcctggctttccacactagaaacatctgttttcccttctccccctccctgttccctgactctcaggtttcatccctttgcttcctgtataggggtcagacagccaggtgcttagaaggtctacaagttctattctcctgggctccctgttgaagagttccctgttgtagggtggacaggcataatctttgccttttgcttctgcctttcctcatccctctctacatacaccttttgggcctcttaaaagttcctctatgggatggtctttccaattttctatcttttgtattttttttgtaatgtctggccaactattggtgacaaagtggagctttaacattccttgtcccagtgggtcctctatgtctaaacctgcatattttcttatctgttccttaagtctaagaattctatgggcctttcatctttcccttgttgtacattaaatgctcaggaaacattagggttcaaggagctgattcccaaatccctttaattatcatgtccctgagatctctcatgttttctcagtgggcttcattattgttatcccactgagggtcctgggccaggaatttatgctctgctgcaaggacattttgaacaggagggtgtttgcgctcccagactatcatggcagccctgaagatcatggttctttcctttcctgagaagagaataactaggatagacattaattcagcccaagtgtacagttgtggctccagagactgtccagtttgatctgcgaytccaaaagggtcgtctaacagtggtttgagttccttttttagatttctaacctctgaactagttaagggggcatttacaaagccaatatcccctcctcctagtggtacttcccttaagggaaaaagggttggggtagacttctttgaggaagggaggaaaggaaagttttggatatccctttggcattgtctatttcccattggagctttcctgaggaaggggcatgttcaggtggctgtccagcggggatgtggggtggcatggcccatggggcagggttatatgggagaggaactgagtgttcagcttggggtggaggggtagggaggggaaggactgagtgttccacttagggtggaggggtaggcaggggaaggtggtctagaggatcccatgcatctttagatacagaatttgacttaggtaggtcgtctttgggaggtattgaatttggctttgctttctcatcctttaggggatagagaaggacaggtctttttctccaacatagagcatcatctgtctcctcttgagaaactggacttttatcattgacttactggatcaggagttgacatatccagtcctcattttacccaaactctggccaaaagactgaaggtctgagggtgggttccttagtccaaataaaaacagcaatactttatcatacgctgtcttttcttgtgttttgtcctttcattatccttccagtattttaacataaggcataggggactgtcagggggaattttattgtctgcttggccttttatagtccctgtcttacttggggtatttcccatcctggcggttggtgaggctaaatgtctcgtattagagatttcttgcactcccgtgtcctagaggctgaacctccccttttcccactggaggtttcttgcactcttgtgagcacccactttgtccttattggctgcttccctcgtgagaattttaggttcctcttagtattggtgggttggtgtaatcccctgactggaaaactgccctaagacctacaaggtgaccacagaaccgagtccggactccacactcgcttcgcacccaatggcgtgtctcactcacacactttcaacctacagagatcccaaccaccaaggaatactttgttgccccaatagtgacgtttcttaccttggtctatgcacagagttatctggtcactgaggaattcttarggatcctccctatagcccatgttgctgagagtccggatttattcgtcactttgggcgagattcgatcctccactcctggggccaccacaacgaggcagtgggatgcgtctccccatgaaagataatcactagcccctcccaaaggagaatgggatcctggacaagcccccagatttgttggaaacaagtgctcagtgtagtgaaaagaaacccgcatttagaagttttctcagcaaggaactttacttctgccgaagggtgctgcttatgcctgttacaaatacaagagcacaccaaacgaaggaaggggtttttaaccctaacacagttcctgtttctgtgtctttcccatgttggatgggtcggactgcacaatctaagctgatcccgattggccaaggcttaaacttttccaaatagggtaaaagtgtgatttgtgaaggggtggcggtaaagaagaaacagttaggcttaacagaagaaggggtaggattgtttacaacttatgaccaggaagttgagtctttgaagaggaactaaattgtcccaacatctgggacaggtctcagtttatttagaaagtttattttgccaaggttgaggacacccaagaggtcctgatgaagcaactgtgttgtctgaggtatacacccaaggttcatcgtcttgtgccaggaaaatttaggacaccgacacacacgaggagtttaggagcagaggtttaataaacagaagaaaggagaaagaaaaacagctctctctattgagagagacgggtcttccgagggaaaagactggcaggtggtggatgcgccggattttatagtccagcttgaggaggcggtgtctgatttatgtagagctcacagattggttcgatcaggtatgaagtttacatagcatgcagggaaggctggttgccccaccctaatcttattatgcaaacgaactttctccttggcaggtgccatcttatctgctccttactgtacatgtggctggcagagaagggaagatggagcctccatcttgagcatgtctagtccctagttcctgctggcattcacccgtgcaagctcccagcttycttgtctgtgtctgcagctcgacttcacagactgctctttgttagaaaatgatttccagcctggccaacgtggtgaaaccccatctctactaaaaatacaaaaattagccgggcatggtggcacaagcctgtaatcccagctactcgggaggctgaggcaggagaatcgcttgaacccaggaggcagaggttgcagtgagccgagatcatgccactgcactccagcctgggtagcagagtgagactctgtctcaaaaagaaaaaagaaaatgatttggggctacttttcattaaaaagaaaagccttactgaggactctcgtacccttactatctgcctaagtgatttcttcttaactcctgtatcactgacaacacgtgcccagggttctcagagcacaacttggttttatacattttagggagacatgagacatcaatcaacatatgtaagatgaacattggttctgtccggaaaggcgggacaattcaaagcaaaggcaggactactggaagcagggagtgggcttccagatcataggtagataaaagacaaatgattgcattcttttgaatttctgattagcctctccaaaggaggcaacagatgtgcatttatctcattgagcagaagggtaactttgaatagaatgggagggatgtttgccctaagcagttcccagcttgacttttccctttagcttagtgattttggggccccaagattttcctttcagaaggggtagaaaatggtggagggtatataggtgagaaaggttacaaaaactgattacactactcactaatggaatgttgcatactctggttgagttatctgacttttccatgtaagctgtaaggaaaggcatggtgggaccagcagtgtttaataggaaactgagccacttttctcttcagttgagggtggagcagaggtacttggcagcaatgccttcttcaccaaaactctgagtctgcagttggcaagctatttctcctcctttagccttttcacatgggagtgtgagaagatagtgccctcttttctgccttcacttgccaaaatctcatccttcaggcgttgcctctttaggaagtttccacccattgtagcaaaaactatcagttatccaccaaagtcaccaaaatccatttttcccttctgtagtagccacagctgtgatgtcacagtccaatcagcctttgcagctgtgtattcaccatcacagttaagatacagcataattctatcaccacagagatccttattgctactcctttgtagttgcatgtaccctctcccctgactatccaatatttaatgactttttaaagttaaaaacactgttaaaactcataggaagagctgggttagcataaaggcaaaccctagtatgttcctggatgagaagacttaatatcattctttctcctgagtgaggactaggttaggaattctaatttctcatggtttattttattggcactctattccatcctgctccattgctgagtcttgggaccatggaggggactttttctgtagctcctggcttcatgtagaaagctcagtttagcccctctggtgcataaatttctatgtttgcagccagtaattcttattcttcctgctacctttcaaaacccaggcttaaaggttgctgtctagttttgatactcctatggactgccactcttcagttcctgctttccttctaggtttatggcatctgtgtatttccctttcttgcttttgaatttgactgtttaaactcttttaaaatattttatttagaatttttttatttatttatttttgagacagggtctcactctgttgctgaggctagagtgcagtgccaccatcatggcccactgcaacctccgtctcctgagctgaagcaatcttcctgcctcagcctcatgagtagctgggattacaggcatgtgtcaccacacccagcgaatttttaaaattttctgtagatacggagtctcactatgttgtccaggctgatctcaaactcttggcctcaagcgatctcacaccttggcctcccaaagtgctaaactctttaaaataattagttttgtctagaatttttttatttagagtaggaaggaatgtttaccacccatcagctcagtgtgcccttttttcttttaagaaatcttaagcctgcagaaaaatggaaagactagaacaattaagacccatatatccttcagctagagttatcagtttttaccattttgtcccttttgcacacctttcttcccttcccacacatatactctcacatcatttaaaagttagttgcwgacaacacaacrcttcttccctaaacacttcagcaggcatctcctaagagaacaagtaagggcattcccctacaaaatcagaatgccattatcacatctaagaaaatgataattaattcaatgtgtcacccaatgtatcgtccatatccaaatttcttctgagattgttctcaaaatgttaatttatgctgtgtgtgtgtatatgtgtgttttcttgatccagaatcaagtcagtgcctgacacttggttatttaatattttgtctgttctagttgagaataatcttttttcctttttttttttttaaagacgaggtcttgctctgtcacctaggctagaatgcagtggtgcagtcatagctcactgtaacctcgaactcctgggcttaagcgattctcctacctcaacctcttgagtagctgcaccaccacacctggctaatttttatttttatttttgttgatgttgcccaggctgctcttgaacttctgggctcaagcgatccaatcctccacctcagcctaccaaagtactgggattacagatgtgagccactgcgcctagccacatataatattttggaaagttcagatcagatacagaatgtctcacattctagatttgtcttattgtctcctcatgattaaatcggctaaatgttttggcaagaatactgtataggtgatgttttatatttttcattgcatcatattggaaagtgcataatgtcagcttgttaaactgttgtggtggtactgagttaaatcatttggctaaggtgatgatttctatatctcttcattgtaaacatacatttccttctttgaaattagtgatttacctgtggaatgataatgtgaggtactgtgaatagtttcttccccaataataatttacttaatagtttagcatccatttttgatgcttgtttgaatcagttatcgtaactggaattcagtacaacttattgaccagctgcttatacactgttcatttattcattctgcagttattaattgaaatagataccacattagcacatcaggctctatgtgaatcaccaggaatacatggtgaacacagtctggtgggtgcccttgtggtgcctacagtctggtgggagagattgacaaataatcacactgatgtgtatttatagatggtgataaatattttaaggaccaagaatggggtgccatgagggattgttgttgtagaaaaagcgggttcttgtcaaacaaccaggaaagattaggctcacagacacttttttttttttttttggagacggagtctcgctctgtcgcccaggctggagtgcagtggtgtgatctcggctcactgcaagctccgcctcccaggttcacgccattctcctgcctcagcttcctgagtagctgggactacaggcgcttgccaccacgtccagctaatttttttgtatttttagtagagacggggtttcaccgtgttagccaggatggtctccatctcctgacctcgtgatctgcctgccttggcctcccaaagtgctgggattacaggcgtgagcctccgcgccctgcctaggctcacagacactttgaagggtgagggggaaggcaaaaaggaaaaaactcagcaaagcgagaggggttcctgttaacaggctcccatctcacagattgaatcccatgttaccacacaggaacaggagaggcaaacggagtgaacttcccaaggccccaccccgtcctcccagtgtgcagtgcgcaggtgggcatccagaaagaatcagtcaaacagggaggtgaacaacacacaccagggcctgttgcgggggtggggatcgtacttagaggatgagtcagtaggtgcagcagaccaccacagcacacatatacctrtgtaatctgcatgttctgcacatgtatcctggaacttaaaaaaaaaaaaaaaaagaatcagttggaaaagggcaggcttcatccaggatgggcaatttggtttttcagccctcatgctgttttaaacttgaaggtggggttttgctggggtacccttggctgcctcctgtctctatctgtccccttataaggggagccatcaccttttctgggggttcacataacacttgcctttgaaagtgatatttgagcaaagagatcaaatgaagaatgatgaacttaaataacctcttgaacttctgtactagttattctgtagcacttatctgttaattttatctgacaggttaatcacttgctgtctcctgtgctgttattaaaatcatttattatttaaattttcttacttagccttgtttactgttgactaaattataagctttataatgttagggatgatatctgagacttgattacagtatagatgcatatagtagatgcagtaggtaaatatgttaatctgattatttgtttactaatatttttataatgaccataaaatgctgttaaatattgtaggtgtatattgaatgtgtcagattgtgtgttgtgagaaatttcatttgctcttagcattagtagacattaaatgtgcaacctatctgaaatggcatgcatataaaaatgattttgacctataaataattagacaacaaagatagatatttaaaaaaattcatagattatgggctgggtgtggtggctcatgcgtgtaatcccagcactttggaaggctgaggtgggcagatcacttgaggtcaggagtttgagaccagcctggccaacatggtgaaaccctgtctctactaaaaatacaaaaattagccaggcatggtggcacacacctgtagccccagctactctggagggtgaggcaggagaatcgcttgaatccaggagggggaggttgcagtgagctgagattgagccactgcactccagcctgggtgacagagtgagannnnnnnnnnnnnnnnnnnnnnnnnnnnnnnnnnnnnnnnnnnnnnnnnnnnnnnnnnnnnnnnnnnnnnnnnnnnnnnnnnnnnnnnnnnnnnnnnnnnnnnnnnnnnnnnnnnnnnnnnnnnnnnnnnnnnnnnnnnnnnnnnnnnnnnnnnnnnnnnnnnnnnnnnnnnnnnnnnnnnnnnnnnnnnnnnnnnnnnnnnnnnnnnnnnnnnnnnnnnnnnnnnnnnnnnnnnnnnnnnnnnnnnnnnnnnnnnnnnnnnnnnnnnnnnnnnnnnnnnnnnnnnnnnnnnnnnnnacgaggtttcaccacgttggccaggctggtctcaaactcctgacctcaggtgatctacccacgttggccttgcaaagtgctggaattacaggcatgagccacgacgcctggccgggtaaatacttgaataagtcagttaaattccctgagcttgttttcttatttgtaaaatgagggaaatatcattgacacttatatacctcagagaagaagaaacactaccttagtaagtcaaagaaatttcatcacttattatatttgacttaaagtttacaaagacagcctattacatttctgattttctctgtttttcatgttttccttactcagactttttggggaatttgtaatttgacctcccctgcctgtattatatcaataagaagccaagcagaattttcagtttggaaagaaaaatttgaaacactaaggaaataggtgtggagatcatggtaatggatggaaaaaaggagataataggtagcatttacttaacacctattatgtgcccttagcatctgttaagtcattgacatacctagtgtatatgcccaaggatgcttttggatcgattaacattaaagaaatggtttagaaatggtactcgaagagggttacaagaataaccaggtcagggccaagtgcatggctcatgcctgtaatcccagcactttgggagactgaggtgggcggatcacttgaggtcaggagtttgagaccagcctggccaacatggtgaaaccctgtctctactaaaaatacaaaattagctggacatggtggtgcttgcctgtaatcccagctacttgggaggctaaagcaggagaatcgcttgaactcgggaggcagaggttgcagtgagccaagatggagccattgcactccagcctaggcaacaagagtgagactctgtctcaaaaaaaaaaaaaaaaaaaaaaaaaaggaataaccaggtcagagtcatcattagcattttggaactagtatccgttactcctgtacttaaacttccctgwcatttcccatttgaaaaaaattctgtaagcttcgttctttaatagaaacacaattttataccaaacaatgattcctttcccagcatctgaaatgtgtctgttgaagcatgaaatgatcaccaagtcagccttttatatttagttatattttgttrattgtcagcttacaggtttttagaatttattagcttaaakatcttataatayatccagtgggatgccaggttttgtagtttaccattatctggaaagatttataagagattttatccttgtgtatatacttaagatttataaattatattttaataattcaaaatgtaatacrcatttactttttaggtttaaacaagtctcttaagtggtgtttcctcaccgatggagaattacttccaagcagaagcttacaacctggacaaggtgttagatgaatttgaacaaaacgaaggtgagaatttatattggtgaatctgtttgcctatgtggtatagagaatgtggggatataagaggatgtagtatttaaaaaaataaaatcaggtctgatgacttaatgatagtaatattatttaataatatacaggggaagaaataacattttttagcactaaatgccagatacttaaaatcccacagatcttattgccattttatagatgagaatagaggcacagagaggttaagcacttttctcagagttatcttgtgaacaagtggcaggattagaatccaggcagtgtgacactagagcctgagctttactgaactaccctatacaatgaatgtatggtcaagaaatgtgcttgcatttcctaaactaagaaaaatagctcgttctatattgattgcccaataaagtaaagatacatttaaaactatttacatcacaactgcctaagtggttaattatatattctcaagcatcagtagaaatgtccacttaagattcacttcttttgtttgtttgttggttggttggttttttgagaaagtcttgctctgtctcccaagctggagtgcagtgctcactggaacctctgcctccctggctgaagtgattcccatgcctcagcttccagagtagctgggattccatacacccgccaccatgcctggctaatttttgtatttttagtacagaaggggtttcgccttgttggccaggctggtcttaaactcctggtgtcaagcagtcctccctcctcagccgcccaaagtgctgggattataggcatgagccaccacgcctggccaagattcacttctatttagggaagacttttctctaaatttccatcttggtttaacttgagtgggtaagccataattaaatttcttcctcctcaccgttcttcccctgtgttctctatttctaacaggaaatggcattaacaagtttacaaagtggtatatttccatccaaagtccatgattccagtccaggcaacatgatgaaaccccgtctctacagaaaatacaaaaaaaattagccaggcctggtggcacacctgtggtcccagctatttgggaggcaaaggagggagaatcacttgagccctagagatagaggctgcagtgagctgtgatcatgccactgtattccagcccagatgacagagtgagaccctgtcttaaaaaataataaagcccatgatttccatattggtttacaaacctttgctatattcagtgaatcrggctattctttgatagcagttgggaagacagattagttttgactttgttactttagatatttaatgctctccagccttaaattgaatatggaatcatgacaggaaggaagagagagaggaaggctaccagagtggcctgcttttctcatattttaccattgatgacctaacactaacctatattcctaggctcattcctggttcatgtaaatgtgaaatctaatcattggggttttacatcatccaggtgggctttgtacataccaggctggaaggtatattattttctgagtttcaactgtttgtataagtattttcttaatcttttatttgatttagccctctgtgtatcacagttctttgagtcataaggtacttagacatgtattacacctaatcatgtgaatactatgcttctagaataccactgactctaataaaactcttagttcattacatttgtctctttgtgacttctgtagattctattagggtgctttgtgtatagttgttttcaatacatttttgttgaatcagtaaaaatattttagttaaaaaatagagcaattgcttacagaataataactcctttagaaggagaaggatttctgaaaccagcttcttggttgtaactttgtggttcatttgtttgaactatttttttgaatctcactaccagttgcattaaaaactatcacttcaagcctcgtgttatcttagagaatatacttaaaatgatttctcattttgtgttaatttattttctcatttaaatgaaaaaatataccacagactgtgatgacactgggcaatcaacattatgcccaggtaggaggcagttgaataatgaaaattttaatacccgatcatttctgtttgaacattgctaaatattcttgtaagaagctgtaactatttttttgtttccaggaaccatattggaaatatgacttatttgcttttttttcttttaaggaatcctgtgttactaaatttcaaatctctactggttcaaatttggtaaattcaggatttgacatttcagaggatactaagcccattcttcacacaatctgagttttgtgccctttttaacaacttttcactacttctttacactaattcttttctcaacccaaactgatttacttattgcttccttaaattcttatatttggggatatgcttttctttattcctctatttattaatgctttcttttccaaacttacataaaactgtctttgaagcatagcccagttcttcttgccttcatgaattcaagctcgcttacctcatcctggaaaatatctgtctcctctgaatttatttttctactcctacataatagttttcagacactgagtcctcacttgatgtctttgataagttcttggaaactgtgactttaagcaaattgrtacactgtatgccggagaaccttaactgttgtttatatcaattagcttatagtaaaattggcttctttatacagtgagttgttttgcttataattgcagtttccaagaacctatcaacaatgttaagtgaggacttactgtacctatgctactccatactgctaattagatgtttgtacgtgtctcttattctcccaatgagattatatacttcttagaggcaagagctatcatttaatcttcatgttcctcaatcctgctgcttttactatggtagatattcacttatatatttactgtgtatgttctacctatcaggcactatgcaaagtgaggacttatattgatagaaatgatttctgccttcagaaatcattcagtggttgaaagagaagggtagataaactattgcatttcagtgtagtaaatgccttaataaagttttgattaaggtgctgtggacacattgaagattaatgttacagatgaggattgagcttacaaatatatctgcataatttcaggaccatgattatcagagatactggaggaagaaagcaagaaaggcactgagtgcattgttccttatttctctaatttacttagacatatgcagtagccctataacttgagagaataacttagccattgtagttatgatctgttaaaaagtaaacagaaacattatatgaaattatgcttattggtagactataagaatgttgatttaatatgataaatgaacactttttgcccagtgtcctcagataataatataaatatgaacctgattaataatgtattgtgacatggttacaagcagaatttcacgtactgtggcaaactttttttaacatgtgttgggcaaatttaaaatatttttaagtaagaagtataataaaccccagtgtacccatcatccagctttcacagcatttcatatgctgccattttgtttcatttatacctttatcaccttctcactccctgcttcattcttattttttttaacagctttttaaaaggtaaactttatatacattagaatgcatagatcttaactgtccagttttggcaaatgggtatctctctcaaacccacatcctaattatgatacagagtgtagagcattcagtctctacagaaaacttcattttccttcctgcttaattagttatcctagccactgttctaaattttttccatctaatccattagattagcacctgtcctggctttgctcaatccaagggtgctttcccctcttctgggtcccattcacctgtgggtcagtttaattatgttactagattgaggtagaattcttttgttgtttggaatagtctgagatattaccatttggtgacatataattgcagagaattgtctgaaatatattttcttattttttagcccygaattagaaatctaatatccttggaatatttaattttcaaacgatagttagaaatgttattaacttagtcataagcttttccagtgttacaagcaaacttattgtaattacttatttttttccagatgaaacagtttcttctactttattggatacaaagtggaataagattctagatcccccttctcaccggctgtcatttaaccctactttggccagtgtgaatgaatctgcagtttctaatgagtcacaaccacaactgaaagtcttctccctggctcattcagctcccctgaccacagaggaagaggatcactgtgctaatggacaggactgtaatctaaatccagagattgccacaatgtggattgatgaaaatgctgttgcagaagaccagttaattaagagaaactatagttgggatgatcaatgcagtgctgttgaagtgggagagaasaaatgtggaaacctggcttgtctgccagatgagaagaatgttcttgttgtagccgtcatgcataactgtgataaaaggacattacaaaacgatttacaggattgtaataattataatagtcaatcccttatggatgcttttagctgttcactggataatgaaaacagacaaactgatcaatttagttttagtataaatgagtccactgaaaaagatatgaattcagagaaacaaatggatccattgaatagaccgaaaacagaggggagatctgttaaccatctgtgtcctacttcatctgatagtctagccagtgtctgttccccttcacaattaaaggatgacggaagtataggtagagacccctccatgtctgcgattacaagtttaacggttgattcagtaatctcatcccagggaacagatggatgtcctgctgttaaaaagcaagagaactrtataccagatgaggacctcactggcaaaatcagctctcctaggacagatctagggagtccaaattccttttcccacatgagtgaggggattttgatgaaaaaagagccagcagaggagagcaccactgaagaatccctccggtctggtttacctttgcttctcaaaccagacatgcctaatgggtctggaaggaataatgactgtgaacggtgttcagattgccttgtgcctaatgaagttagggctgatgaaaatgaaggttatgaacatgaagaaactcttggcactacagaattccttaatatgacagagcatttctctgaatctcaggacatgactaattggaagttgactaaactaaatgagatgaatgatagccmagtaaacgaagaaaaggaaaagtttctacagatyagtcagcctgaggacactaatggtgatagtggaggacagtgtgttggattggcagatgcaggtctagatttaaaaggaacttgcattagtgaaagtgaagaatgtgatttctccactgttatagacacaccagcagcaaattatctatctaatggttgtgattcctatggaatgcaagacccaggtgtttcttttgttccaaagactttaccctccaaagaagattcagtaacagaagaaaaagaaatagaggaaagcaagtcagaatgctactcaaatatttatgaacagagaggaaatgaggccacagaagggagtggactacttttaaacagcactggtgacctaatgaagaaaaattatttacataatttctgtagtcaagttccatcagtgcttgggcaatcttcccccaaggtagtagcaagcctgccatctatcagtgttccttttggtggtgcaagacccaagcaaccttctaatcttaaacttcaaattccaaagccattatcagaccatttacaaaatgactttcctgcaaacagtggaaataatactaaaaataaaaatgatattcttgggaaagcaaaattaggggaaaactcagcaaccaatgtatgcagtccatctttgggaaacrtctctaatgtcgatacaaatggggaacatttagaaagttatgaggctgagatctccactagaccatgccttgcattagctccagatagcccagataatgatctcagagctggtcagtttggaatttctgccagaaagccattcaccackctgggtgaggtggctccagtrtgggtaccggattctcaggctccaaattgcatgaaatgtgaagccaggtttacattcaccaaaaggaggcatcactgcagagcatgtgggaaggtaagttgcatgtatacrctcagaaatcgggcatgcacattttgtaatgctgaattaaatagtaataaaggcaatgtaaggtgaatatatgtctggttgagttgacctaaatagcatttttgaaaacccagttctagtaaatttctatataaaaaatgaygtcactgattcttagatagtatttgtaattttttttgttgccacgatttatgctgaatcagtttttatgaagagatgagaattgaggaagtgtaaactttgtggtttctgtattgatagctacttggttaatgtaatagtttgaaataaggaagttattctttcagtttaggaaatatttgtcattaacttattgcattatttattgaaaaatgcatttaaatacaaaaaataaaaataaaaattacatttaattgttgaaaaatattacacatagaatccatcctacttttttctgtgagatttttgccattatacaaaacattctggaactctttatacacatgcacacatatttttgtcttttctcccatataactttgatacaaagtagagttgaagtctgtagatttttatgacaaggttgtaagaatgatattccttagctctccccaaattttgttagctaaaaacacatcttttttgtttgtttgtttagagttgtaaataaggaaggaaggagattttatatttttgagatatggtgtcaggtctagaataaaatttcagctttgttactattaattatataactttactaagccttagttttataatctgtaaaaacaaaccaaaaaagattaataacttttattgggctgttgtcaagattaaatgagatctcagaagtcatagtgctcaatgattaatctctacctcccttcttgcctgattttttggtccatctgtattaattagggtgctttcaacttcaaggaacagagtgtttgaccccccagtgacttaggtgaaaataacatttatttcatgtaaacagaagctatgagactcagtgatttatgtctgggtgcagagacaggatcgtggaagttctctcggtcttcccctcatgtcagaagatagtatctcagttctaattatcgggtctcaacctgacaacttcctaagcacaaagaaactggctggggggcaaaagagcctactctactcttggcaccctcttatcagggaggaagggacctccagcaacttcctttaatttattggccaattttagaccataaccaattacaggcaaaggggactgggattatctaatcaatcatgatttatctcctggggctgagcacagtgttgcctgaaaaaaagtgggattctgttaacaaaggagaaggggaagtagtgatatgtaggatgagtaagtctagacgtctaawgtactacatgaggactatgcataataaaatcatactatatttgggattcttgcaaaatgagtagattttggttcctcttgccacaaaaatgggtaactgtgtgagacaatagataggttaatttgcttcactatagtaacctttttactgtctggatgtatctcataacatcatgttgtataccttaaatgtatacaataaaatttattttaaaaaaaggagaggaggaaaatggttcctaggtgagcagtcactaaggtttactagaagatcctagcacaaaagaaccaaattacagggagcagaaagaagctaaagctgacactgggcttgttggtctctgattgctaaagtttgaagaaaataatatgtctaattcctaaatattttccagtcttcttcttgttagctgaagtactatttgtagattaggttcatcatttttatgttgttctgtattttgcttactgtaacactttctgaartgtttgctttcttaagtaaataatgaaaacatttttggtataggccagcacatccagctataatgagtaaataggtaccttagatggattcagaaagaaaatgatgcacaaaatgcatcataaattgcaaaatggttggaatttttgctgagtagaatttgtggaatttatgaattcatggattcatgtggcttatggattcataatttcatctttttccctcgtttaccttagagatgttataagtattaatgagataatatctgtaaaaatccttgagcttctcagaagaaaagggcttataaacatagatactaattggattatgctgagaatgcagctagaaaaataccccaaataatgttatatattgaaaaaaagaaagtttgttccatttcagtagaaattaagcatacgtagtaattacttaatatttatagctatattccctttactgcaacaagcatatattgtgtctaatatataaaaggttctaggctaggtaatggggattcagaggtatataaattggaatttatgatgtcatggcaatctttttttttttttttttttttttgagacagagtctctgttgcccaggctggagtgtatggcgtgatctcagttcactgcaacctctgcctcctgggctcargcaattctcctgcctcagcctcctgagtagctgggaccacaggcatgcsccaacgggcctggctagtttttgtatttttagtagaggcggggtttcaccatgttggccaggctggcctggaactcctgaccttaagtgatccacttgccttggcctcccaaagtgctgggattacagacatgagccactgcgcctggccaatctactgactttctaattatgatttcatttatgtcttatctaagtttattatttgtttttgyaattcagttccaagcttgatgagggtaaggattttttctgccttgattgctgctgtatcctcagccctagaacatacgggtgctcagtagatatttgttagatgaattaaacaataagtgaatactgtttcttaatgcagcagtactttttttttttttaaatccagtgccttcaatctttagatgatggtatcaaatttagatataacgggtgtaagaactttggaaaatattttaaattagtcatgtgtattgttcctacttaagaacagattcaaaccaaaatgtttctttccctagtttcttatgtactgatgggaatgaatagatatgagagtagtaagtagctgctttagaatattacatggcaattcacagtttccctcatactttgcatgaaaatctgtcttgccttgtaattgatattgtgattttagccatctggcatgaaaaaaacagaaccaacatttagattaatcttggtttctagtgaagctgaacccagggaaatattttccattacacaccctctgaaaggctgtattggttaaaagtggtctcatccatgtcatagcacttatcatgcagtattgtctttgtctttgttccccattaggctgtaaagatcttgagattgcctctgatttgtctttgtatccagcatccagcacaaatacctggcacctatgaagtactcaataaatgtttgttaatgagtgagtaaatgagtctcagatcattgattaattcaacaaacactgagtgcctgttatttgtctgtcactgtgctgggtgccgagcttacaccaatgatgttgtgctccccaccctcatggtatgtaaagattaggccagtgacaaaaacaaaacaaaacaaaaaaacatgatttgtggcaagggcgatgaaggagataaggagggataatataaaaaatgggggtgggagaagaaggtatgagaagacatctgagaagtgacatagttcaaggttgacacatcaaggttgacacataaaggtggaggagtcagttcttcaaagaacagagaaaaatgctgcaggaagtagaacagcatggacaaagtcattgaggttaagaaggcacctattcaacaaactgaaggaactcctgcaggaagtagaacagcatggacaaagtcattgaggttaagaaggcacctattcaacaaactgaaggaactccagtatagtgaacgagggaagagtcacataaaaagagatgggaaagcaggtggggtggcacaggcctgttgtcccagctactccataggctgagcatgttatgatcatgtctatgaatagccactgtactccagccagagtgacagagctgagaccccatctccactaaaaaaaaaaaaatgctgatgaggaagttaaggaatagatgatgcagagctttgcaggtcatgtaaggagcacagtgggaagccatgggagtggatgagattaccaagggaagagaatagactcagggctgagcccatgtggtcaagcagaggaggacccagtaccagttgccaaggagtgagcggagaggtaaatagaaaaccaggaaaatatggtctcttggaagtcaaaagaggaatgtagtttgtgaaagggtttatcacctatataaaatactgtcagtaagatatggacaggaaagggaccattggacttggctataacagggtcattgaaaaaagctgattgagtggagcaatgtttacagaagccagatgggaatgggttgaaagtggaatatgaagggaggaagtggtgatggctttttcaagaacttttgccatgaaaacagaaaaaaattgtagcaattattagatggagatggtggttatggatgcctttttggaggatgggaaatactgttgtatttttatagtggtatgggtgattctctagaaaagaagttttaggagaaagggaggattaaacaaaggaagagaaaaatccttgagaaggccaaagggatgggatctacaacatgttgaggatttgctcttcagtgggtggggctagacagaggttggtttatgaagttagtggtgagagcatgaagaaatttacacctgattggcttatacttcatatagaaaatataaacattgtgaagggtgaaatagggatagatgatgaaggtttgaggagagtgagatagttacattggagaggaaaagtaaagcctaatagtgaattgaaatttcaagagccctttgtgcttggcatcaaactttcagtcagttagatgaattaaaaaataatctagtccagtcctgacttaatgggttagaatcagtatttatccttggagatatgatgaaattgttatattatctttgcgatacaagcattttagtttggagaagcaagaagagttctgtaggacccgtctgtgctactacctgtctacctatttccatgtatttgttcttttttaaaacaatttaaaaaaacttttagctggatgcagtggctcatgcctgtaatctcagcactttgggaggctgaggcaagtggatagcttgagatcatgagttcgagaccagcctggccaatatggtgaaacctcatctctgctaaaaatacaaaaattagctgggcgtggtggcaggggcctgtaatgccagctactcaggaggctgaggcacgagaattatttgaacccaggaggcagaggtwgcagtgagccgagatcgagatcacgccactgcactccagcctgggtgacagagagagactctgtctcaaaaaaaaaaaaaattatgacatattatttgttctttcattcagtgagcatttacttattgcttggtattctgttttttactaaagagaagcaaaaagaaaaaaaaaaaggaaaagaatgggcctcctggtaaaacataccactcatgttactgtagatgacttaaagatataaaatgagaaatgaacagttacaaagctgcagatgctctgcagtgggaagcagatagattgtggtggtggtggtggttgtgaggagaatgagatactaatatttattgagtgtttaccatgtgccaggcgcttttctaaatccagacttacagactttatttaatacacataacaaccctatgaagtagctagctactgttaaaatccacatttacaagtgacaaaataggcctagaaagattaagtaacttgttcaaaatcacacagccagtaagtgaagttacgattcaaactcagggactttgacttctagaaccaaaagggagctagcatttgtttagtgcctattctgtgctttatttattatctaacttaatcttcctggtaaacctgtgtgatagttgatggtatccctaattaacattgaagaaactgatacggtaggaccctgacacagtcttgctagctgtataactcatgctctttcccataaataaagttgagagaataaaacaaataggtttctttatggtgatctttatgttattttctttgcatttctgagagaaatgtctgcatttatgccataatttttatttttaatttttggagacagggtctcactctgtcgcccaggctggagtgcagtgatgcaatctcaactgactgcagcctctacttcctgggcccaggcaattatcccacctcagcctcctgagcagctgggactacaggcacacaccaccacacccagctaatttttgtattttttggtagagacaggatttcaccgtgttgcctgggctagtctcaaaactcctgggctctactgatacatcagccttggcctcccaaagtgctgggattacaggtgtgagccaccatgcctggcctttatgccgtaatttttaaaacaaatgccttaaatactatttcaaaaagaaagatgaaaaatatctaacattttattagatataaatttttattttgaatagttatgtgttaaattagttgcagtttatttttgggtaacttgagttgaagtcatttttgtttaacatttgagaatttagatgtgaatagagaataaccttcataaaatctgaattagtaacacattaagacaaataatgttttggcttataccttcagagatcagttttcttaaggattttttttatcctgttttttttcctgggttttttttttttttgagacaaactcttggtctgttgcccaggctggagtgcagtggcatgatggtggctcactgcaaccttgaccttccaaggtcaagcgatcctcccacctcagcctcctgggtagctggggctacgagcatgtgccaccacgtgtaactaattttttttttttttttttttttgagatggagtttcactcttgttgcttgcccaggctggagtgcagtagcaagatcttggctcactgcaacctctacctcctgggttcaagcgattctcctgcctcagcctcctaagtagcagggattacaggcacctgccaccacacccgactaatttttttatttttagtagagacggggtttcatcatgttggccaggctggtctcgagctcctgacctcaggtgatccacccacctttgccttccaaagtgttgggattacaggcgtgagccgctgtgcccggccactaattttttaaaaaatttaatgttgcccaggctggtctcgaaatcctgggctcaagggatcctcttcacctcggcctccccaagtgttgggattatatgtgtgagccactgctcctggctgcctttgattttaaaacatggccactggttgggctccttgggaagcagaaaggtagtagtaggccctcactcagtaccaaatgttattaacagataacttaggtgcaaagtgggataaaacacatgtagctagaaaatgtttgcactaagttcatgctattttttgtttttttgcatctcttctcctgaaagccatctccctttcaatatctagtctgctgatacattctaartactagtcacaattttttattgtaaaatatgcataacataaaatttaccagtgtatatgggtttgagggtatatggttcagtggcgttacatgcattcacattgttgttgtacaaccataacaactatctccagagctttttgtttttttttgagacggagtctcgcttcgttgcccaggctggagtgcagtggcgcaatctcggctcactgcaacctctgcctcctgggttcaagtgattctcctgcctcagcctcccgagtagttgggattacaagcacccaccaccatgcctggctaatttttgtatttttagtagagacggggtttcgccatgttagtcaggctggtctcaaactcctgacctcaggtgatctgcccgtcttggcctcctaaagtgctgggattacaggtgtgagccactgtgcctggccatttttatcatctcaaacttaataacttcccatctttccttgcccctaatgcctggtgactgctattctaccatctgtttgtatgaatttcactattctaggtacctcatataagagtggttacacaatgtttgtacctttgtgtctacacatttcatccatgtcgtagcatgtattagtcagaaggacagaaccaataggatgtggagatatatagatatatatatatgactttaataggtaggatatatgtatatatacgagagtttattagggagaatcaactcacatggttagaaggtgaattcccacaataatctattggcaacctcgggaaagagaagctagtggtagggctcagcccaagtttgaaagcctcaaaagcaggaaaaccaacagtgcagccctcaatctgaggcctaaggcctgagagmcccccagaaggctgctagtgcaagtcttagaatccagagcccaaagaacctggagtctgatgtacatgggcaggaggagaggatataagcatctggcaaggaaaaagagaaagcaagcaggaagactcagcaagcaggcttatctttgcttcttctgcctgctttgttttagtgcactggcagctgattgtatggtgcccacccccattgagagtgggtcttcttctcccagtccactgactcaaatgtcagtctcytctggcagtaccctcacagagacacccagaaacaataccagccatctaggcattcctcaatccagtcaagttaacacttaatactaatcatcacatagtgtgtatcagagtttcattcctttttaagtctgaatatttcattgtatgtatgtaccacattttgttaattcatttatccatcaatggacacttcagttgtttccacctcttgggtattaccaataatgctactatgaacatgggtgtacaagcatctgtttgagtccctgctttcagttctttgtgtatatacccagaagtagaattgctggattatatggtagtcctgtgtttgattttttgattaagcaccatattctttttccactgcagttgcacaattttccattcccgtcaacaattcacaagagctccagtttctccacatcttctttggctctgtgtccccacccaaatctcatctcgaattgtaatccccatgtgttgggggaggggcctggtaggaggtgattgaatagtgggggcagatttcccccttgctgttctcataatagtgagttctcatgagatctggttgtttgaaagtatgtggcactttcccctttgcatgctctgtctctcctgttccaccacggtaagatgtgcttgcttccccctttgccttttgtcatgattgtaagtttcctggggccttccagtcatgttccctgttaagtctgtggaactgtgagtcagtgaaatcccttttcttcataaattatccagtctccagtagttcttcataacaatgtgaaaacagactaatacacttgtcaacacttgttttctattgttttgatatagccayattaataggtgtgaagtggtatctcattgtggttttggtttgtatttctctgatggttagtgatgttgagcctcttttcatgtacttactggtctctatattaaaaatctttggagaaatgtctattcaggtcttttgcccatttttaaattgggttgtgttttctgttgttgagttttagagctctttatatataattcagtctcctatcacataaatgatttgcagatattttctcttattcttgggtttttcattctgttgtcctttgatgcaccaaagtttttaattttgatgaactccaacttacattttcttttgttgcctgtgcttttggtgtcatatcaaagaaatcatctccaaatttgatgtcatgaagtctttcccttatgttgtcttctaagtgttttgcagttttagtgcttgcgtttaggtcttttatccattttgagttaattttttgtgtatagtattagcttagttttattcttttgaatgtggatatctggttttctcagtatcatttgttggaaagactgttctgttcctatggaatggttttggcactcttgtcaaaactaactggaccatataagtgagagtttatttctgggcttttttctattccattggtctttatgtctgtctttaatgtcagtaccacatggttttgattaccatagcttcatagtaagttttgaaaacatggaatgtgagtcctctggggttgtagtttgtcaggattattttggctattctggatcccttgagattcaatttgaatttgagaatggatttttctgtttctgcagaaaacatggttagggttttgatagagattgcgttgaatctgtagatcactatgggcattgttgacatcttaataataagccttctagtccatgaacatrgaatgtttttccatttatttgtatgttctttaatttcttttagcaatcttttgtcttttgtagttttcactgtacagtattttacctccttggttaagttaatttctaggtattttattctttttgatgctattgtaaatggaattgtttccttgatttcatttttggataattcattattagtatgtagaaatgcaatggacttttttgttgatttttgtatcctgaaactttgccgcatttattagctctaacagtttttgtgtgtttgcggggaatctttaaggttttctaaatgtagcatatgttgtcagtatacagagataattttaccttttcctttccaacttgggtgccttttatttatttttaattgctctggctaaatttccaatactatgttaaatagatatggcaaaagtatgtatccttgtcttgtttctatcttaaagcaaaagttctttcagtctttttttttttttgagacagggtgtcattctgtcacccaggcttgagtgcactgccatgatctcagctcaccgcatcctcaacctcctgggctcaaggtatcctcccacctcagcctcccaagtagctgggactaacaggcgtgcactaccacacctggctaatttttttttatttttagtagacatgaggtctactgtgttgcccaggctggttctgaatgtctaggcacaagcgatctgcctgtcttggcctcccaaagtgctaggattacaagtgtgagtcaccatgcttggccagttttcagtcgtttttgttgttgttgttgttgttgttgttgtktgtttgtttgttttttgtttttcttttttgagatggagtctcgctctgtcacccaggctggagtgcagtggcgcgatcttggctcactgcaacctctgcctctcgggttcaagcaattcttcttcttcagcctcctgagtagttgggattacaggcacatgccaccatgcctggctaatttttgtatttttagtagagacagggtttcaccatgttggccaggctagctttcggtcttttaccagtgcatatgatgttggctctgggtttttaatatatggcctttattatgctgagataatttacttctgttactagggttttttaaagttttttttaaatcatgaaagagtgttgaattttgttaaatgctttttctgtatgaattgagatgatcatttggggttttttgtttcattttgttcaggtaatgtgattacattaattgattttcataagttgaattatccttgcattccagtaataaatatcacttggtcatggtgtataattctatcaatatgttcaattcaatttgctattattttcttgagttttgtatcagtatacattcatacagaatattggtctatagttttcttataatatgtttgccttgttttggtatcaagatagtgctggcttcacagaaggagttaggaagtatttcctcctcttcaattttttggaagagtttgagaaggattggtgttctttaaatgtttggtagaatttgccaccaaaatcatctgatctagggctttactttgttgggaagtttttgattamtgattcagtctccccactagttataggtttattcagattttctgtttattactgattcagtcttggtaggttttgtgtttttagaagtttatccatttaatctaggtaagtcacatttttgttgtagcgttgaggcattttttttttttttacaaaaaattggtactcatatacataaagtaatatgaacttaaaattcatacatttacttcattttttagcttgacattctagtaaatcttttgctccatttatttttggttatgatagcagaagatctacctggatgatttaagagcrtcatttgtcaatgagcacctcttattttctctttattggcagtagtgcttacagctactattaatgctgctttccattttgtcgtttcgggttcaaacatacctctgtaatagccaccactgaaggcagattttggtagactttgaaaaatttgttttgttgttgttgttgttgttgttgtttgttttggggtttttttgttttgttttgttttgttttgttttgttagagacggagtcttgctctgttgcccaggctggagtgcgatagcgcaatctcggctcaccgcaacctctgcctcctgggttcaagtgtttctcctgcctcagactcccaagtagctgggactacaggcgtatgccaccacacccagctaattttttgtatttttagtacagacgagttttactgtgttagccagggtggtctcgatctcctgacctcatgatacgcccaccttggcctcccaaagtgctggaattacaggcatgagccaccacgcctggccgaaaaatttgttttacttgaggttccacatgccttatataagggttgcaaaacataacagcctgcaaatcctgcagcagcaatggtcagtccgactgctaccactgtactggccatggctgggctcccctactgcaccaggagcatggctcatcccagcccagaggttgcggccaacaatgacacacctttaccagagagtgacacaggcaccgatggcaagcacaatacactggattataatttttttaaacaagaggattatttgaaaaacagtctaggtgcggtggctcacgcctgtaatcccagcactttgggaggccaaggcaggcagatcacttgagcccaggaattctagaccagcctgggcatggtggcatgtgcctgtagtcccagctactcaagaggatcacctgagcccagggtaatcgaggctgcagtgagctgtgctcacaccactgcactccagcctgggtgacagagtgagaccctgtctcaaaaaagaaagaaaaacacagtttatgttgttgttgtatatcgagtcttaaatcaatgcttcctctggcagaacaaatcagaagttggttatacagtatcaactggccaagtgtctttattatttacagcatctacattagtttttaaaaccatcacattttcaatatataaatgggcaaaaagatgtttagatgggttagtaaacaatggagaaatattttaatttactagatactaagaggtagaaattaaaatttttaaaattttatgcctatataacaaaaaatagaaaatgttgatagtatgatagatagtgaaattgacactggcatatttacacatttaaaaagccacacgtgggtcgctggggaacccaggctgtcctaggaagccgagtgggagtggcacagagctgctggagatcctgagaacctgagttttggcaagcagccagaatacttaaaaaatgaccacaccaaacaaggcacctcctggtactgaccctgagcagttggaaaagactggaacagtacgggaaattgggtcacaagctgtttggtcactctcatcttgcaaaccaggatttggagtggatcagttacgagatgacaatctagaaacttattggcaatcagatggctcccagcctcatttagtgaacatccaattcagaagaaaaacaacagttaagacattatatatttatgcagactacaaatctgatgaaagctatactccaagcaagatttcagccaaagtaggaaataattttcacaaccttcaagaaattcggcaacttgaattggtggaaccaagtggctggattcatattcccttaactgataatcataggaagccaacttggacgttaatgatacagattgctgttctagccagtcatcaaaatggaaaagacacccacccatatgagacaaattaaaatatacacactggtagaagagagcgccattggtaaatttcctagatgtacaactatagatttcatgatgtattgttcaataaggtgactttaaaatgatatggaagtcattaaacgtatctttgttttatcctgtctttaaatagtatatcagttacctttattgaaaaaaacatcagttatttgcaactttatatatatttaaaaatattttattgtaattttgataaatttgggtcatattatctttaacatgtaataaagctcacatattttacattactaaaaaaaaaaaaaaaaagccatatgtgtggctgggcgtggtggctcacacctgtaaatcctagcactctgggaggccgaggcaggcagatcgcttgagcccaggagttcaagagcagtgtgggcaacatggcaagacctcatctctgccaaacaaaaggggacgtatgttccaattttttgagctaatgattccttttttgagtaaataattcttaaaacaagtgcagtaaacaaaaagatgtgtattttagtgttactaaatagcaaatacatttaaagtaatttgtgtccaaaattggataatgggccaggtgtggtggctcattcctgtaatcccagccctttgggaggccaaggtgagaggatcacttgagctcaggagttcgagaccagcccaggtaacgcagtgagacctcatctctactaaaaattaaaaaatggcgggatgtggtggtacatgcctgtagtcctagctacttgggaggctgaggtggaaggattccttgagcttaggagttcgagaccagcctgggcaacataatatctctgctaaaaattaaaaaatagctggatatggtagggcatgtctgtagtcccagctacttgggaggctgagttgggaggatcacttgaacccaggaggtcgaggctgcagtgagccatgattgtgccagtacacttcagcctgggtgataaacgagaccatgtctcaaaaaaaaaaaaaaaaggttaatggtaagttaagtacaatacatatatttgcttcagccattaaaaattattacaaggcagtgtagaaaatgcttatgatgacatatgaataraacagaatgcaagcttatgctttgtttacaattaaattattcttgggcataaaaacagatatgtctgaaggaaacatatttttaaaaagtaattttagagccaggcacggtgggtcatgcctgtaatcccagcactatgggaggctgaggcgggcggatcaccagaggtcgggagttcaagaccagcctgaccgacctatggagaaaccctgactctactaaaaatacaaaattagccgggcatggtggcacatgcctgtagtcccggctactcagggggctgaggcaggagaatcgcttgaacctgggaggcggcggttgcggtgagccgagatcgcaccattgcactccagcytgggcaacaagagcaaaaccatctcaaaaaaaaaaaaaaaaaagtaattttaggctggatgcagtggctcatgcctgtaatcccagcactttgggaggccgaggcaggtgaatcacctgaggtcaggagttcaagactagcttgggcaacgtggcaaaactccatctttattaaaaatactaaaattagctgggtattgcggcgcgtacctgtagtctcagttacttgggaggtcgcagtgagccgagattgcatcactgcactctagtctgggtaacagagagagactctgactcaaaaaaaattttttttaattcattgagtttgagctattatgcttatttcttttcttttcttttatttgctgtactttacttttcttttcttttcttttcttttcttttcttttctctctttctttctttccttccttccttccttcctggcttccttctttcctttctttctttctgtctttctttctttctctctctctctctctctctttctttcttttctttctttcagatggagtctcgctctgtcttccaggctggagtgcaacggcgcgatctcagctcactgcagtctccacctcctgggttcaagtgattctcctgcctcagcctcccaagtagctgagataacaggcgtgtgccaccaccacgcctagctaatttttgtatttttagtagagacggggtttcaccatgttggtcaggctggtcttgaactcctgaccttgtgatctgtccacatcagcctcccaaagcgctgggattacaggcatgagccaccatgcccggctcttttttttttctttttcttttttgagacagttttgctcttgtcgctcaggctggagtgcagtggcacaacctcagctcactgcaacctctgcttcccttcccaggtttaagcaattttccttgcctcagcctctcaagtagctgggattacaggcatgtgccaccacgctcagcagatttgtatatttttagtagagatggggtttcaccatgttggctgggctggtacagcctcagttggatataatattgaaagtctgaattagagatctcttttaaccctttctgtaatggacacttaaaatgactctgataattattattgttttctattaataacagtgaagtttaaacaggtgtttagacagaggcaagggtctggatttgtttgaactgctttagatcttatgatactgatttttgctatgtgctaataagtggagggataaagtactcctgcatttgacaatttttataagttgttactttcactggtctttgtgaacagctggacactggtcagttctatgcactctcctctcctgtttttattattctcacatcacagttatttttgtcataattatagggctttttgaagacctgggacatcattttttgcattttctaatttggaaagaaataagtgagcatttgatgatttgaattttcaagaattgcaaaggaataagtgttattcacactgtaagagggtataaataggcacaaagtggtactttgaatataaagcatgttcacagatttagcaataggatttgttatgtggaaagcctgtagtgggaaattttaaaaggaaaggaaagggaaataagaaaggtaccaacatacatttagaacctattatatgctacattttatacatataatttcatttaatcttcataaaagccatatgaaggaaatactgtattagcatttctattttacatgtgagaaaaactaagacctagagagtttaaattattcccataaggtcatctgactagagaataatcaagttgaaataggaacacagaagtgccacatttaaaaaaattacatataaacacacaaatggaaccttttaaccagtacttagctggaacatcgtatagaatatatattataaattaccttactttgtctctttatgcttaggcaggtcatacggatcctgccatatgatgtcagctgtaaccattaggcataaaaatcttgaggtcattcttataaacagattaaaatgtgttgttgcaaaagttgaatggctctagattattttctgaatttggatatgaatcatatagtccttccccaaaaagtttacattaatgtttgtttctccattcatacatttatgtatttatgtatttatttattttttgagacggggtttcgctcttgtctcccaggctggaatgcggtggcgcgatctctgctcactgcaacctccacctcttgggttctcctgcctcagcctcctgagtagctgggattataggcgcctgccaccactcctggctaatttttgtatttttagtagagatagggtttcaccatatttcaccaggctggtctcaaactcctgacctcaggtgatccacctgccttggcctcccaaagtgctgggattacacacatgagccactgcacctagtcccagtcatacatttatttatgcaataactttacttttcaaggaagcaataagcaaatatttactgagtactatgtttcagacacaatattgaagataccagtattaaaaataatttagctcattattccatggagtttacattctagtgtggggaaatggagaataagttcaatcagtgcagtagattgtgttgtgataaagatatatggcatatggtaagatatttcagcagtataatttaagttcaggtgtgcaaatatgtaattttcttaatttttagaactgactttacttttttactctaarcctgtagcttagagaactggggaaggtacttagatggtatatggaatatagtggggtatttttagttgtcagaatgactgaggttgctactggcatttagcaacctgtgcataccaagactgctaaacatcttgctatgcccaggacagtactgtcctatgaagaactggcccacctaaaatgccaagagtgcccctgttgagaagcactgactaacctggctcatggtagacaatttcatcttgatctttttagrcaaaattgactattatccagtaatttcaaattcaggattatttaaactatcccaaacctggctcaaatctcttagattctgcccatctcctctgtgatactaattcttatgacctatgaatctcactacgtcatagtctggcgttgaagagtcatctacttttctagctaactcctgtgctttcctctaatctcattggaaacgtaaaggatctctctatactgttcttcggcctgtgggatattgagaaagatgggtattcttgggttcttctgtgtttactccatttgctgctcccttgcttgcttttttttttttaagatactttgttttttattcaaaaatcattatttgagattattgtcccaaagcctaactcactacttctgaatgttcccaactatattagtttgctacagttagcaaaataccacaaattgggcagcttaagcagaaatttattatctcacagttattagaagtctgaaattaaggtgatagcagggttggttcctcctgggggctgtacggaaaagatctcttccatgtctctctccttggtttgtagatcgacatcttcatgttcatatggtggtgttcttgtatgtatacctgtgtccatatttgcctcttttataagggtatcagtcatgttggattaggagactaccctaatcacttcattttgattacctctgtagagaccctatcttcaaataaggtcacattctaaggtgttaggagttaagacttcagcttaagtatttgtgggggatacagttcaacccataaaagcaactaatttttttaaatttttttctaatttaaaaagtacagaaaaaactaatcaaaataaaataaaaatatcccaatacaacatttaaaaaattatataaagtaaaargagagaaaagatagccagctgtggtggctcatgcctgtaatcccagcactttgggaggcccaggcgggcagatcacttgaggtcagaagttcgagaccagcctggccaacatggcgaaaccctgtctctactaaaaaaaaaaaaaaaaaaaaaaatcgctgggcatggtggtgcacacctgtaatcccagctgttcaggaggctgaagcaccagaatcgcttgaacctgggaggaagaggttgcagtgagctgaaatggtgccactgcactccagcctgggcgacacagcaagactgtgtctaaaaataaaaaagaaaaaggccctacttccattccaatctcatcctccaacttgactatatttttcttttccatgtcaatcggtacatacagaactatttcattctttttatgggaacgggattccattttatgggtatactgcagtttaattagctgttacactactgatgaacacttgggttgtttacaacttttattataaacaatatggagataattcttgtgtagatctctttgcacatgtggatgttttcagtagtgtaaaattttaaaactgtgtgctgagtcatactgaataaacacttccaattttaaaagatattgtcaaattaacctaccagcgtatattactaccagcagaatctaagagctataccctcaccaccgttagatattatcagtgtttaaaaaaaaaatctttgctagtctcatagtaaaaacatactataaaactcattgttttattttgtcatgtgtggtatttactatatctgttggccattttatttattttttctgtgtatttaccaatgtgagttctttgccttatttccttggaggtatttgttggttattgaagctcatgtttttatcataaattaatttttttgtaataattgtagtagctcattaaggtttcccaaatccattcttattctcttccttttttttctccctacactgtgcccatacagatctgatcatgtctttctctttgattaaaatgcttaagtgggggctgggcacggtagttcacatctgtaatcccagcactttgggaggctgagccgggcagatcacctgaggtcaggagttcaagaccagcctgaccaacctggtgaaaccccatctctactaaaaatacaaaaattagctgggcatggtggcacacacctgtaatcccagctacttgggaggctgaggcaggagaatggcttgaaccctagaggcggaggttgcaatgagctgagatcacaccattgcactccagcctgggcgacagagcaagactctagctcaaagaaaaaaaaatgcttaagggctttcccattgctctattaaaaaggtcaaaacagatcctacagagcctttgcttggtctggcctcagcatattccatgcatcccttaactcttggggcctcaagccatattaactttttttagttatttggtgggtccatgcttcttcccctaataggaactgtgtacatactatttcctctactattactgtctcttcttggcacctctttgttcacagaaaactcttacccatccttcagatttgatgtcttgtcatttcctaaatcttccctgaccttgccaatctaggctagagcctagattacatgatcttatttcaccatttaccacttttgaaacacgtgatttatattcacttgtatggtttttctttttctttctttcttttttttttttttttttgagacagggttttgctrtgttacccagacaggagtgcagtggcyattcacaggtgcagtcatagtgtagtgtgtcttcaaactcctggcttcaagccatcttcctgcctcagcctcccatgtagctgggacaataggtgtactcctctatgcccagccttgtgttattatttgattttaggttataacctgaaacccttgcactaaattgcattgcatgaaggcaaggaccatgtccgttttgttttctgccacatccccattgggtagcttggtgcccagtacatagtaagagttcatatatttgtggaataaatgagtgaatgatggattcttggttttgtctctttattaraaaggttattgaaggattttaagaaatttaacattattagatttattttttaraaagttcagtctttgtttggaagattaattggaaaggcagatgtgaagattaggagaacagttaggttatcatcatgatcgtttagtcctcagataataacagcctgaacagaggcagcaatgttagagataggagaagatgtgattttggaagaacaatttcagaggaaaactaacaggacttaatgactgactggatgtggtcatggcgagggagaaggaaaagtcaagactcaaaatttaaatgaaatatgtaatttagtatgaagtagtattacagagtagttaactatagagccattgcagtcatacagattaatcatgtaatttactagctgtatgaccctggtaattttacttaatgtcttagtccattcgggctgctataacaaaataccatagactagatggcttataaataacagagatttgttacagtctggagcctggtaagtccaagatcaaggcaacggtagatttggtatctggcgagggcctgcttacttatagacagctgtgttctcactctaacttcacagggcagaagggtgaggagtctccctcaggcttcttttatagggcactaatcccatatgccccactacctaataccatctcttttggggttaagatttcaacataggagttttggaacattcatctgtttacctaactgctaattgtaaatgagtgtcttcatggaatttttgaggttaaatgtaacacatgtaaagtgcctagtagtcatatagtttgctgtgaacttgaggaagtcatttaaccatctaaactcagtttcttctgatagaaaataaggataatatgtataccctttgttctccctgtatcacagggatatctccctatatcacatttaagaatgtcaagccctataaaaattgtaaactgataacagtcatagtaactagatattaattatacatagaaggatgggagatatcgagcttaacttagactttaatatgacccctcatctcttggttcaactttgtaaagtataggatgcttcttggctgtaaaaactgaagaagtagaatttatcctactgggaacaggcttttgccactgtaaggctctatgtggtaaatgactgatgagttctcaagaaaataaatctggccgggtgtggtggctcacgcctgtaatcccagcactttgggaggccgaggtgggtggatcacttgagttcaggagtttgagactagcctggccaacatggtgaaaccccgtctcttctaataatacaaaaaaaaattagccaggcgtggtggcttacacctgaagtcccagctactcaggaggctcaggcagaagaatcacttgaacccaggaggtggaggttgcagcagtgaaccaagatcgcaccactgcactccagcctgggccacagagtcaaattgtgtctcaaaaaaaaaaaaaaaaaaagaaaagaaatcttaacaggaacaaaggagattgttgttgcctggtgtagaggggagaaggaagtgagattaccaggaaccaagcccagaaggtggaaattggcatggcagattttgattgcctgctgtgatttcctgtagctaaagcagtgcgtttgtttatgattgagttgtatatattgacccttggccttcatagcaaaaacagtgaaaacagctggtatagttattattccacatrtaaggatagtaacaaacagaagttaaaacacagaaattccaatctttgtttatttcatcctgctataattcctttccaaacggaaatagcacatgtaactatctttcaacacccatgttaggtgattgtgtgcatagaaatsttgcctaggggtaattcaggtggttttttccccactgctgtatatttgccacgtgatcttagttaagatttttattttcagccaatgtttcccatttctttattgttgacagacttgtaatctcactcttgcttttgaattacccaacttcctgaactacattttctttgaaactttagtattgtagtttaatamggttcactgacaatcagtgtttgtcaatattggttcactctctttgcatggcaatcccaagtaaattttgtgtgttcttcccccsccscccccacaggttttctgtgcttcctgctgtagcctgaaatgtaaactgttatacatggacagaaaggaagctagagtgtgtgtaatctgccattcagtgctaatgaatggtaagtattaaaacaggttgatttcatagttattgagacaaaacaagggaattacgaygagaagacttttttccccctgcctttctttacaagttgctcaccttctcaaatgtcataactttaactgaaaatatttagctaaatttccatgttttgaaagtatcttagcayttcagaattcctgtgcctaatttaatgaataaatgctaaagccaggtaagttttgcaggaataatggaagttctttggaaatctggtgcgaggtagttatttgtgttcctataaaataaccagagtgaggtgggaatggggagcttttgatcaccagatgataagatgttaaaactgggctgagattttccttttaagagaagccatctctttctaaggaacaacttaataacttagcatgtgttcttatcaacaccttgtttcattcatcttgttgaagataactattttagcatctaggaccaagtagaaaattgcatttttaaagcccatttatctctttaatgctacttagatttgctatgagaataatggtttagaatctagttgttacgtggtaaaaagaatatggccggggaaagtaaataaaacttacccagtgttcatcttttgctggactggaaatgattttaagggcatattagttaaaaaccctgagtattcttgtaaaaagatacactaaaattgttcaggttatagtattttctctttgaatgcatctttgtacagttactggaacaattactaatagacataaaatgttgaacttgaacaccagtgctacctgtgccaggatagtgtgcctcctggaggctggaacttatctgctctgagacccctcctgctctgtccgtctgcattgctgatagtgatgttttcttgttgctggcttattaacctgttgcatgacagttaatctgatctgttctaatttcctatgatccacccagtttcctcccatttctgaattcttacaattttgaccaaatatgaatcattctctccactcttaagggttactttttaaatagtggttatttcacttggttgctcaattgatgatttttattctgctgctttcattttcgggcacatattcacagataagagcatgctgcttaattatagtacctaatacctcttttatttgatgagatcttccaacttgatagctaatttttttaacttggcatagctaaagatgaaggaaatggcagaggattcacatggaatacttactttttattaagccaaggaggcccttaacaggggatcctaaggtaatccacttttcctggtttttccagtgtctttcctctcgcatggcttagcccggtctttttcttaatatttaatttgatgcttttcggtgttccctatccctttttccctttctccttttctcttcctcccctctttctgccagtgctttcaaaggaacatagcttttgttactagccttgtcttgcagtttggaggcaataaatattcaaaatcctatggatcattctttgatgttgaaagagatttttgaaaggatgcttaaaaagagggtggcttctatttctgggcatgtggtattacctgaacctagaagataaaatttggtatctttcatttctgtagcacctttcatcctatttgctttaaaggcgataggtgatgtgtcagtatttagtgaaattatagggtacacagaatcttaatgtatttgtgatcatttatattggttgatcacacttacatgatattggcacattttcatgttcaaataggtcctgtgcttttgagacacaccaaagatgtgaaatggttgttactgatggatagttttatacagggtgatgattacataaaagcagaattcagaaaaagattgagatgtgtcctcctgagctttaggctttagaaatttttaatgagattttattttaactaacaagagccttaaaagtttagaaatgaaacttaaaattttacagtagagttattctattttagcccctgattttgctttttgatagaactttataaaatgcattaaatattaaatgaaaaaatgtctaaatgctatccaagtttcaaattcttaaagtttgatgttgtttgactccctcttaaggaaatgtttggtctcctataaagaarccaggctccaacctttaactcagattgatctgctatcagtctatcagaagtatcctataattcttttttatttttaatttttttgagatggagtcttgctctgttgcccaggctggagtgcagtggtgtgacttggctcactgcaagctccacctcccgggttcatgccattctcctgcctcagcctcccaagtagctgggactacaggtgcctgccaccacacctggctaattttttgtatttttagtagagacggggtttcaccacgttagccaggatggtcttgatttcctgacctcgtgatccacccgcctcggcctcccaaagtgccgggattagaagcatgagccaccactcccggtctaattctttwaaaaaaaaaaaaaaaaaaaaaaaaaaatcatgttactcttatttgctccaaccaaatagtttacttggctaaatggtctcctttattacataaaatcacctatstctttaataccttcactaggtggaagagagacatactatgagtattaattaggagaagctgcattatttatccaatattgtggasgtcttgatgtccatattttgcaatccattcacattgattgtgtctgtatttgctttagctcaagcctgggagaacatgatgagtgcctcaagccagagccctaaccctaacaatcctgctgaatactgttctactatccctcccttgcagcaagctcargcctcaggagctctgagctctccacctcccactgtgatggtacctgtgggagttttaaagcaccctggagcagaaggtaggggatcatgtgctattctctctctttttcctcacgaagttcctctgaaaaggtgctgatatgactttacagcacaagtcttaaaaaacactgcagataagtctctttgggtggttattaaaatggaacaacaaggtgagaaatgtgtcaagactatttctgggcaartagagaataatatttgtgttgcttggtattttagaggcacctcakaatatatgtcagtctcctctccaacttaagaatggagtaattacactgcttgtccttaaaaagaggtgcagaatttgaagtcaatctgtaaattcctagcctacctcatgcctgtcttaatgttctttgtaggagtttagtaagtgataaaaatgagagttcttctttccgaccagcccattcaagtattgctttttggagtatacattgccattttctcttttcatttttaatctgtccatataaaaatatgaacatttttgtgttagggacatagactttaaatctagaactttaattctgattatatcatatgataggtagaaaattacaggctcaacttacattggtttattatatctttatgatgataatattgtcagatgaaaggcactgtgtaagtgcaggggattatgaatagtaaaaataacatttatttccttaaaatgatcttatcaagtttcccttggtaattaaaatcagtcttccttcattaattttatcttttcatctattaatattcccttccccttgctaaataacccacctttccttttgaagatcatagacttctattgacattatcatactcttccccattttttctcttttcagatcatcccttagtcatactccttgtatttttatgaatttaggctttcttaaaatctttattctcttcatttgttgtttttgttgttcttccctagtctctgtgtgttttggctgtttgaattgatttctaaaactggacttaaagggatcatttcatcagactcagttttccagctttttccctgtctttttactaaaacacaaattacttttgcactgccagatcagtctttttcttcttcagttacacttcaggcaaagatctggtcagtttgcttcccaattcttacatatctgtgccagctcttctgttataaatgaattattctttaacattcttcagggcatcttttgccctttgaaagtaccatatcactttaccagatgtttaatttctttggaaacctcataactttagaaaatgtgaatgtctattgcttttttcaccatgctattaatttatttccgaggcccttgaacactttccttagtttctctgtcagtgatacgggacagagtatgtgacataatcatagatgtatttaagaactcttaatatttcaaagcaaagtattttactctttgcatataagttaaacaagtaaagaatwtatttaaatttgtatttttaattcatttataaccacttttatatacagttacatttctgatgtttctgattgtaagttgccaagtaatgatttctttgtacatctggaattggtgaccttctcttctttgatgttagaaaaccttccaatgccacattgatgcctgttttatttttctggcccctcaagtggctcagcccagagagcagaggcgagtttggtttgctgatgggatcttgcccaatggagaagttgctgatgcagccaaattaacaatgaatggaacttcctctgcaggaaccctggctgtgtcacacgacccagtcaagccagtaactaccagtcctctaccagcagaggtaagaaaacaaaacagcaactaaaattgcatagctactttactcagcattgtgctgcctctgttgaattacttttgtgtggaactctgtaggttttggatacaacttagtgtatacgtgcacatatatggataaagtaaatgtggcaaaaatcagctgctgttctttgctgtatatttagaagttttttcaggagaaaggttcttaatgaagattgttctcagatgagctcaggtgctccactttagctagcagtcgggctgtggggaattctgtccccttgctacattggtttttaaagcatgttccccaggttccatggcagcctctcaggagtgctatggtgaggaagagcaggtaacatgaaagggcctgaggagctgagtttaaaaccctggcttatcaacatcccctaccagagtggtacacttgttacacttgttgaacctacactgacacatcgtagccaacccaagtccacattttacattaggattggatacttttttttctttttttgagatagagtctctgttgcccgggctgcagtacagtggcgtgatcttggctcactgcaacctctacctcccaggttcaagcaattctcctgcctcagcctccaragtaggtgggattacaggcgcctgccaycatgccaggctaatttttgtatttttagtagagacagggtttcaccatgttgcccaggctgcgtctcgaactcctgacctcaagtgatccaccccctcagcctcccaaagtgctrggattacaggtgtgagccaccacaccctatcaggattggataaaaattttactcctgatgttttcatagaattgttagttactaattatttatattaatgataagtaatatttttttagacatttacatcctatataatttgtgagtttgattgtaattgaaattgcatgttgttaagattagattttttgacatgcagagctgacttacctgtttggtgagttattgaaccatgtaatatctgtcttcaaatatttctagtttttgaatttttctgtggctgcagagggtgacagccagaactgtgtcttatccttctttgtatctccacagtgactttgtcaagaaagttttttctttattccccccaactgtttttttgtttgtttgttttggtttttttttttgagacaaggtctcactctatcgcccaggctccagtatagtgccgcagacatggctctctgcagccttaacgtcccaggctcaagcaatccttctgccacagcctcccaaatagctgggactgtaggcaagcctggccacaactgtttatttggaaaaaaattcaacctacagaaaagttacaagaatagtacagtgaatacccatatactcttcacctatcttcatcaacttaaccattttgccacatttgctctaccacttcacagtacacacgctttttttttatgacccatttaaggattggttgcacttcaccacttaatagttcagcttgtgtaccctaagaaaagtcattttcttatacaaccacaatgcaattatcacatgagatggaaacttaacatgtaattctggtttccccaattgtcacaataatgttctttatagctttaatttttttgttttgttttgttttgagatggagtcttgctctgtcgcccaggctggagtgcagtggtgcgatcctggctcactgcaagctccgcctcccgggttcacgccattctcctgcctcagtctcccgagtagctgggacaacaggcgcccgccaccatgcccagctaatttttatgtatttttagtagagatggggtttcacgatgttagccaggatggtctcgatctcctgacctcctgatctgccctccttggcctcccaaagtgctgggattacaggcgtaagccaccgcgcctggcctatagctttcatttttacatatatgtgtgtgcacagatatattaatttttaaaataaaatttatttttaaaaatcaagatctcattaaggaccacagttgcatttagttgtcatatttctttggtttgctttaatcttgaatagttctctctcttttttaaagtttttatatcattaatatttaagtatttgggccatgttttacatgatactctcaatttgtatttgtctgttttttttttttctcatgactagtttcagattaaacattttttggcagtaatgacaatcctacataagtgagggtgatttcttaaaggatcacatcaagaagtattagtttgggttgggtgcagtggctcacatctgtaatcccagcactttggaaggccaaggcaggaggattgcctgaaccccgagtttgagaccagcttgggcaacatagtcagactctgtctctatataaaattaaaaaattagctgggcatgatggcacatgcctgcagtcccagctactcaggaggctgaggcaggagggtgatgattttctctttctgttaaatttctttcctatctcttagtttgtatgatgggttcttaaactataaatatttttgaaagaatgaggaaagtctagtgagtgaatgttatagggaaacaattttctgctcattataagacaggctaagccacattattttgtgctctcacattgtgcaacactctaatatttatgtggtaaaatgagagaaagcaaactctttaatgccagactagaaaatattaatatttttcttatttttatggtctagtagagtgcctggcacttaacaagtgcccagtaaatgaagtaaatgtctttttattattattattatactttaagttctgggatacatgtgcagaacctgcaggtttgttacataggtatacatgtgcaatggtggtttgctgcacccatcaacccgtcatctagattttaagccccacagtaaatgccttttcacagaaggcatttaagtagagaccaactgaccactttttatgatattaaaaggaggatttttgcaccattcaatagtaggttagaatagattattttctgtaccaggccttcaagtcagttaatggtagtttgccagtaaaattttataaagttcctatatgatgccataccggaaaattttagaaatcccactaaaaatgtatagtcctaaaaactttgtcctaagtagagacagaagtatggcaaaacatgggcatatttattttattttattttattctttgtttgagtcagagttttgctcttgttgtccaggctggagtgcagtggcatgatctcagctcactgcaacctccgcctcctgggcttgagtgattctcctgcctcagcctcctgggtagctgggattacaggcgcccaccaccacacctggcaaattttgtatttttagtaagagacggtttcaccatgttggcaaggctggtcttgaactcttggcctcaggtgatctcccctccttggcctctcaaagtgctgggattacaggcatgagccaccatgtccagccatattttgaagaaatagttttaatgtttgttcaggtatacaatatatgtagcaaaatgcatgactaaggagcatgaatctttaggaaacaccttgaatttatacatggttttatatatatgtgcatgtgtgtatacacacacaaacacacacacataaaatatgtaagcaccattcaggtgaagatacagaacatctccagcactccataagggttccttatgcactttttctgtcagtaccttctcctttcatcaaggtaaccattgttctcacttctgtccctacagattagttttgcttattcttgaattcatataaatccaaacaatagtatataatgttttgtgtttagctttttaagctcaacttaatattatgagatttatccatatgcatcaaaaattaatttatttctgagtagtattccattgtatggatatgccatcatttatgttatgttctcctgttagtggccattcaaattgtttccagtttttggctattatgaatgaaatgaagctgctagaaataatcttttttttttttttttttttgagtctcgctctgttgcccagactggaatgcagtggcaggatctcggctcactgcaacctccaccttccaggttcaagcaattctcctgcctcggcctcccaagtggctgggattacaggcacacgcccagctaatttttatattttttgtagagatgggatttcaccatattggccaggctgatgttgaactcctgtccttaaacaatctgccttccttggccttccaaagtgctgggattacgggcgtgagccactgtacccggccgtatgaatattgttatacatgttaaaaacagcttttactgtttttcttttaactttttgttttgagacggagttttgttcttgttgcccaggcggagtgcaatggtgcgatcttagctcactgaaacctccgcctcctgggttcaagtgattctcctgcctcagcctccctagtagctgagattacaggcatgcgccaccacgcccaactaatttttgtattattagtagagatgggatttcaccatgttggccaggctggtctcaaactcctgacctcaggtgatccacccacctcagactcccaaagtgctgggattacaggcgtgagccaccgcacctggcctcttttaactctttaaaagcttctatttcatgtttaagttatagagaatatacatctgtatagtatgggaaataaaagttatagagaatgtagagaggagagcatcattttaataaacatttgagcatgttctatttaataattaagtggatttaacgccaaccaacatgttttgcaaccttatacttcattaaatatagctaatgtgatctgcctagtaatgcaaagaaaaacaaacttcaggccgggtgcagtggctcacacctgtaatcctagcactttgggaggccgaggttggcggatcacaaggtcaggagattgagaccatcctggctaacaggtgaaaccccatctctactaaaaatacaaaaattagccaggcgtggtggcacgcacctgtaatcccagctactcgggaggctgaggcaggagaattgcttgaacctgggaagcagaggttgtagatgatgccattgcactccagcctgggcgatagagtgagactccttctcaaaaaaaaaaaaaaaaaaaatgaacttcaagatttattttattacatagtaaatgaaaaatgatgacattttatcaaagttgatttttttcccttttttattgtggaaaaatrttaacatatataacaaatgatttacaattttaacaatttttaagtgaattcattggcatcaagtacattcacattgttttgcaactatcaccactgttttcaaagttaatttttaaaagcaatataaattagaccttaagtagttcccaaggtattaaagattaagaaattatgaaataatattgaagttttgtttcttttgccactacagttttttaaaaatatttttctcttatggcaaaagaaacytgggtaaaggaagctttaatgcaggttttaaggcctcttctgtcattaccatgatttgatgataccaaaaggagaaacttacacatttgaaaacattttcatagtataagcctgatttgtttttttgttttttttaatccatgggttaatgaatattttgtgctacctttcaaaaagtatgaatttcagattttcacttaagttcccatttgtatttttaattatgtcctgccaaagtcttgaattctctgtagtgctcactttgttgatttgcttttcctagacggatatttgtctattctctgggagtataactcaggttggaagtcctgttggaagtgcaatgaatcttattcctgaagatggccttcctcccattctcatctccactggtgtaaaaggaggtaagtggactacatatttaaacagtgatagttctatctgccaaatgttaccttctaattaaggtagagagacagaatttgagtgacattcacctttctcttatccaacaaaacaaactcccccaaaactatgaaaatggttgttgctgttattattttagagtagatgcttatgtttttatattataatgtcattttcagtttttgaatggatataatattacttataatgtaaatgtagtttattagcagtttttaaaaatatttcaaagcacataatattctgaaggattgcttgtggtttaggatgaacccactctgatacagtcatttatttagcttttcattttgaggtataatatacattcagaaagaacgtatagtaagtgtgaagagcactgaatttaaatggcagttttactgttaaaaatatttttagggatcttgataagaagtaaaattattatctaatcaaaagaatgcttaatattatgtgaaattttatttttataattttaacttttattttagattcaaagggtatatgtgccaatctggtacatggatatagtggataatgctgaggtttgggttatgattgatcctgtcacccaggtagtgagcatagtacccaatgggtaatttttttttgtttttgtttttgttttttgttttgagacagggtctctttatccagtcagccactgatgggcagttaggttgattctatgtctttgttattgtgaatagtgctgcggtgaacattcaagtacatgtgtctttttggtagaacaatttattttcttttggatatacacccagtaatgggattgctgggctgaatggtagttctcctttaagttctttgagaaatctccaaactgctttccacagtggctgaactaatttacatttctatcaacagtgtatacatgtccccttttctccacagcctcaccagcatccatggttttttgactttttaataatagccattctgactggtgtgagttgatatctcattgtggttttgatttgcatttctctgatgattagtgtgaaattttattgctgacatatatggatcagtatacaattactacatttttagaaggtggcttattaattaacctctcctgaactttgtcctaggcttttaactggtctccttgccttcagtctttctttccttcattttgtcttccacactgttgccagttatgtttttaaacatagatattatcttatattgcttttacttagaaatatttaatggattcccaatgtctttagtgtaaattacttaccttagcaagcaatttttttttttttttttttttttgagatggagtctcactctgtcgccaggctggagtgcagtggtacagcctcagctcaccacaacctccgcctcccgggttcaagcagttctcctgcctcagtctcctgagtagctgggactacaggtgcatgccaccatgcccggctaattgttgtatttttagtagagacagggtttcactatgttgaccaggctggtcttgaactcttgacctggtgatttgcccacctcggcctcccaaagtgctgggattacaggcgtgagctaccatgcccggtctgacaatgtttcttataaccttatctcagcctgtctttctagccatttattatcaactttatttccagctattccccagcaccttacatgtatactgcagattatttgctattttttgaatatttacttttcattcttctgtactttttcttgtgctgtggaataatgggaaagaatggacttcagaattgaacaaacctgacttttaatgccagtaccgttccattctagctgtgtgatccagttggcaagtcattcatcctctctgaatttgtttcctagtctgttttatttaaaacaattatataactacacctacttaaaagtcattgtggttattaagttagatatcatacctgtaagtacataccaagaaagtatctggcataaagtaggcatgtaattaatattttccatttcttcctttcttctgcctagaatacccctctctactgtagacttcctgaagaactcctcaaccttttaaaatccagcttaatggttaattcttctctgaatccttacctgggctgcttagaaaatagtgatttgcttcattatctctgttctaatagtggttcctatagactgttggctacattaacactttttctcattgcaatttagatattatattttcagatcgtattctttcacttagactatgaaattcttcatcttattttatacttgcatttactgctccttgcatggtgctaggcctgtagtaggctctcagcaaatgctgtctatattgtactctcaaatgcagctatgtcccagatagttcagcagtgaactttcacatacagttaagcattcttttgactgcataatgcttttgcttctttaccaggaccctgtaaaaatatctactgttagtaaaattgctgcttagggttcagatttttattttaataaatcttagattaataaggaactaaattggcctactctgttgttaaaaagagtcagattgttggattctattgttagtaaaatacctattgttagtaaaattatctattgtaaaaatatctattgttagtaaaattgctgcttagggttcagatttttattttaataaatcttagattaacagggaactaaattggcctactctgttgttaaaaagagtcagattgttggattccattttcataaaaagttatgtccgttaaatctaattgtcaaaacttctcctaccaagaaagaacagtgaattatctatattacttaaactatattacagtctcttcatcaaaattttgtaattttttattccagtgggatgactttacttaaaaaattttaaactcaggatttctctttccaataaatatttttaataatggagtagatatttcccattgtatccaaaaaatccattttaaaatttccattagaaaatgggaaatgatgttactttgttctacctgactgtccctcaaatatgcattttatataagaccaaccaagcaacattcaacttttaggttttcagttcctttcccatatctctaggttctacagtgattattacgcatgatttgacttcaagctgaaaggaccactgtcattcaaaatgagatgctgaagcacatactgtgcttccagagattaaatgagaagagttacattcagtattaacttgttcatgttcagaatcttatgtgtgatttactgatgattttagtgacatatgtactaaactcttaaattatacttaaaggaattgttttatgaagccagtcacacacaatacttttattttctgggttcattttttaaagtttaagtttttaattgtcaaaaatgtcaaacagtacaaaaggtcatagagtaaaaggtagggctctcttctaccccaactatttgatatcctttccagaggtaactagtatattatcactttcttgtatatcatgagttattttaaatgctggtcttgaacatttattatgtgaaattcttgttataatagttggaaaatttttattaaatagaaaggtagtctttagattgtggcacaaaccactgtggggagaggtctatacacaggataaccacattatcatctaaggtggactgggtcacttttgagagtaaaagagggcactattaatttgatactgagccagcagatacaaaccatgctctgtatgcacctattgataaatcaaatgcatgtctcttttctgtgaataattagctcatttctccatctgatctctttcttgatttgttcctttaaccaatctattacattgttttctcccctttcagactatgctgtggaagagaaaccatcacagatttcagtaatgcagcagttggaggatggtggccctgacccacttgtatttgttttaaatgcaaatttgttgtcaatggttaaaattgtaaattgtaagttataaatttttaaaaattaaaatcagatgttttactgactcatagtacataaaactttcagatttattacacacaagtatttttatatagagccacatctttttttttttctttttttttttttgagacagaatctcgctgtgtcacccaggctggagtgcagtggcaccatctcggctcactgcaagctccacctcccgggttcacgccattctcctgcctcagcctcctgcctgagcagctgggacaacaggtgcccgccaccacgcccggctaatttttcgtatttgttttttttttagtagagacagggtttcactgtgttagccaggatggtcttgatctcctgacctggtgatccgcccgcctcagcctccctaagtgctgggattacaggcatgagccaccgcgcctggcctagccacatcttactgaacactgagttctgaaaaagttggtttttataaaatgatatatcccagaggacagctgtggaactaaccgaaactctcacatttagttacaggggtgaggtaggtgaattctccatggatgaaagccaaacaaatcttgaacttatctgagttaagttcttcttgagatgagtatgttaaatcacaacttaccaccagaataactggtggtagataaattatacaggctactcaaataatttacatgctgtgttttaatcccagaaacctcaattatggtgcaaaactttatttaggaaaagtgttaactaacacacagtaaagcttcaatacatcataaattgagattcagaagaaacttctcaattgttggtgctagcatcatgggcatcaggatgagaaagacgacagtatttgagaattttttgagacagagtctcactctgtcacccaggctggattgcagtggcatgatctctgttcattgcaacctctgcctcctgagctcaagcagttctcccacgtcagcctcccaagtagctgagactacaggtgcacaccaccatacctggctaattttttttgtatttttttgtagagacaggagtctcaccatgttgcccaggttgttcttgaactcctgaactcgagtgatctgcctgccttggtctcccaaagtgctgggattacagatgtgagccactgcgccagctagtaattttgagaattatttagagaatgcatttattctgaatgagtgttaataggcaattttaaaggacagaacctctggggaaccatcctgcagttctccatgtgtacttaagttgattttggaaaccagaaacatatactacttccttagaagttctacattgatgaaatgtgggtttctggcttacttgctaatcacactcttgtatgtttggccagttattaatgcttgctaccttctaggatcagatttaaaatgaatttgcttgaaatttcaatttgccatatctagtttataaattatgcttagaaattagctaacctaagaccaggcaccatggtgcacacctgtagtcccagtgctttgggaggccaaggcagatgaatcacttgagcccaggagttcgagactagcctgggcaacatggtgaaacctcatccctaccaaaaaaaaaaaaaaaaaaaattgggcatggtgacatgctcctgtagtcccagctactctcgaggctgaggtgggaggagttcttgagcccaggagacggaggttgcagtgagccgagatcatgacactgcactccagcctgaatgacagagtgagaccctgtttaaaaaaaaaaaaaaaattagctaacctagattcttgaagtatataccatcatgaggaatgtcctatttaggtacataaagcaaggattcccaaagtgaaataaagatgtctttgtttttttgattaacatttgttttgatttacatggtggtattcataattttatttgagtcctttttcagttcctttggggatcccattgtgttggggtatgaagagtaaaagtgtcaaggattaaacattgtttttgactacatatggtttctgctgttcatactctccatatagccttaaagtgaaggagtggaactaagtagttcagaaaagccatccttttcactaatttttacagcatgaagccaagtaaagtcatgttgctgattatctagaattttttcctggaaaggactatagttaaaatagctggaatctcttggtcatatattaaatttaataaatatacataaaaatatatttcctttaggtcacaacctgaagataaagctatattattggcttttgttgtaattacttctagccttacattggtaattacttccttcgatgatgtgattttttaaaatataaaggtggaggactatgttcttcaatcacgtttggcttacaatacatagtttggttttattttagtattaatagaatgttgcttcttttaataggagttaaaagttttaagtgcgttttattattatttcttttacttccatttcaatcatttttcttttcttttcttttctttttttttttttttgagacggagtctcactctttcgcctaggctggagtgcagtggctcgatctcggctcactgcaagctccacctcccgggttcacgccattctcctgcctcagcctcccgagtagctgggactacaggcgcccgccactgcacccagctaatttttttgtatttttagtagagacggggtttcaccgtgttagccaggatggtcttgatctcctgacctcatgatccacccgcctcggcctcccaaagtgctgggattacaggcgtgagccacctcggccgtcctcaatcatttttccaagtgtttagaaaagagccagaggcattggcatgttttattttctacaataggtttttggctcaatgcagtgacagttcacagttgaattatacagactcagtgtgatctattttaatctttgctgtattgtaacacagatttctgtgcatctttttttaagagtaaggattgataggaatgtctttatttttgtgtttttattccatctgtagatgtgaacaggaagtgctggtgtttcacaaccaagggaatgcatgcagtgggtcagtctgagatagtcattcttctacagtgtttaccggatgaaaagtgtttgccaaaggatatctttaatcactttgtgcagctttatcgggatgctctggcaggtaggaatgctttatgacttagtctgctccctttgtagatgacaaaaaaattttgaattcaaatacaaaataatagtcttaactttggacttaagcatggcaggggactttgatattagtggcaagttgaagctttccatggtttgaagaaattataaattttagtattgtacctggtatagtttttattttacagaggctggaatcaaagctgtaagagaatctggtgacctaaatgtaagaatattttctttttagtggcctggggtcaggatattggtacctggtagaaggaagcatatttgtaacttacttcttgtttctttggttaacaatatttatttaatcatagtgtaaatgctaatgaatattcaaatttcaamaacaattagcatacatgactatggcttcaaaataaattgtaaatattaactgtaacaacttaaaagtaaaagcatagaggttagaagctgggaaagactaaggatattaacataaaaagaaactaagattgagagaaaagaaacacattatttgacattatagttatttattatgacattgtgttatttgacattacaaagtcagcctccctttgatttaacaaatgaggtagaaaaacggtgtaattgaactattctcgtttattgtaacaggaagtcagtacataatatctgtatttgataaatagggtttatctttgaggaagaaggcctggagagggtgtgagggtgaccggggtattaaaactattttcatgtattatttgataatatttcatacatatattaaaacaataaattattcagactttcttaatgcaataattttcattgtgggattctgtgccaaagacagtatccagaatataaaatgcacttctgtgaatgaaagggtttattgcaacattacctaaatttaacacaaaaattcagaagcaacctgaatgccttagctataggtggaaagtttaactgtgttatacttattagatgtgaggatctttttgagaactttttttggccattaaaacaatatttatgaaaagaatgtagtaacatggaaaatgctctttaaataattacagaagcaggatatataattgtatttttaatgtgatgtagattatgcgtaaaagattgtgcctttatgtcttcattagtctctacaataatttaggtgtagcattacataagggcaaggtgatacattggaaactgaccacatgatacctgtgaagtaccttttaatgtttaccctgtctgttccaaaatgtatagggttaaatctgaaatcatccaggtcctccaggccacataataccctggagctgaatttagtcctggaaataactgggaactttcacttttctcctcaatctgaatgtattcacttttaaacactctagaaaaatggcattggaggttcaagtaattgtagattcatgtgggttttgagagtgtgttagagactagggtatgggaggttcatgaatgtcttatttaggagcccatgctttattctgtaggcaatgaagaaccattgaaagtatttgagatgatgagtgacataatcagatttgcattttagaaagatgactctggaagcagtgtgaaaaatggatcaaagtccgtgagtctggtggcagttaagaagcaatttcaggataagcaaatgtatattcatacactagaatactgctcaacagtaaaaatgaactaactgctgatgtacacaacaacatgcatgaatctcacagacattatgctgagcaaaagccaggcacaaaaaagtacatattggatgattccatttatatggttttctaaaacaggcaaaattaatctttggtgatagaaattaggtcagtgtttgcctaaagtgaggtgggggtgcaggtgctagaactgactacagagagtcccagaaaactttctgagatgagaggtctatatctggattaggatagtggttatgtgggtgtttgccaaaactcattgaaatgtacacttaaaatctatcatttttataatatatagattatacctcagtaaaatttattttttaaaaagatattgcaggaatccagcaagaaattaagaaattatcaggatttaaattaaataattgcagtggaaataaagaagagtattggagagatacgaaagatgtggtgcttcaattcagtaggatttggtaactaactggatatagggggttagaggggacaagtcaaggttggcctcagattcctcgcttgagcacctaagtgtatgttggtcttcttctattcaccatcttgatgaataacagatttggcagaggtaagggaattctttgttcagtgtgctgaatttgaaataatgacatcagatgaaacatgaaaatggcagatgattatatgggtatggatcccagaagatagatctgagttaaaatacagattttggagacacagctttcctgtgatagttgagagtatcgttgtgaatgggataggcctgtgtgaagagactacggctgtagatggaatcctgagagatagacatcctctcaaggagaggatgtgaattattgcatgaattattaaaatatgtttagcataaattttttttttttttgagatggagtctcgctctgtcacccagcctggagtgcagtggcgctatctcagctcactgcaagctccrcctcccaggttcacgccattctcctgccccagcctcccaagtagctgggactacaggcgcccgccaccacgcctggctaattttttgtatttttagtagagacggggtttcaccgtgttagccaggctgatcttgatttcctgacttcgtgatccgcccgcctcggcctccgaaagtgctgggattacaggcgtgagccaccgcgcccagcaatggttatttttttaaaaaggatacttatatgtcagttcagtccattttgaactattgcaaaaattttgaaacaacaaaaatacttggaactgattacaagatactaatgatagtctaaggtcagactataatacatctaagccaactaaaaatattttctataatgtaggatagggacacgaacatatatatgtatatctaaggaaataacatttcaaaagcataagtgagacgaaagagtttttccttgaataggaatcatttcacaactcatcaaatattgggactagaaggcattttagataatttaatacaaactcttcattttttagataaggaaaatcagacctagaagtgttaatggcgtacctaaatcacagaccaagttggtggcagaattgggactgtagctcccagatcagtattgtttacattatgtcagttgcctctgtgtaccattaataatatatcagttcttaaaaacacagatatattatctatatactatacatatttattaagaaccttatttttagataatcagggtaatagcttgatatatttcactataaattttttaataagtaaaagcatattttgggtgttctaaaacggggtccccaacccacaggccatggactggtattggtccgtggcctgttaggaaccaggccacacagcagaggtgaggggcaggcaagcaagtaaagcttcatctgtatttacagctgctccccattgctcacgttagcgcctgagctctgcctcctctcagatcagcagcggtattagattctcatagaagtgcgaaccctgttgtgaactgcgcgtgtgagggatctaggttgtgtgctccttatgagaatctaatgcctgataatctgtcactgtctcccatcacccccagatgggacagtctagttgcaggaaaacaagctcagggatcccactgattctacattatggtgagttgtataattatttcatgacatattacaatgtaataatagaaataaggtgcacaataaatttaatgcgcttgaatcatcctgaaaccgtctccccttccccacagtccgtggaaaaattgtcttccacaaaacccatccctggtgccaaaaaggttggaggctactgttctaaaatgatagcaggctgggcacggtggctcatgcctgtaatcccagcactttggcaggccaagccgggtggatcaccttagctcaggagttcaagaccatcctggccaacatggtgaaaccccatctctactaaaaatacaaaaaattagccgggtgtgatggtgggcgcctgtcatcccagctacttgggaggctgaggcaggagaattgcttgaaccctggaggcagaggttgcagtgagccaagatcgtgccattgcactccagcttgggcaacaagaatgagactctgtctcaaaaaaaaaaaaaaacgtatcgcaatttattatttttctcttctgtgtagcacattgagtgaaattgacaaattgtatcttaaatttctcctgagtgtgaaaccttgaatactgtattactagcttagggttattctgccctaaatcacagaaaagccttaggagctattgaatgaacttttttataacttcctgtgaattttaaaatctaaactacaggtatttaataaccatatgtgtgttgtatatctatatatgtgtgtgtatctgtgtttcacatatatatacacacacacttttttgtcatacacagtttttgcattctgcagtggagggaaacattataatttgtgagaaattatgttctgagagtttcagaatgccttctggttatgacagtgccatcggaggttgtagactatatattgtttctccctgtctcctattcattcctccatattttgtacctgtttttttgcaaacaatctattcagaacatagacttgaatgaaattggacttgtatctaccagattgttatttctggagttaatctctggttgtttccctatcttactcaaaagctactttggctttgtattgcctttagaataaactgtgctccaacattcagtattctgcatgatctgttcctatatttttagtctcatctcctgctagtcatctctccatacttccgttgtagccaaacaaaacatttattggttcattttgtgtatattctgatgattttccatttcattacccatgattatgctactcccaaccgtgctatttccccacaccccaactgtctcaatcctatcagttgtcctaaatcttaaagaccactttctccatgaattctttcttgatgaccctcccagacagaagtagtctcttctgaactcccttaatcttttatttttaatttaattaatttatttattttgaggcagagtctcgctgtgtcgcccgggccggagtgcagtgttgcgatcttggcaccctgcaacctctgcctcccgggttcaagtgattctcctgcctcagcctcccaattagctcccaagtagctcccaagtaactgggactacaggcacctgccaccacacttggaataatttttgtgtttttagtagagacgaggtttcaccatgttagccaggctggtcttgaactcccaacctcaggtgatccacccgcctgggccacccaaaatgctgggattataggtgtgagccaccatgcagtctaatcttttattaagaaagtgtttggtgttgttatggtttcaatgtttgtccactctgaaactcatgttgaactttaattgccattagaacaatattaggaggtgggacctttaagaggtgattaggccatgagggcttcaccctcatggatgggattagtgctgttataaaaggagggggttcattcccttcttgctctctctttgggaagctgaggcaggaggattgcttgaggccaggactttgagactagcctggtcaacataatgagaccctatctgtaccaaaaaaaaaaaaaaaaaaattaactaggcctaatggcacatccctgtaatcccagctacttgggaggctgaggtgggaggagtccttgagcccaggagtttttgaggccgtagtgagctatgagtgcaccactgcattacagcttgagtgacacagtgagaccctatctttaaaaataataataatatgtcatggttcatgtttttattttatttttcaaattctgaaccttttggtaaatttattagaattatggtattgtagttttgcaaagtaacttttcaactgatgagaaagttatatggaactatttatgaagaagtgatttaagacaaaatacctaacattttttgaacacttaatatatgctaagcagtatattcattgccttatgtacactattttatttcttcttaagtacaactcagattcatactgttactgtttctatttacacatgaggaaaatgaaagacaccaaaggcctaagtaacttaagatcacacagttaggtgataagtggctgaacccaggtttaaattcacctatgttgtccgtaaatctcatgtttcgaaccataagaagtactatagtgtctcttgagctgtttgtttaagagatagaagtcttgctctgtcacccaggctgtgtagcagtggtgccatcatagcacactcactgcagccttgatctccttgggcccaagtgatccttcctcctcagcctcccaaggggctgggattacaggcatgagtcacctgacctggctcctcttgagctttcatgatcaatgtcagagatacactaaactgaggacatgaccttttatgaagtagtcatgcataactgcagtttgctgcattacaaagaactccaagaagctttctaaattcttttgatggcttgagttttagtcatattaccacttagaaatttatttattggccgggtgcggtgggtcacgcctgtaatcccaacactttgggaagccgaggcaggcaggcagatcacttgaggtcgtgagtttgagaccagcttggccaacaatggctaaaccctgtctctgctaaaaatacaaaaattagctaggcatggtggtgagcgcctgtagtcccaactacttgggaagctcaggcgggagaatcaattgaacccgggaggcggaggtttcagtgagctgggatcacgccactgtactccagcctgggtgacagagcgagactctgtctcaaaaaaaaaaaaaaaaaaaaagaaaaagaaatattagtatttcttgaaatgaatgaaccatttgcttggaaatggttccacttgagttgatgtgaggattaataaatatactttgaaacaaaaggaagctattgacacatagatatttaagttatatttgaattgaatttaaagatggctggctacttataagcatttgaaaaacagtttaaattccaaattaaagatggaaaattgtaaattactgtatctgtatattttttgaaaggctgcrtgacatacaaagactaggagattgaaagatctgctttctgctttctaggttttactttgccacttatttacctcgtcttttcagagttacttcacctctacctctaagcttcagtttcttcatttgtcaaataaaaccccaaatttcagggaaatggtaccgttctgcttacctactagcactgatctgatgattacctcattaatgttatgtaaaattactttataaaccattgatataaagcatttaacacctttgacaggtcacttagaagcaagatttggtatctattttggttatatgggttcttcactagtattggggtatatataaaattagttctgtggattcattacattgagtgcagtcgttgagaagtacctatataaattagtacattacagactttatgaattcaagagcttcagattaggtcttcagatgaaagcctttctttctttgtcaaattcttatacccactgttttatttttgccaatatctacacctgtgcagtgttacttgtttgtagatgagatggtacatgatagtctaattcagttattattggtaatctacattttttaaagtgattaatatttaaaggataaaagatatattttataatgagagtggacttcgtgaagaatctgtgattgggatgaagagagtgttaaatggaagaggcagaaaggaaatcagtatctgtggaaaataactaccaatagattctaggctctaatagggaaatcgcaaaggaataatgagtgaataccttgagtactaagccaacatatttttcacctctaagctatatttactaggacagtctttgtgaaatataaacattacactgtgtcttagtctatttttgctgctataatggaataccacagactggataataggtgatgaacagaaatgtatttcctgtagttctcatggctgcaaagtccaagattgaggggtaggcatctggtgaggacctttttgctgcatcatcccatggcagaagggcaaatggggtggggaagagagagaaagaatgtgcatgtgcgtgagggcatgtgtataagggagggcaaacttgtcctttcataacaaacccactcccaggataacagcattaatccagtcacctctcatgaggccttgcctcctagcaccaagtttccaacacatgctttttgagggatatattcaaaccacagcatgctgttgatagagttacaggaatgctgtcatgcaccctacattgtagagggaaagcatctctttaattccctattctcctccttattcaccaaagctagataaagagatgaaaaaaaatttttttctctttgacaaattatctgttgaattttgtatgaagtgtctcttatattgtatcctagaattccaggatctagggaggtggtaaagaagcaatggtaaatttggggatcttatctccctaaagttcctgacactctatccctgatcctgcagtggctgccagaaaaaatgtaaatttacttaaatcttactctaaaatcattgaaagtccccccaaaaatcatatatttggctgatcaatatatgtatatttgcattagaataataatagttataattttttgagaatacagtgttgctggtcctgttaggcattttatagatttcctttcatttattctttataacacatctggaatttaatatagtttctcctcccattttacatggacattgaggctcagagaagtaacttgccccagatcccacaacagtgaatgatcaaactagyattcaaacccatatctctgggactccaaaatctgcaatttatttttcaaaatgccatactgctacgttgatatgacaattgttttgttttcatagatctggcctagcagcttaattgtgcagccagacctgggtaatcctggagcaagagtactacccctaaattcctaaatgtactaccttaaatgcaaaatatagatgataatgtttaggtgaacatgactttcagccacaaagcttctctgagtttaaaggggaggtattcccttcacttgtggctgctactgtcaggatacctgtccgctaaaatcaaggatgcaaagacccataaccattataagaataaactctagttttcaagaaaagtaagcataaatttctctgatggagattgcttcattgggtgttattgctttcaaaggtatcaaaggaagctcgtacttggctagtgaacacattcgttgttccatcattgagcagctcttgtcagaaagtccttttgcaattctaaactgaggaaaatgtctccttaatgaagggttgatatgtttgttactgtttcattcacaaaagtattttgaattataaaatgctttggccaggcatggtgtacatgaattacatgctcacacctgtaatcccaacactttgggaggccaaggcgggtggattacttgaggtcaggagttcgagaccagcctggccaatatggtaaaaccacatctctactaaaaatacaaaaattagccaggcgtggtggtgggtgcctatagtcccagctactcgggaggctgaggcaggagaattgtttgaacccgggaaggagaggttgcagtgagctgagatcacaccacagcactccagggttccagggtgggtaacagagcgagactctgtctcaaaaaaaaaaaaaaaaaaaaagagaaacctgcttaatatgaatttagataagccctaaattatagagctatgtttcatatttgtctcaaaaaattataaacaataaatcctgtccaagcacggtggctcgcgcctgtaatcccagcactttgggaggccaaggcagatggatcatttgaagtcaggaatttgagaccagtctggccaacatggtgaaactctgtttctactaaaaatgcgaaaaaaatcagctgagtgtggtggtgcatgtttgtaattgtagctattcaggaggctgaggtgagaggaattgcttgaacctgggaggcagatgctgcattgagccaagatcacaccactgcactccagcctgggtggcagagcaagactccatctcaaaaaaaaaaaaaaaacaaaacgagaaaaaaacaacttgtctgtggtaccatcttcataaatcctcatcttcccttaatgtcttataactgtacttattaccataattcattatgttcatgagttgactttgttcacccagtgaaattataagcttggtgacagcagcttcctaatctgaacatttcttttttttttttttttttttttgagacagtgtcactctatcgcctaggctggagcgcagtggcacaatcttggctcactgcaacctccgcctcccaggttcragcaattctcctgcctcagcctcctgagtagctgggattacaggcgcacaccactacgcctggctaatttttgtatttttagtagagatggggttttaccatgttggtcaggctggtctcgaactctgaccttgtgatccacccacctcggcctcccaaagtgctgggattacaggtgtgagccaccgcacccggccttgaacatttctttatgacctttgaggtgatagttcttgagacctctaaagcaattcatacagtaaagctgtacagtttaaccaaggaaggcatcaatatttttggcttttacttagacaaacttcaacaatgtgataatataacttagtttatgctcattagaagccctgataaaattggaaaccaaattttcatttaataaatgccatttatttaaaaatcagctttttaaatgtaagtctttcatagtgaaagattgggaattactgtttggtagtgtccatccagcccagagttgcataatgtttattaaaaatatgattaattggccgggcgctgtggctcatgcctgtaatcccagcactttgggaggctgaggcaggtggatcatgaggtcaggagatggagaccatcctggctaacacggtgaaaccccgtctccactaaaaatacaaaaaagttagccaggtctggtggcgggcacctgtagtcccacctactcaggaggctgaggcaggagaatggggtgaacctgggaggcggagcttgcagtgagccaagattgcgccactgcactccagcctgggcaacagccagactccgtctcaaaaaaaaaaaaaaaaaaaaaagaaatatgattaatttattgatacaaagtagctaataaacttttttgtttttagggaatgtggtgagcaacttgggacattccttcttcagtcaaagtttccttggcagtaaagaacatggtggattcttatatgtgacatctacctaccagtcactgcaagacctagtactcccaaccccaccttacttgtttgggattcttatccagaaatgggaaactccttgggctaaagtatttcctatccgtctgatgttgagacttggagctgaatatcgacgtaagtagtaaaaacacgtttttcaaggcatgatgactaaaataatgcctgaaatattcagagccctctgtttggtgatataattcagcagaaatagtcttttgaaatagctaaactaaatttggccagtgtctgcgtgtattgggcataatgggaagcactgaaaataacgaatgaggaagttgattatgtattaccttgtaaacttactgcttttatagttcattgataaaaaacacgatcatctttagaaaagtgaatttgaacttaagtaactttattttttatagtttctgtatatgatgagcatattctttgtcacttggttggaaaacagttacgatcaattatattttacttaacatactggaagctagtggaatggaaaccactctcagttggtaagatacaggctacagaagaaggagcttccttgctcatggctttagcagcgtaactaagatgtgatttttaaaaagacattaatggttaaatgcaaactttattttaaattttatatctccatctaattaaaagtgccctgtgctaggaatccgaccacttgagtaagattctcaactctgccacttatgagctctgtaactttgggcaagtcacccaagttctctgattgtgtttcttttgtaaactggaaataataatgcttgccttctattttatattgggttgttaacaggatsaaatgagagaataaatgaaacataattttataaaccataaaacagtttatgttctcagcaagtcaacttcattcttccaccaattatttatttattcagtaagaatttaataaaggcctcccatatatcctgaatcctgggaattctgaaatagctaagatgtgattataggctctcgggaacttttataaggaatacatacagaaataatgattgtagtggtatcttgtattaaaacctgtgctcaaagttaagttcattgggagctccaagacaggctctaacttgaccagaccaggaatgaaggagtagttggaccttcagttttcttggaccagagtgcctctggattaactctgaaggaggcatatgaatcagctaaatgaatcagggaaagggaaggattgtgtgcaaaagaagcaacatgtgtatcttcctattttatacaggcatttcaaaccataaaattcaagagatgagccagactgatttgcctctcctaaggaggatcctggttaggaggtatagaagaatgaactcttggctgagtgcggtggctcatgcctctaattccagcacttttgagaggtggccaaggcaggcagatcatttgaggtcaagagttcaagaccagcctggccaacatggtgaatcccatctctactaaaaatacaaaaaaattagctgggtatggtggcgcatgcctgtaattccagctactggagaggctgaggcaggagaatcgcttgaaccctcctaaggcaggagatcatgccactgcactccagcctgggtgacagagtgagactgtgtctcaaaaaaaaaagagtgaactcttaaacttgttggaaaaagaaaaagtgaactcttaaacttattgagcacagaggaatcaggagatatttatttcctggatcgtatcaattcagtttgaagaagattgctccctaagaccttgtgggtttgtttgtttgtttgtttgtttgtttgttttggagacagggtctcattctgtcaccaaggctggagtgggctccagcccactctgtcacccattctgtcacctgggctcaagccatccttctacctctcagcctcccaagtagatgggactacaggtgcatgctaccacacccagctaatttttttgtttgtttttttgtagagacagggtctccctaggttgcacaggctggtctcaaactcctaggctcaggtgatccttctgcctcagcctcccaaagtgctgggattacaagcatgagccactatgcctggctattgtgtgtcatttttgaaacatttacatcgaaaggcttattctggttatcagaagacttaatatggctcagcatttgtctgctaccatgccaaatactttttgagcccaaaatttgatatgttctaatgagccattataattatattttgaaaattgtattagtcatgaaatctcttttaccaaagttttatgttgccaaatttaagtttgatcatttctcatttccatagtttatccatgcccactattcagtgtcagatttcggaagccattgtttggagagacggggcataccatcatgaatcttcttgcagtaagttgggaattttttttcctttgtccttactggagtttatatgggagaaggaagaaagcaattttattattttcttggtagctgtgcccaagctgcttaaggcaggtaaagatatatgctgaagaaaaagaacagtatatgtaygtgtatatatatatatacacacacacacatayacatatatattcatatgtatacacacacacacacacacatatatatattcttttgcaaacatgaagtgaaatggtacaggattccagcgcctgattatacacttaccgtccaaccttgcagaattattgtgaggactagaagtaatacataaataaaacacctagcattctgtcttgtttttattttaagactggcattctatgagtttctcttgtgtctatataggttattatccaagcaaagattggtcagagattgtacccagataccccaagccagtaaggctactgccctctgctgatggatctgaatatggactggaatttaaacttcattgttttcctttcttctgggctctctcatgtctcctacacacgtgcacaggttctgactctgttggccaagatcattggttggcttgagtccactaagttctctgctgcatatatgcacagactaggatcaatcctggatatttggaccgtttatgaagctccctatggttgtcttacctcccagaacttgccccaaacaggtttggtgaaatcaaggtaatcaagctactgggcctccctttttaataaccaccgagattaccactttgacaatgttccatagcaagtaaactccttcaagtagcaaagctcatttttttgtttgttttgttttattttgtttgagacagagtctctatcgcccaagttggaatgcagtggcacgatctcagctcattgcaacctccacctccgagcaattctcgtgcctgagcctcctgagcagctgtgactatgggagcacactaccacacccagctaatttttgtattttttgtagagagagcgttttgctatgttggccagactgatctcaaactcctggcctcaatgattcaccygcctcagcctcccaaagtgctggtattacaggcatgagccactgctcccagctgcaaagctcattgtttttacaaactaccttgccctggttgaactacctaactacctaatggggctagggggcagccccaggcaagaaggtcacagactcaattcaaagttcagtagttttcatgaaaaaaacatttctttttttttttttttttggagatggagtctcgctctgttgtccaggctggagtgcagtggcacaatcttactgcaacctctgcctcccaggttcaagagagtctcctgcttcagccttcagagcagctgggattacaggcacctgccaccacgcctggctaattttttgtatttttcatagagacagggttttaccttgttggccaggctggtctcaaactcctgacctcaggtgatccacccatctcaacctcctaaagtgctgggattacaggcatgagccaccatgcccagccaaaacacttcttaatgttaatatgcctttgatctaattccagagcactgaaatggttctttttaagccacttatacagcttttcggttgctttttgaggagtgggtttggtgatttcctccctctgtgatgcttaaaagctatatttccagttatctttttttttttatttctttaaaaaattttgttttgttttgttttttgggacagagtctcgcactgtcgcctgggctggagtgcagtggcacgatctcggctcactgcaacctccatctcctgggttcaagcaattcttgtgcctcagcctccccagtagctggaattacaggcacgaaacaccatgcccagctagtttttgtatttttagtagagrcgcatgttggccaggctggtctcaaactcatgacctcgagtgatccacccacctcagcctcccaaagtgccttttgcctgttttttaattgggttgtctttttgctgctaggttaaatttgttatatattctggatattaactccttttcagatgtatggtttgcagatattttccatttckgtaggttgtgtcttcactctgttaatagtttccttttctgtgcaaaatctttttagtttgatgtaattccatttgtctatttttgcttttattgcctgtgcttttgggatcttatctaaaaattcattgcctagcccaatattgtgaagcatttgccctgttttcttctaatagtttcatagttttgggtttaaatttaagtctttaatccgtttttagttgatttttgtatatggggagaggtgggggtctagtttcattcttctgcatgtggatatatccacttttccaagtactatttattgaagagagtcctttctgcagtgtgtgttcttggcacctttgtcgaaaattagttggctgtaggtgtccaaattcatttctgggccttctattctgtactgttggagtatgtgtttgttttggccactactatgctgttttggttattatagttttgtagtatatttggtcaggtagtgtgatatctctagctttgttctttttgctcaggactgttttggccatttgaggccttttgtggttttataagaatattaaggttttggtttttttttctgtttctgtgaagaatatcattggcattttgatagagattgcattaaatctgtagatacctttgggtagtatggctattttcacggtattaattcttccaatccatgaacatggaatcagtttcctttgtcaatgtttttttttttttttttttttgagacggagtcttgctctgttacccaggctggagtgcagtggcgcaatttcggctcactgcaagctccgcctcccgggttcacaccttctcctgcctcagcctgccgagtagctgggactacaggtgcccgccaccacgcctggccaattttttgtacttttagtagagacggggtttcactgtgttagccaggatggtctcgatctcctgacctcatgatccgcccgcctctgcctcctaaagtgctgggattacaggcgtgagccaccttgcccggccctttttcaatgttttagaggtttctttgtaaagatcttttacctcttaactaagtgtattcctaggtatcttattttttttatagctactgtaaatggaattgttttctttattttttattagcgtatagaaacactactgattttacatgctgattttgtatcctacaactttaccgartttgttcattagctctaacaggtttttggtggcatctttagggttttctatgtatagggtcatgtcatttgcaaacaagcacaatttgactttccagtttggatgccttttatttctttctcttgcctaagtgctctggctaggactatgttgaatagaaaggattaaaatgggcatccatgtcttgttcctgttctttgaggaaaagatttccactgttcccattcagtatgatgttagctgtgggtttgtcacatatggcctttattgtgctgggctgcttgtccagctgggcacagcaggccagccagctgtgtgttggtttctccactgtacaggtctgtctgttccctggggcagggaggtgccatgtgagttcagtgccagggctccctcattctgttgggcctaggctctcagcagctggatgatggtgatacagctacatgtgtgtgttgtggactgacagtggagcttcagagatggagagatgcagtggcaattggcccccaggcaggatgaactctagcagtgggtccagtttcaagatggcaccatgctatgactgggaatgagggctgtatgacatgggctccaactctggagcagtgtagtcctgtgaactgcaggcaactacaaactggattcagggtttgtgaggaccgcgggacgaggctgcagtggtcatggggaccatgggtccccagcttaccctttccccattagaagtagtccttcctgactccaggccactccttgcagggaggcagtgcggcagaggcagagtgcttcgctcccgtctctgtggtgctatctggggcatctggtgctccacaggaatttcagcactcccctggtgctctccagcatacttccacagccactccagttgaaatatagtttgtttattgttgttttggtcccttttgttgagtagaggggagcaagagccagacaactccagtcaaccatcttgctgatgtcactgtcgtttagagagaacaataagaaaaaaaagtcttggctgggcgtagtggctcatgcctgtaatctcagtactttgggaggccaaggcaggcggatcacgatgtcaggagtttgagaccagcctggctgatatggtgtaaccccgtctctactaaaactacaaaacttagctgggcatggtggcacatgcctgtaaatgccagctactcaggaggctgagccaggagaatcttttgaacctgggaggcagaggttgcagtgagccaagatcgtgccactgcattccagcctgggcgacagagtaagactcagtttcaaaagaaaaagaaaaaaaatcttgtagatttacccatctagttgccatttccagtgtttttcattcctttgtataactctgtattttcatctggtgtcattttccttctgccaaaatgattgcctgtaatatttcttacagtgtaggtttgctgctgatgaattattttagcttttgtatttctaacaacatctttatttgatcttcatatttggaagatacttttggtggttggagaagtctaggttgagttttgttgtttaggtttttttcttctttgagtgtttttgagatgttgctccactgtcttctgctttgcattgttttccctctcatctttgttcctctctacataacaattttttcttttcttaacgttgtttttctttttccatcttttttttttttttttttttttttggaaatagggtctcactctgttgcccaggctggagtgcagtggcacaatcacggctcactgcacccttgacccacagggctcaggtgatccccccgaccttggcctaccaagtagctgggactacaggtacgtgccgctatgcccagctaattttgtttattttttatacagacaaggcctcgcagtgtttctcagactggtctccaactcctgggctcaagctatccttccacctcagcctcccaaagtattgggattacatgcatgagccactgtgcctgaccttctctggctagtttcaaaagctttttaaaattacaagtttgaagcaaattgattataatgtgccatagtgtagttttcatgtttcccgtacttggggttcattgagctttttgaatctatgggtttatagttttcatctgatattttttctgttcatccccttctctccctgaaggagattactccaattacatatatatcaggctgcttgaaattgtttcacgtcttactaatgttctttttatttctttttcagtcttttttgtctcttgttttcatttaggatgaattttattgctgtgctctcaatttcactaatcttttattttggtttaagctgctgttaattctatcaatcttttaaacaatctcaatcaaatactttgattttcatctcttgaagttatacttgggtcttttaagatcttttatgtctctgcttaacattttgtacatgtagaatacaatataataactattgtaatgcctttagtaattctaacttcttgtataagttctggctccgtttccatggattgattttttttcctttattttgagttgtattttcctgcttctttgaatgtttggtatttttttattggttgccagacattctgattttaccagttgggtgctggttatcaatattcttgagctttttttgcaagtaatgaagtcaagttacttagaaaaaccctccatctcacatcatattctacatttcagtaaatggcagttccagtcttctagtagccctggctataaaatttagaatcatctttaacttttatcatttgttcacattccacatccacagtggcaaatattatcagattttcctttaaaatatgtctggaaacaggctgggcgcagtggctcacacttgtaatcccagcattttgggaggccaaggtgggcggatcagctgaggtcaggagtttgagaccagcctggccaacatggcaaaaccccatctctactaaaaatacaaaaattatctgggcctggtggtgcattcctgtaatcccagctacttgggaggctgaggcagtagaattgcttgaacctgggaggcagaggattcagtgagccaagattgcgccactgcactccagcctggttaacagagcgagactctgtctcaggaaaaaaaaaaaaatctgtatctatatatctagaaactgacaacttctcatcactttttaaactgttaacatcctggccaggtgcagtggctcacgactgtaattgtagcactttgagagaccgaggcaggtggatcacctgaggttgggagttcaagaccagtctggccaacatggtgaaaccttgtctctactaaaaatacaaaaattagccgagcatggtgacgcacatatgtaatcccagctacttgggaagctgaggcatgagactcgcttgaaccctggaggcggaggttgtactgagccaagatggcaccactgcactccagctcgggcaacagagtgagactccatctcagaataaataaataaactgttaacatcctggtctaagctctcactatctcctaccttgattgtttttatggtatttatctgatcttttcttccattcttcctcccttaccacctattcattaccaaggagtcagatctgttaaaacaggtcaaaagcctcctaaaggcaaaagtcctcacggtgacctataagaacctatgaaatctagccatttgctattactttgaccttgagtccaccactcttgttcattttgtttcacccatactggatagatgatgtgttagtgtgtgtgtgtgtttccttacagatattcattgagtgcctaagatgttccaggcgttaaggatatagcaagaacaacacaactgagagtttgtactctcttggagcttcagagggaggagacagatagttaacaaataaatacagaaaatgttaagtggtggtaaagcagggtagacattcaaaaatattttttaatgttgtgtataagaggtatatgataatgtttggtttacttataagagtttaaagactaaagagctaaaatacatatagtggggctttcattatacatttccttattatttaaataaataggatctttcaatattgacattttttccattcgtgttaattttattactataaattaaaccctaccattgatgaattaatttattctgcttcaatctgctttggcccaggacttcagaaattaccagtataccttgccagtagttcaaggtttggtggttgatatggaagttcggaaaactagcatcaaaattcccagcaacagatacaatgaggtaagatttaccatgaaggcgtatttttcatagttgaaaacatgagtgaaggtgaaaaatgcatgattatatataaattttacttataattaattaacaatgaaatcagttaataatattgtatggcttagttcaattatggggaatttcattacaggaagacaagatgtcaaatttctgacctagtggttcattggatgtgtcattttaccttttgatgttatgataattagtattagatttgcattttgattaggtcatgaaattagccttgtatctgtaatattagtggtgagatttttaaaatgtccccactcctactataaatatttatttatttatttatttattttttgagatggagtctcactgtgtcgcccaggctggagtgcaatggtgtgatctcagctcactgcaacctctgcctcctgggttcaagtgattcttctgcctcagcctcccaagtagctgggattacaggcacccgccaccatgcctggctaatttttgtatttttagtagagacgaggtttcaccatgttagccagactggtctcaaactcttaatctcaggtgatccacccacctcggcctcccaaagtgctgggattacaggcacgagccactgtgcccagccgggtttctttgtataaaataatttttccttcctttttcctttttttttcctttttcatttcattttttcttcatttagccactaaatcatttatgcgttgaataaacattatgtacttggtatgcacgtagaatcacacagatgttttattggatttgtgagctcagttctcagcattattatgagaatgacctctgtgaagaaagcttttagccatgactttccacgtgatttttttttttttaaggatattagaaaatagtagctagaatgtgtgcttacttttttctgggatacaactagcagtcttcagcatttagataatcctgccttggagtatcaaggagtaatcgatgagactaggtagagtcaaatctttaaagtgaactatttgtagttcacagatcttgctctgttgcccaggctggagtgcagtaatgcaatctttcatggcctaaagaattttaaaagagattgtgctttgaaaacctattttatttctcaaatttgaaatattattgtctatttcacaaacatgtattaaatatattctgtgatttgaaatataaagatgagataagaacattaggcctgctggccaagcgcgatggctcacacttgtaatcccagcactttgggaggccaaggcaggtggatcacctgacgtcaggagtttgagaccagcctggccaacgtggtgaaaccccgtctctactaaaaatacaaacattggctgggtgcctgtaatsccagctactcgggaggctgaggcaggagaattgcttgaacatgggaggcagaggttgcagtgagctgagatctcaccattggactccagcctgggcgacaagagcaaaactctgtctcaaaaaaacaaacaaacaaaaaccttatgcctgctttcggagcgtttgctgtccaggaaaatgatggcatcagtggcctgtctggagtggctgctgccatcatgctggctgcagcagggtggtgctgccagggctgcatactccgtggagcctgtaggagccggggacaagtgggagccccaccccttccgagttggtggggtgggcctcccaaggtgcagctgcccaagttatggctgcagacctgggccttctgctccatggagcaggcaggagctccccccttgcaggcacagctgtagctaccsgagttgtggctacggacccaggcatcctcgtgcttgggaaggcccccctcccttacagccctggaaatgcctgctcctactgcctggcttttccctgctgtcagcacccactccaatctcagagcaaagtcggggcagtgctgacacaccagtgccctgccgccttggccccctctggactttgggcactgacaaacataggaagtaagctgatgggggatgtgtgcagctcaatgctggcctgcagacaccccatggaacctacagcttgggcaccatgaatagcaggaggcaaacacgttcctgagcagaagaggccaggtccccgatgaggttccaccttcaggctaggaagggcctgaaggctggggggccaggccaccagtcccatggactgtagtgggaacttggggtgccttttctcagcctgcccatggctgtccatgcaccagtcggtgcatgcttcccctcctctgaggcctgtaaaagccctgggatcagctagagctgagcagacatcgggatgaccagctgcagagaggagctgcccactccagggtctcctctctgctgagacctgcagacgctgagatgaccagctgtagagaggagctgctcactccagggccgcctctctgctgagagctgaatactcgatttgacaacctgcctgtagagaggagccacccaccccaggccctcctctattacgtcactcataaagctcctcttcactttgctcaccctccacttgtctgcatacctcattcttcctggatgcaggacaagaactcgggacctgccaaatggcagggctgaaagagctgtgacacaaacaaggctgaaacatgccccttgcttgccacattgcaagtgaagagaaggagagaagagctgcagccctttggggaacccaagcttgggagctccctgagccagggctgtgactccctctttggggccctgtggttactgaagtctccaagcttccgaatgtcaccacattccctggtggcagctgtggaagctgcttgcggtgcacctggtccagctgcagcctggcagagagccagggcctgtgcaggcacctggagctacctgcctcactgcagcagccagcatgcctgactgtgtgcagtggccggaacccacgcttgctttctcacacaccccttgctgctccatgcctggctcacccttgacagacatggkatccrggctggtagtgtaagcctagcacagcctgccaggctgagtggccggaacaagcccagcaggcctgagcaaaactcaggcaaaggcaccactggccacagagctttccagccagaaaagcaacacaccaaggatcctgtaacagttagatgatcagatgtcattcccaagcaaataacatattgctatccttgatgtttgcgaggtagtgctgtgtgtttagaaattttgtttgtacaagtatatctgtaaaagctgaggcgctcatagttatttctttttttttgttttgttttgtttttgagacagagtcctgctctgtcacccaggctggagtgcrgtggcacaatcttggctcactgcaacctacgcctccaggattcaagcaattctcctacctgagcctcctgagtagctgggactacaggcatacaccaccatacccagccaaaattttgtatttttaatagagacaggatttcaccctgttggccaggctggtctcaaactcctaactgcaggtcttctacccaccttggcctcccaaagtgctagaattacaggtgtgtgccactgcgttcagcccccatagttacttcagtactgactggacactttcacaacaatagctcctattcatataacctgtttttatctgaactctgttgcctccgtttatggtgtgcaggttcagaatcctttgttctaaaagagtaacagtatttcttgtcatttattttatggattatgtatcaggtctttttcttacctgattagcaaactgaattttcttttttcttctttttttttttttttctgatacggagtcttgctccgccacccaggctggagtgcagtggagcgatctcggctcactgcaagctccgcctcccgggttcacgccattctcttgcctcagcctcccgagtagctgggactacaggtgtccgctaccacgcccggctaatttttttgtatttttagtagatacggggtttcaccgtgttagccaggatggtctcgatctcctgacctcgtgatccacccaccttggcctcccaaagtgctgggattacaggcgtgagccactgtgcccggccacaaacaattttccttctgatttaatttttattttaactcaacataattttatctcctacaatctcatacagttaaattgtgttgtgtctaataattccacttcatagttgaaaaagtaatttcttttttcttttcttttctttttggaarcagggtcttattgtgtcaccaaggctagagtgcagtggcacaatcatggatcactgcagtctcaacttcctgggctcaagtgatcctcccacttcagcctcctaagtagctgggactacaggcgtgtaccatcacacccagctaatttttgtatttttttgttttgtagagagaggatttctccatgttgtctaggctgatcctgaactcctgggcttaagtgatactcccatcttggcttccctaagtgctggaattacaggcatcactacacccggccataattttcttgtacattttatttaatcacaatattcttcttttcctctcattcattttttccatttatactcatagtctttcttattattgcccatattttgtgctcttttgttcatggcttttgcagagctggttccttattgattcatacttcccctactcttcacctgcctaacccccactcattattcaggtgtcacygtaaatgacatttttttcacatatactttgatttaactcccaactggggtaactctattatatgcattcctagaattctatgcatactatttgtaataatcagtacatttgtaattccttgttgtgtgtctgttttctctgctgtgagttccatgagggactatgtctatcttgtataccacaggtatcatcagcaaacaccctagtacggagtgggttagcaagaaatatctgttggatgaagacatgaaacagatctaatatagataaaacaatatgaaaacaaatggtgaaatttattgcaagtatactaaaggtacagagaaagtagatctctagaggatgaatagaatagacaccaatgtttcttaatttcttattgaccctgaatccctaacagagcaacacattgcatgtaggagatgttcgtaaatgttcaccaaataactagatgaatgaaagatttgaaatggataatgaatgataactaggcactagaaagagaagggcagacggcatggtgactcacgcttgtaatcccagtactttgggaggccaaggtgggcagattgcttgagcctaggatttaaagatcagcctgggcaacatggcaagaccccatttctacaaaaaatacaaaaaattagctgggcatggtggcgcatgccccgtagtcccagctacttgggaggctgaggtgggaggatcacctgagcccaggaagtcgagactgcagtgagctgagatttctccactgcactccagcctgggtgacagagtgagaccctgtctcaaaaacaaaaacaaaagcaaaaaagggcagaaaagaccttaagtgaaaagggggatagatacctgcctacacaaaggaagggaaggagcatagctcatagggaaatgggagacaacaaagtgcctagcaaagagggggttaaagcagactgatggctttgtgggatgtgaggttgtactaagactgctggcttcaaaatccactcagaggaatttagattttaatatgataatttataaagagcttttataggttcttaagcagaaaaagtgacttaatgaaagcaggattttggaaaactgagtttggtggctatatggaaaatgaggagggagggagggactaaggaaagactttaagcttagaaagctagaagatagtacttctgacggcatggaaattttaataagcattgtatataaaatttctaatctcttttgtcaaggccattaaagatccttgttggttaaggtcacctggttcatatatatatgtatttttttgagacagagtcttgctctcgctctgttgcccagctggagtacagtggtggtgtgatctcggctcactgcaacctctgcatcccaggctcaggtgatcttcccacctcagcctcctgagtagctgggactacaggcacacaccatcatgtccggccaaattttctgttaatagggatgagatttccccttgttgcccaggctggtcttgaactcctgggctcaagcgatctgcttgcctcagcctcccaaagtgcttggattgcaccattgcactgggcctcatgttgttacaatgagattattttcaccattgtattaactaataataaatatttagtatgtaccaggcactattctaagcatatatgtatctttacactaactctatgacatgagtatgctaactacctttttacagatgaggaaattaagatacagagaacttagctgggtgccatagtgaatgtgtatagtcctaggtacaggctgaggtgggaggatcacttgaacccaggaggtggaggccagcctaggcaacatagcaagaccccatctcttaaaaaagcaaaaaaagacacatagaacttaagtaacttgcccatgatcgtacagctagcaagtggtggagctgccatcaaacctgggctttctgattctggtgtccctactcttaaccactgcactgtagactttagtttaaataattaccaatttagttttagggctgatgagttaaagtgattgtatgtggttctatttacattttgtatgtaaccagatcactggcatagctagtacatgcacttaaatactgaagtctcatggaacggtagaactaaaattacctctggggcatttcctaatatgtgactagttttttgttgttgttgtcattgttttcttttttgagacagggtcttgctgtgttgcccaggcaggagtgcagtggtgtaatcgtagctcactggtagcctcctgggatcaagggattcccccacttcatcccctgaagaagctgggactacaggtgtgcaccactgtgcgcagctaatttttaaattttttgtagagatgaggtcttactgcgttgcccaggttggtcttgaactcttgagctcaagcagttcttctgccttggcctcctcaaagtgctgagattacaagcatgagccaccatgtctggcaatgactgttatttaatatgtttgtttaagatcagaaaaatgatgagccatagtgaaagaagaagagatgttagaatcaaatagaccttggattgatttttttttttttttttttgagatggagtttcactcttgtcacccaggctggagtgtggtggcacgatcttggctcactgcaaccttcacctcctaggttcaagcgattctcctgcttcagcctcctgagtagctgggattacaagcrtgcaccaccacgcccagctaatttttgtatttttggtagagacagggtttcaccatgttggccaggctggtctcaaactcctgaccttaggtgttctgtccgcctcagcctcccaaagtgctgggattataggcgtgagccaccactcccagctggattgatgtttaattactagctgtattaccttagtgggttaatctctcttctggaatatgggtatgctcatattgtgaagttttgtgacatttcaatcacgtgtcaaataactagtgttgtgtattagcctggtatactataattgtacataaattgtatgctattgttgttgtgttcatttttatcattcagattaattgttcatatggttaatttttatttttatttatttattttttttttagatgaagtctcactccatcgcccaggctggagtgcaatagtacaatcttggctcagtgcaactttcgcttcctggactcaagcagttctcctgcctcagcctcctgagtagctgaaattacaggcaaacgccaccatgcccagctaatttttgtatttttagtagagacggggttttgctgtgttggccaggctggtctcgaactcctgaccttaggtgatctgtccacatcagcctcccaaagagctgggattacagacatgagccaccacacctggcttcatttggttaacttattgaacttgtgttacaaacttctcattttcatgtgcttgtaggatgtatctaacttcccaatatagctaaattcccttaggatgtagaggrcatctgggtaaatctataagaaggtgaagtggcgaagactcaaaacatcatttaacaaaatatatattgaatctaactgtaggtatttaatataaggaaaagaagactataaaggaatagcacagcatccaccattaatatgcataggctctattacactttgagactcatgaggttatttggttataggatatacttaaccctagggttcccataaggatgtggaacatgaaccatagcttgatagtagtacagtgtcaggcgtttgttacctttgacagtctttgcaacaacccatgtagcatctaacgtagctaattgggagcatctttttgggccttcctccagccccagataactgctcaaatgacaagattcacatcaggcaggtgtaggagctgtcctggcttagaagtcttattcctgacagcaaccaatatctcttggaaaaacttcataggcatagattccagggtgtctctaggggacttgctctgctacaagagtgactattgaagtaagaccaaagttatggctatctatcaggggtgtacggttctccctgttcaaatataatttattatctttcacttttgcccatgttggaatagtaaggattgattgtatggattgaattgtgtccctctaaagttcatatattgaagttgtaacctcccagtacctcagaatatgactttatttggagagagggtctttacaaaggtaatcaagtttaaatgaagtcattagagcaggtcgaaatccaatatgactggtgtccttataagaaggggaaatatggaaacagacacacatatagggaagatgatgtgaagagacatagggagaagatggccaactacaagccaaggatagaggcctggaaacagatccttctttcacagccctcagacggaactatctctgctgatgttgattttgggcttgattttggacttctagcctccagaaatgtaagacaatgcatttctgttatttaagccatccagcttgtactttgatatagctgtgcaagcatgctatcacaccagtccaccttaaacaactaaatatcaagacaaagtatgataaaaacaaaagataatgggcagagaaggtgagtcttctgcttaccctatcttactgcctgtagttttcaggccatagagcgggtaggggaaacccaaactgacttagaggtctccctgacttgaggagacagagttgagaaatatagagagcctacgatggttagaatttgcaggaccgattgccagaagtgttttaaaaattcaggagatctggaaagatttctggagtcttagctgattacttactagtcagtgtgtctatacgaggaaagcactgcaaagaaatgggtagaacaattctcacagggccaggaatagtttgtattcttaccagccagagtgacaaaggttcttgtactacatgggccacattatgtctaatgactcaaattatgtacagattcaaactgctctgatcctacctaataagctttaaagaaagcttgaaaaggatgaaagaatgggcacattaaggagagctatggaagatataaaaaagacccaaatcaagctttaagaaatgtaggtggcaacgggatgaaaagtatgttggatgaaattaaatgcagtttagacaatgctgaagaaaaaactcgtgatcatgaaaacataacaacagaaatgatccaaaatgaaacacagagaaaaggctgaaaaattaaataaacagcacgtcatcgagttgtggaatgtcaggcagccaaattctgtaattgaagtacccaaaggagagaaaaggtggtggacctaaaaaatatttgaagaaacaatggttaaaaaatttccaaatttaatgaaaattataaacttacagatccaagaagctcaatgaaccccaattgcaagaaacaggataaaaactacattaagaaatgttatgatcataatcaaattgtataaaaattcacataaagagaaccttaaaagcagcttgagggaagaaatcttccttatatacttaggtattttgcaaatacaaaagtgacagcatatttctcatgaaaacaatgcaagttgcaagacagtgcagcaaaatctttaaaatgctgaaaagaaaaactgtcatcctatattttatacccagtaaaaatacgttttaaaaatgaaggcaggctgggcgcagtgactcacacccataatcccagcactttggaaggccaagatgggcggatcacttgaggccaagagttcgagaccaaactggctaacatggtgaaagccccatctctactaaaagtacaaaagtacgccaggtgctgtggctcacgcctgtaatcccagtagtttgggatgccaaggcgggtggatcatctgagctcaggagttcgagaccacctagggcaacgtggtgaaacctggtctctactaaaaatasaaaaaaattaaccgggtgtggtggcgcgcgcctctagtcccagctacttgggaggctaaggcaggagaatcacttgaggcaaaggttgcagtgagccgagattgcaccactgcactccaacttggactacagagtgagacccggtctcaaaaagaaaaaaaaaagcaaaaaccgccaggcgcggtggtgggcgcctgtagtcccagctactcaggaggccgaggcacgagaattgcttgaaatctgggcggcagaggttgcagtgagctgagatcgtgccactgaggcaaagcgttttctcggatacatataatttatcaccaacagacctgttccacaagaaatgtaaagtccatcaaggagaataccaaatattggaaatctggatctacacaaaggaatgaaaagtgacagaaatgataaatttataggtaaacataacatctttttaaaagacaattaactgtttcaaattaaatgtttggccgggtgcagtggctcatgcctgtaatccctgcactttgaggggctgaggtgggaggattgcttgaagccaggagttcaaggacagctaggcaacaaaatgagacaccatctttacaaaaaatacaaaaattagctgggtatggtggcacataccagtattcctagctactctctaggctgaggcaggaggattgcttgagcccagtgattggaggttgcagtgaactatgatcacaccattccactccagcttgggcaatggaatgagaccctgtctctaaaataaaataacatatattaaatagtaatgtattgcggaatttataccatatgtagagacaaaaatgtagaacggtaacaaaaaggccagggaagaggatatggaagtatatgacatgtgatgtggtataattttacttaaaagtttattgataagttaaagatacgtaatataaacccaaaagcaaccactaaaaaaatcaaaatgggtaggtatatctaatcaacaaaaataataaaatggaatcataaaagaaggctgaaaaagataacaagagatgggacaaataataaatagcaagatagtaaatttaaatccagccatattaaaaaaaatgactcaaatataaatgatctaaataccttcaagtaaaaggcagagattgtgagactgaataaggaagattcatctgtatgttgtgtaagaaacatacgtataagaaaaacacggccggggctgggcgtgatggctcacgcctgtaatcccaacactttgggaggccgaggcaggcagatcacttgaggtcaggagttcgagaccagcctggccaacatggcaaaaccccgtctctactaaaaatacaaaattagccaggcatggtggtgcatgcttgtagtcccacctactcgggaggctgaggcaggagaatcacctgaacccagaaggcagaggttgcagtgagccgagatcctgccattgcacttcagsctgggcaacaagagtgaaactccatctcaaaaaaaaaaaaaaaaaaaaaaaaaaagaaaagaaaccacagccgggtgcagtggctgatgcctgtaatcccaacactttggaaggccaaggcgggtgcatcacctgaggtcaggcgtgtgagaccagcctggccaacatggtgaaaccccgtctctagtaaacacaaaaattagctgggctttggtggtgggtgcctgtaatcccagctactcgggaggctgaggcaggagaattgcttgaatctgggaggtggaggttgcactgagccgagatcacgccactgcactccagcctgggcgacagagtgagactggtctcaaaaaaaaaaaaaaaaactaaatgggtagaaaagatagcatagtaatattaattaaagctgaaatggctatattaatatctaggttatttcagaacatatattacaaccagggataaagaaatacataccatatttataaagggatcaatttatcaaaatgatacaacaatttcaaaacatgtatctaaataacagagcttcaaaatgcacagtgagagaactggtaaaacaaaaggttaaatggagaaacccacaataatatttggagatttcaataaccctgtgtcactaattgaaggaagtagtaaatagaaaatcagcgggactatggaaaacttgaagaacacagccaattttacttaattgatttttataaaatgttccgcacaacagcatcagaatgcacattcatttccagtgcacacagaacatttacaaaatagaccattttstgtggtgtaaaagaggtctcaataaatgtaagatgattcaaatcatacagaatgtggtctgtgaccacacagctttaaataagaaaccaatgccagaaagatctctagaaaattcccaaatatttggaaataaagtgtacatttcccaataatccatgggtcaaagaataaaccaaaaggaaaattataaaatattttgaactgcttgaaaatgaaaacatgagatataaaaattggggatacagctaaaacaatgattagagataaatttatagcattaaacccttgtattagaaaaaaaggccaggtgcggtggctcatgcctgtaatctcagcactttgggaggttgaggttggggggatcacttgaggtcaggagtttgagaccaacctggccaacatggtgaaaccccacctctactaaaaatacaaaaaaattatccgggcatgatggtgcgtgtctgtaatcccaggaggtggaggttgcggtaactcgagatcacgccattgcactccagcctgggtgacagagcaagactctgtctcagaaaaaaaaaagaaagaaaaaaagacatctcaaatcaatgacctactcgtctaccttaagtaattagacaacaaagagtaaatgaaatacaaaatagaagaaataataaagataagcaatccataaaatagaagacaaaaacaataaagaaaattaatgaaaccaaaagccagttctttgagaagagcaataaaattgataaacctctagttagactgattagatagggaaagcacaaattacctttttaggatgtaaaagagggaaactatcattacaggtccgatagacagtatgaacatgttttggtcagtgtgcgttcaacttagataaaataggcaaattatttgaacagtaagttttcacagctctcaagattaaatagataacctaaatagccctgtatttattaaaagaattgactttattgtttaaaaccttctcacaaagaaaagtcctagttcagatggtttcactggtaacttaacaatgaaggaagaaataacaccatttctgtgcaaacacaccaagaaaatagaagagaaggaatcttactctatgaggtcagccttatactaataacaaaaccaaaaaaagacattacaaaaaatgaaaactatacatcatacctctcatgaagttatttgcataaatagttaacaaatttttagtaaatccactctaacaatacataaaataataatgtatattatgactaaacatggtttatttcaggaatgctaagttggtttaacattcaaaactcattccatagtttaggatacaggatcctttaacaggatgaaaaaggaaaaccatatgatacagcaaaagcagttgacgaaatcctacttccattcaagattagagagagcatgattgtatgtgtgtgtgtgtgtgtgtgtgtgtgtgtgtgtgtgtatcttggcaatctaagaagagaactttcacaagctaatgattatctatgaaaaatctataacatctctaatggtaacagactgagtgcttcccctttaagattggaaacaagaacgggatgttcactcctgtttttattgagcattgtaatggagcttctagcccatgtaataaggggaaaaaaaataagagtcataaaattatatatataaaaaaagactgtcggtattcatggataacatggctgtctatgtagcaaatccttatggagtctacaaaatggccactagatctactaagtgaagttagcaaagtcgtgagattattgtataaaaatcagtagtattttggtatactagcaatgaacaattgaatatagaaatttaataacgatacagtaggccaggtgtggtggctcacacctgtaattccaacactttggaggacaaggtgagctgattgcttgagcccaggagttctagaccagcctgggcaacacggtgagaacctgtctgtacaaaaaatacaaaaattagccaggtgtcatggcacatgcctgtagttccagctactcaagaggctgaggtgggaggatcacttgagcctaggaggcagaggttgcagtgagctgagattgtgtcactgcacttcactctgggtgacagagtgtgaccctgtctcaaagaaaaaaccacaacatcaaaaatatgacataatttgggataaatttcttaaatgatctgtaatacttatacactgaaaactacaaaatattgttacgagaatttaaagacctaagtagagatatataatatttatggattggtagactcagtactgttaagattgcagtagtccccaaattgatctgtagcttcaacacaatcccaatcaaaatacgagtaggcttttttataaataaaaattggctgggcacagtggctcacacctgtaatcctaacactttgggagcccgatgtgggcggatcacatgaggtcaggagtttgagaccagcctgaccaacatggtgaaaccccatctctactaaaaayacaaaattagctgggcgtgrtggcgcatacctataatcccagctactcaggaggttgaggcaggagaatcacttgaacacgggaggtggaggttacagtgagccgagatcgcaccattgtactccagcctgggtaacgagcaaaactccatctcaaaaaaaaaataaaataaaaacaaataaaaattgaggtactgatcctgaaatttatatggggataaaaagaacctagaagagccaaaacaactttgaaaaagaacataatagccaggcgcagtggctcaggcctgtaatcccagcacttggggaggccaaggtgggcagatcacgaggtcaggagatcgagaccatcctggccaacatggtgaaatcccatctctactaaaaatacaaaaataagctgggcgtggtaatgtgtgcctgtaatctcagctacttgggaggctgaggcaggagaatctcttgaacccgggaggcagaggttgcagtgagctgagattgcgccattgcactccagcctggtgacagagagggggagattctgtctcaaaaaaaaaaaaaaaagagaaaaagaaaataattccaggacttcttagatgatgttaagacctttattttttttgacagaggttcgctcttgttgcccaggctggagtgcaatggtgcaatctcagctcactgcaacctccgcatcctgggttcaagtgattctcctgcctcatcctcccgagtacctgggattacaggcacatgccaccacgcccagctaattttgtatttttagtagagacggggtttctccatgttggccaggctggtctcgaactcctgacctcaggtgatccacctacctcggcctcccaatgtgctgggattacaggcattagccaccgtgcccggctgttaagatgtattttaaaagtagagtgatcaaagcagtattgtttgggtgtaaatatatatgaatagaccaatggaacagaacagagagtcaaaacatagatgcttacagatgctcaatagcttttccgtaaagatgccaaggcagttcattagcaaaaggataatcttttgaacaaaaatggtctttataattgtatagccagttgtttgaaaaagaagatgaacctcaacctttacctcataccatgtacaaaaattaattggaaatggttcatagatttatacagagttaaaactaaaacttctgaaagaagacataagataaaaatcttagtgacctttggcttgaaggagggtgagggaaccatatattacaaaggggctcaaggaaattttggggggtgattgcaagtgcctttttatgagtatatgcacatgtcaaaattcatcaaattgtacactttaaatatgtgtaattcatcagttattttaaatataactgtaaaagaaaatacatcattttttttttctggtaatgtaatagacgttcaaactttgatcaggtcactgcagtgatatagccaaagagttaacctatcgaagtctcacacaaaaaggaacaaggttttgttaactctttactcaacaccaaaaagataggaatagagaagtttatgttggttgtgatacaagaatctgtgaaatcatgtatttgtacaattctccatcttgtataggacaggctgaaaaataggctgaatggcctcttgagattctttcccactcttaagcttctaaaataggagttttggtttattttaatttgaaactacacatattcttcagagaagtgtgaaattacaaaagcataatttcataggttctttgtagcactggcgagaacagatggcgctaaaatctgtttgaggaatgtttgattctctggccttcaaggaatacatttcttttagggaattaggagctgatagtcctcttcttaaaggaatgaaaggagttggtcaaaggtcctctggagaatagtgcagaggagagagatgatgttccattgattattggtatagcttttcctagtttatacataaaagacagtatttaacaatagatatgttcaaataaaagaatcctcaagaagaagcccatgatactgtacctccactgactgcaagaggaggccactgctgaaccccacatgcccaggatagtactgtcttctctcttgtgtacatgcccattgacaggagtggttctactacactggacttctagtcaaactcctggctttccctgtctcccagaactcacaacctcgctgccatatttgtccttgagaccatcagctctaatctcattgtgtttatgtcaagcaccacaagaagttctggactcctagggcatccctcatttatcgtaatttaatttctatctctgtacaccctcctttctgaccccatttcgtattcattttggaaaacccaagatattagttcttgtaagtcttatttgcctctatacatttccttggtaatcttatccagttctatgggcttaaatactatttctaagctgacatcttccaaatgtttgttttagcctaaatctctctgctgttttgtagacttgactgtcttattgcccacttgacatctccacttgcatacacatttcaagcttagcaagttcacctttgacatggtcatcttacaggcttctcyatctaaattaatgacagtgctgtcatctttccagttacccaagcccaaaactttagagtcatctttgaatcttcttttcctcattccttgatagacaaatctatcaggaaattctgctgcctctactttctaaatatatctataatccagctgcctctcaatcctgggaccagtctggtctctgacctagatttctgcagtggcctcctaactggtcttcctattagtacccttgtcagtctgtttttaatgtagcagcctaagtggtcttttcttttttttttttttttttttgagacagagtctcgctgtgtcgcccagtggagtgcaatggcgcgatctcggctcactgcaacttccgcctcccgggttcaagcgattcttcttcctcagcctcccgagtagctgggactacaggtgtgcaccaccatgcccggctaatttttgtgtttttagtagagacggggtttcactatattggccaggctggtctcgaactcctgaccttgtgacctgcccgccttggcctcccaaagtattgggattacaggagtgagccaccatgcccagcctggtcctttcaaaactaagtcatatcatatcactcctctgcttaaaaccttccacagatttttcatcccaatcagaatgacacaagtcctctacaccatttgtatttctcgactcattatctctgtgatctctttttttcttttttggagacagagtctcgctctatcgcccaggctggagtgcagtggcgcgatctcagctcactgcaaactctgcctcccaggttcacgccattctcctgcctcagcctcctgagtagctgggactataggcgcctgccaccgcrcccagctaattttttgtatttttagtagagacagggtttcaccgtgttagccaggatggtcttgatctcctgacctcgtgatccgcccatcttggcctcccaaagtgctgggactacaggtgtgagccaccacgcccggccctctgtgacctcattttttataactattccttttctgtcactcagctctggccacactgtcctcagtgttccttgaaattccagggcatgctaccttactgccctccagggccttgcacgtatccccatgcagtgggataaaagcctttggcttttccctcacttttttcagtaagacatcctctgactctcctatttaaaattgtacccaccaatactcccagtcctccttccatgttttatttttctctgtagcacttgtcattgtataatagttttatgtattttacttatttgtttattgtttttgtctcctcctcctacacacaagaatataagctctgtgagggcaggaatttgtttgcttgtctactactgaataaagcaagcactaaaacagtgtctggcacgtattagatactcaatgcccattggctaaatgaataagtattttctaaatgaatgagtgaaggcagcctgggcacatagcgtgagacctcagctctacaaaataaaagtaggccagagggccaggcactttgcctcatgcctgtaatcccagcacattgggaggccaaggagggagggtcacttcaggtcaggtgtttgagagcagcctggctatcatggtgaaacccatctctaccaaaaaataacaaaaattaggcgggcatggcagcacatgcctataatcccagctattcgggaggctgaggcaggagaatcactcctgaggtccggagttcacaaccaccctgactaacgtggtgaaaccccgtctctactaaatacaaaaaaaaaaaaaaaaaagccaggcgtgatggcgcatgcctgtaatttgagctacttgagaggctgagacaggagaattgcttgtacctggttggcggagattgcagtgaactgagattgtgccattgcactccagcctgggcaacaagagcaagactcagtctcaaaaaaaaaaaataaccacaaaaaaacaaatgaaaataaagatagctgggcatagtggtacatagctatagtctgtgtacctgggaggctgaggtgggaggctcacttgagcccaagagttggagactgcagtaagctatgattatgccactgcactccagccggggcaacagaacaagaccctgtctcaaaaacacacacacacacacrcacaaaaacaaaaacaaaaacaaaacaaaacagattgaatgaagactcatagttgtcaatatgtagattcataggacttgaagatggggtctagcctctggacactagtgaatttcagctaactggaagggtacgtatttacatttttcttaaaattactccaagaaagtatattcttccaccttttccatcgttcttcagctcagtgtttctttctcacttctagttctgttcctcacttatgctgtttcctctgtccaaaatattctttttatatacctgatagcctttagcaaacctccctagaattctccatcccctagacagtgtcactgtttttctcctccattttcctgttgttctttatttctgtaacatgcacaggatgatgggtgtgaatcctgtcctctgaattgtgagcctcttgagggcagagagtaagtctttcatgcttccctgtatccttgtagttgttcacttttcatagatttttcacacctttgtactggatcttcctgtctaaagcctttgttaatcacttgataatgtttgtagaactgaatcactaaaacttattttatttggccgggtacagtggctcacgcctgtcgttccagcactttgggaggctgaggagggaggatcactttagccccaagatttgaaaccagccttggcaacatagtaagaaagaycccatccatacaaaattaaaaataaaagaattaggctgggcgtggtggctcacgcctgtaatcccaacactttgggaggctgaggcgggcggatcatgaggtcaggagatcaagaccatcctggctaacatggtgaaaccctatctctactaaaaatacaaaaaattagctggatgtggtggtgggcccctgtagtcccagctactcgggaggctgaggcaggagaatggtgtgaacccgggaggcagagcttgcagtgaggctgaggcaggagaatggtgtgaacgtgggaggcagagcttgcagtgagccgagactgcaccactgcactctagcctgggcgacagagcgagactccatctctaaaaaattaaataaataaataaatacataaaaaataaaagaattagccaggtgtggtggcacatacctgtagtcccaacttcttgggaggttgaggtgggagggtcacctgagccccagaggtcaaggctgcagtgagcagtgatcatgccactgcaccccagcctgaacgagaaggcgagactgtctcaagaaataaaaacaaaaacagaaacttattttattagatacccaatctatgtgacactaattacaagtgaatcaagatttaaaagaaaatcgtgctaaccacattaactctcagtatagttttatgactattacaagccatccaaatctattcctacttattcggtttactaactagtatattcagcaagtatttatggagtgcctgccatgacaaaggccctatgctaagcctaacacatatacaaattgtatccactcctcaacactctgcttaaactcctctataaatcctttccagttcaaatcgaaaggctagtcattttttaaacatgagatctcagagaggaaattggaagtacatgatgtgttaactgaaagatggattaggtgttataactcttcacacacttctgcagcataatcattcatagaactgtgttcttttaattggctcctgtgatttttccgggactccaagggtgggaaacaccgggaggtaaagctcgtgctgtttcacttgatgtgctaaaatggttcttatgagataatgctcctgtagcatttagctcagcttgctcagtgcctggttcatggttggtgctctggaaatgttacgtactttgcacattctgttgttacagcagttgtttctctgccttttactggtatgtcattctcaataatttgtaaacttttaggaaaggtctttaatttcattatcttataagaggtataggagctacctggttgaattatttgctgctgattttaaggttgctgtaaggttcagtaggcagggtagggaagatgagcatacaaattttatttaacaaattgtttgttaaaagagtacttattatatgtttgatgctgtcctaagcactttgtaaatattaatttatctaactctcataactctatgaaatagttacttttattatcacattttatagaagagggtcctgggacacagagaggttaagtaagtttaccaaagacacacagatagttagagcaaggccagtattcagatactgttggtcgaaggccaggcatggtggatcatgcctgtaatcccagcactttgggaggtcaaggtgggtggatcacctaaggtcaggagttcaagaccagcttgaccaacatggtgaaaccctgtctctactcaataccaaaaaaaaaaaaaaaaaaaaatagctggacatggtggcacatgcctgtgcctgtaatcccagctacttgagaggctgaggcaggagaatcacttgaacccaggacgtggaggctgcaatgagccaagactgcaccattgcactccagcctgggcaacaagagtgaaactccatctcaaaaacaaacaaggccgggcacagtggctcatgcctgtaacccagcactttgggaggctgaggtgggtggatcaccaggtcaggagatagagaccatcctggctaacatggtgaaaccccatctctactaaaaatacaaaaattagctgggcatggtggcatgcacctgtagtcccagctactcgggaggctgaggtaggagaatcgcttgaacccaggaggcgaagtttgcagtgagccgagattgcaccactacactccagcctggtgacagagtgagactctgtctcaaaaataaacaaacaaaaatactgttggtcttgcaattaagcattattcaaggttgaatgtgaatgatggcatataaaaagtacagagaatgtgctatggcatttcaaagaaggtaatggtcacattaatgtctcactgggggttaaagaagtcttcatgctggccaggcgcggtggctcacacctgtaatcctagcactttgggaggctgagtcgggcagatcacaaggtcaggagttcgaaaccagcttggccaatatggtgaaaccccatctgtattaaaaatacaaaaattagtggggcgtggtggcgtgtgcctgaagtcccagctactcgggaggctgaggcagaagaattgcttgaatccgggaggcaagaggttgcagtgagccgagatggtgccactgcactccagcctgagygacagagggagacttgtctcagaaaaaaaaaaagtcttcatgctgaaattggcattttcaggggactactttttcaggtgcttggccatgggagaagaaaagggaaggtaggccgggcgcgatggctcacgcatgtgatcccatcactttgggaggccgaggtgggtgggtcacttaagctcaggagtttgagaccagcctggccaagatggtcaaactccgtctctactaaaaatacaaagaattagcccgggtggtggcgggcgcctgcagtcccagctacttgggatgctgaggaaggagaatygcgtgaactcaggaggcagaggccgcagtgagccaggaccacaccactgcactccagcctggccaacagagcaagactctgtctcaaaaagaaaaaaaaaaaaacccaaaaagaaaatagtaatgcaaagcctcagggatgggaaatggtaggccatcaggaagtagtcctacatgtaagcagcatgtaaggatactgtaggagggaggcaagatttggggttagagcataggaagcttgagattctgaatggaggacaagctggagaagatgtgacatagagctgtgctttgataagtacgaaaacattgtatgtgatgaatcagaactgatagagattcactgtaggaaaaccagttacaaggtcattatgtccagaaaagaggcaattaggccttgaactatggtgaaaataggtatagatacaagaacattacagaatttgaattgacagcagaataacacaaccaaaatggatagtcaaatatttatatcattatatgactagtgtaagtttgttttatggtcagtaaggtcctttgaatctcttgaaaactctgctcttgttgtaactgagcattatcttaagagaaaatatattcatttatctctaaagaaatatgaagtttctttcattggacttgtaatttacatccaaggaaatgatttcctttgaggccagctaatttattcagaatgtctggattgaaaatgtttcttagtctgcttagtgtagacaaaattagaaaccactttagcctaatgattcggaagaaatgatttctttaaaattgtgatcatctcagtttctttcatgtgatacaaatgtaaattgcaaatgagaacctaaatgtgtctgtcagttggctttgctaagcagaaatcttctagctgactcatcctatttacagaagaattatttcaaagtaacctttggaaaacctgggtagaagtggtttggattagtgaggttgataaatatcagtgtaagaggagtattcaattatagtttggatacctctggtgctttggaagagttataataaagtaaagccaagagatgatgatgatgccttagagttgtatggatacaatacctaggagtaaatttaaccaaggaagtaaaagacttgtaccctgagaactacaaaacgttgctgaaagtaattaaagacctgtgtaaatggaaagatgttccatggattagaagacttaatattgttaagatgtcaatattaaaagtgatctacaaatgattcattgcaagccgtatcaaaatttyaatggcctttttgcagcaatggaaaagccaatattcaaatcatctgtaattgcaaggggcccttaatagcccttcgtggatgttcttgaaaaaagaagaacaaaattggtggatttatacttctcaattttaaaacttacccttacctcacattatatataaaaactgactcaaaacaatcaaccaacaaactaaatataagagctaaaaccataaagctattagacgaaaacagtaatctttcgtgaccttggatttggcattggattcttagatatgaccccaaaagcacaagcaacaaaagaaaaaaaatagatgaattggatttaataaaaattagaaattttgtgcatccaaggacattagcaagaaaatgaaaagacaacctataaaatgggagaaaatattttcagatcatatctctcataagggtcttaagaattcttacatatcggccgggcgcggtggcacatgcctataatcccagcactttgggaggccaaggctggcggatcatgaggtcaggagatcgagaccatcatggttaatacggtgaattcccgtctctactaaaaatacaaaaaattagccgggcatggtggccagcacctgtaatcccagctactcgggaggctgaggcaggagaatggcgtgaacctgggaggtggagcttgcagtgagcctagatcgcgccactgcactccagcctgggtgacagagcgagactgtctcaaaaacaaaacaaaaaaaaattcttccgtgtcaacagcaaagacagcaaggcaaagtgggtatgtgcctgtagttccagctacttggaaggataaggtgggaggatcagtgtcaacctggataacataacataacataacatagcaccatagtctctaaaaaaaagacaacccagttaaaaaatgggcaggccaggtgcgatggctcacgcctataatcccagcactttggaagccaaggtgggcggaccacttgaggtcgggagttcgagaccagcctgacgaacatggagaaaccccatttctactaaaaatacaaaattagtgggtgtgctggcacatgccagtaatctcagctactcgggaggctgaggcaggagaatcacttgaacctgggagctggaggttgcggtgagctgagatagtgtcactgcactccagcctgggcaacaagagcgaaactccatctcaaaaaaagaatggctgctccataggcagagcagtgtcatgggctgcctgactgagtatagttacggtatttcctgattatatgctaaacaaagggttttctgggaaaggggtggggaattcctggaactgagggttccttcctttttagatcatatagggtaacttcctgacattgccatggcatttgtaaaactgtcatgyatgggtgggagcgtcatttagcatgctaatgcattataattagtgataatgagcagtgaggacctccagtggtcactttcatcaccatcttggttttggtgggttttggctagcttctttacagcattctgtttttatcagtggggtctttgtgacctgtatcttgtgctttcctcctatcctaagaatgcccaacctcctgggatgcagcccagcaggtttcagcctcattttacccagcccctgttcaagatggagtcaaacaactctgacagcactacaacttttttattttatttttattttttgagatagtctccctgtgttccccaggctggagtgtagtagcgcaatcttggctcactgcagcctccacctgttggggtaaagtgattctcctgcctcagcctcccragtagctggaattacaggcacccgccaccacacccagctcatttttttgtacttttagtagagatggggttttaccatgttggccaggctggtctcgaactcctgacctcaagtggttcacccacctcggcctcctaaagtgctgggattacaggtgtgagccaccgggcctggcctgcaacactacagcttataggaggaagaggggagtaaaacaaaataagtttccagttagatgtttaaaggctcaattttaaaggattagatcagaaagttggacaaatgggatgacatgaaggaaaaaatgggaaataaaaacaaattatcattaacccagagctgggctaggtggcatgtgcctatataatcccagccattcaagaggctgaggtgggaggatcacctgagccaaggagcttgaatccagcctggacaacatagtgagatccctgtctcttaaaaaaaaaaaaaaagtgtcggccgggtgcagtggctcacacctgtaatcccagcactttgggaggctgaggtgggcggatcacgaggtcaggagatcgagaccatcctggctaacacggtgaaaccttgtctctataaaaatacaaaaaaattagctgggcgtggtagcaggcacctgtattcccagctactagggaggctgaggcaggagaatcgcttgaacctgggaggctgaggttgcagtgagccgagatcgagccactgcactccagcctgggagacagagacagctccgtctcagaaaaaaaaaaaaaaaaaataccctactttagctaaacaacccccctttacctctttccagcaccactaactcctgagcattttgaggatttttaatgtaacttagatttgttcttggattcctcaatataggtttaggatttggctttctccagtccactacactaaccgctactcttccatgtctttctaacttgcagaattattattattataatttttttttttgagacggagtctcgctctgtcgcccaggctggagtgcagtggcacaatctcggctcactgcaacctccacctcttgggttcatgccattctcctgcctcagcctcccgagtagctgggactacaggtgcccgccaacatgcccagctaattttttgtattttcagtagatacggnnnnnnnnnnnnnnnnnnnnctgcattccagcttgggcaacagagagagaccctgtctcaaaaaaaaaaggtgtcaaactcttttttttttttttatttttttttgagacagagtcttgctctttcctcaggctggagtgcagtggtgcgatcttggctcactgcaagctccgcctcccgggttcatgccattcgcctgcctcagcctcctgagtagctgggacaacaggcatctgccaccatgcccagctaaatttttttttatttttagtagagacggggtttcaccgtattaaccatgatggtctcgatctcctgacctcgtgatccgcctgcctcggcctcccaaattgctgggattataggcatgagccaccgtgcctggccccaaactctttatagaaataaataacaacaaatgatcattaacctgtttcagccaagggttggagtttaacatcaaggtgagttcttacatattacatgcaaaacagtggcccatgaatttttttttttttggattaggtcagaattatcatgttaaatcttttgagaagaataaagcaaaatattagtaactaatttcattgaagatctcaaacataagttagtaaaattaagaaacaatttgaatttcatatgtttttagagggaagttcactcctttgraagttgaaaaagaaagcagatgtacttaaatatgggacattcttttgaacttagaatttcagattatatatcctcagagaatccagtatataggagaaactacaattagctaaactaattttagctacttgagttcaattcagcaataagacaaaaagtgaatgcaaaatgtatcatgtgcttattaggtcatagtacaaatggcttataaaatgtacagggaatttttgtgtacattgatttgttaatggtgacatttttttactttgtttcattatttggtggccctttttgtcactttaatacgtaatattctgttagttttgtttttgagaagatggagttgcaccatgtcagacagaaaaatgcccattcttgtcagaataaggttatctctttgattgcagatgatgaaagccatgaacaagtccaatgagcatgtcctggcaggaggtgcctgcttcaatgaaaaggcagactctcatcttgtgtgtgtacagaatgatgatggaaactatcagacccaggctatcagtattcacaatcagcccagaaaaggtgagcatttgagctggttgagattatgataatggaaaattatactggacttggacagttagatacctcagtcccgtaacactcactttctagataggtgaccacaaacaaattaattaacctttccaaccatattcttcaggattatgttgactccccaagtggccagactcagagttgcaaatgggatatgtgttattgagggaacaattttgaaaatatgcccttaggagggagggatagcattaggagaaatacctaatgtaaatgacgagttgatgggtgcagcaaaactaacatggcatgtgtatacgtatgtaacaaacctgcatgttgtgcacatgtaccctagaacttaaagtataataattaaaaaaaaaaaaaaaaatatgcccttaggatattgacaagggccagctctgrcatttgaaggcacgactaggccccataatgagagtatgtttaggtaaatttgaagcttgttggatgaccattcccacagaatgctaattaacttgacaggattctgaaggaggtttcagtgctattcagaatgtggtctccacaccccagattcactaatcaaaatttgcattttaacgagatctctgtgtgattcaagtgcacattcgactttgagaagcattgctcaagaggcgttacccaaagtgttttctcaggcaccatggtgttaaaaacttcacatgaaaaaataagtcttgtttaatagatttaatctaagaaaccccgtgttaggccagccgcggtggctcatgcctgtaatcccagcactttgggaggccarggcgagagcatcatttgagctaaggcgttcaagacaagcctgggcaacatagcaagaccctgtctcttaaaaaaaaaaaaaaaaaagcagggcatggtggctcacgcctgtaatcccaacactttgggaggccgaggtgggtggatcacctaaggtcaggagttcaagaccagcctgaccaacgtggtgaaacttcatctttactaaaaatacaaaaaagttagcggggcatgctggcacatgcctgtagtcccagctactcgggaggctgaggcaggagaatggcgtgaacccaggaggtggagcttgcagtgagcagagatagcaccgctgcacgtcagcctgggtgacagagcgagactccgtctcaaaaaaaaaaaaaaaaacttagcagataaaatagttggcaaccatatttctatcttcagaatatatttgatctaaaaaaatctgaaaatcaatggattagattgggggtggcaaactttttttgtgaagggccaaatgataaatattttagactttgcaagctgtggtttttgtcaacaactattcggctctagtattatagtgcaaaaactgccatagacaataagtaaatgaatggacatggctgtgtttcaataaaattttatttacaaaagcaggctggaggccaggcaggctatagcttgccaaccccctgacctcaaccattaagattccttttcttgtaagatacttggattcttaattagaggaagaacaaaacaaaatgggggagtgtatcttaaaacctagttcccaaagctgttgtaagcatcagaattgttggttacatgtttattgtggaatatagatttgattttttaaaattttctgtgtgatgatggtcggaattctcaacttctgaatattttgttattattttcaatccctccagcttagggtctgtcttactaaactatttctattgctgttttagtgactggtgccagtttctttgtgttcagtggcgctctgaaatcctcttctggataccttgccaagtccagtattgtggaaggtaaagaatgaattgttcagtcctcataataaggactgaacttatgtacataaagggaatcctttacacttctgctgtagatgtctgactcctactgttttttcagtagcatctcttcagcaaattaaaactgccatgagagtgcttagttctctgaagaaaggagtaagtggtagggataccatgtgacaatgacattaaaactaggagatggcctttcagagctctgggataaggtacctgagggcatgtagtctgagttcaaatatatcattgggtggaaatattaatatctaaatgtgtagatgaaagtcctgtccacaagaatgctgtggtcatcatttggagtacaaaatggcatgtgcttgctgctagtgtgctataattagacatgacacatatgttgacaaaagttaattaaactaaaagctaattggcacaccgtttattttctttgttggttattcattgtgttttgattttgctactcttatttcataacagatggcttaaaacaaccattttatcatgcttgcttatcctctagatcagtaatcttgacagggcaatgcagggatggcttaacactgcttcatgatgtttggagtcttagttgggatsacttgaagttatctgatgactgggagctagaattatatgaaggtttgttcacacacacgtctgaggcctggcctgggatgatttaaagactaggagtggtgactggggtacttacgtggggactccttaacatggcttgataccattgggatagctggactttttacatggtggttcaggactccaaacatgaatgttctagcaagaaggtggaagctgcattgccttttgtgacccaccctttaaagttatattgtgtcatttccaccatactctggtgttggaaaaagggagggaaattagacttcacttctacatgggagaatgggaagatagcattgtagaaaaatgagatgggagatatgaccatttatggaaaatgtagtctgcctcacatgatgacaggttttcatttttacagtagctcactccaaagctctgtgtaaaaacagtcctttcttaggccgggtgcggtggctcacgcctgtaatctcagcactttgggaggccgaggggggcagatcacttgaggtcaggagttggagaccagcctggccgacatggtgaaaccccatctcaactaaaaatacaaaaaacagccaagcgtggtggcgcatgcctgtaatcccagctacttgggaggctgaggcaggagaatcacttgaacctgggaagcagaggttgcagtgagctgagattgtgccattgtactccagcctgggcgacagagtgagactctatctttaaaaaaaaaaaaggtcctttcttagggctggattccagtgtgttgattgaaatacgtagataatcttacatatatttatagatactagctttggtcttcttttggtaaatttaataaaacagtgagtgaaacacagagtgcactaatattttacaactaaaatttacaactcttgactacaaaacagaaacatgccgttaacaaattgttatgaaatctaagaggttttttttttttttttttttttttttttaagatggaggcttgtagcccaggctggagtacagtggcacaatcttggctcactgcaacttctacctcaagtgattctcctgcctcagtctcctgagtagctgaaattacagttgtgcgccaacacgcccagctaatttttttgtatttttagtagagatggggttccaccatgttggtcaggctggtcttgaactcctgacctcaaatgatccaccaggctcagcctcccgaagtgctgggattacaggtgtgaaccaccacacccagcttaaaatctaggagttaaacagtcatttggtctaaagcaactagttaaagcctatatgatgaagtgttgactatagttgaaattgtgacttcacaaggtgattttaaaacaccccttaaatgttgttaaatgataaaatgagctgggcatggtggcatacacctatagtaccagctacttgggaggctgaggtgggaggaccctgtgaggccaggagcttgaggctgcagtgcattatgatcgtccctgtgaatagtcactgcgctccaacctgggcagtcatctcttaaaaaaaaaaaaaaaaaaaaaaagataaattgacctgacacagatccttaccaattcaaagcagtgtgtttaaaaattatgtgtttatgtgtctggcttgggaatttcttgggtcttgcatttcacttgtgtgtttcagtggagcgattggctgactatgaaattgttattgagactctttagaaattatttcattgtgtgtcagtgaagcagagtaattgctcagcatgtgacaacttttactgtcaatttcagtgtttgccttcaactcaggtaggtagcagctgaaaaagttaccatctgttggttatctggtagcccatatgaaactctgtggtaggtttgccttatttgctagtcaataaatggatttatctccaagcccactactataatttattcagtgatttatttagcaaacatttattgggcattcactgtatgccaggcagtcatagtaaggtgagagagatggagatgcaaacaaatgaatatgaccagaggatgataaatgcaggagtgaaaacaggaacaaaatattcagtgtgtccagaagaagaatgtgactgtgtttaagttttccccttaagtagtctcaggagaaattcttagttgtgtctgaagtgaaatcaacaagcatgtgttttaatcttggcattgcttctcacaacactttcagtaagaggttcagctcaaagagcaaaacctctgtatcagtcagctttggaaagcagagctaaggtttacatttaactyrgaggaatttgctagatgccaggtgctgtgtttcatttgcctctcctttggctttgtactgattcttagatggtgttatggtccagattactgcagagaacatggattccttgaggcaggcactgcgagagatgaaggacttcaccatcacctgtgggaaggcggacgcggaggaaccccaggagcacatccacatccagtgggtggatgatgacaagaacgttagcaaggggtaaatgcagcacatgtccccctttgtggcttttagttataggttaggctctgggttttgtctgctgtctacattggtgttttatagttttactgaaagccctgcctaagagaaagactgctttgtatgcttaacgtagaattttaaatttctggttttgtaagttagtttctgaaggagtttctgtatgtatttttgagggaagtataagtagagggattgatgaaacaaaaaagtccctctatagttattgagataacagtaatacctgagccttttaagatttacaacacatttttgccaacattgttttgtttgatacaataacaggtgttaacatttccattctataaatgagtaaacaagtaccaaaaggctaagtgacttttcaggtctacaaagctaggaagtgataagactagctctgaaaaccaccttcttgggcttcaaactctgtattctttctcagtgttcggcaactctattctaatggttcaagccaaaaccttggagacatctttgacacttttctttccccctcacccctttcttcctctcatacccagacattcagggacaagctggaaaacattgcatttatacattacaaactgaactttgtatcctttctcaaaggattctacacaacaaagggtgctctttttttgttttgtttttaacattgctatttgatgaattagaaattaaacttaaattcaagtaattttgactaaatgaagtgaatgcctgatatggaagtttaagttagattcgacttttaatacatagagatttggccgggtgtggtggctcacgcctgtaatcccagcactttgggaggctgaggcaggtggatcgcctgaggttgggagttcaagaccagcctgaccaacatggaaaaaccccgtctctactaaaaatacaaaatcagctgggcgtggtggtacatgcctgtaatcccagctactcaggaggctgaggcaggagactcacttgaatcgggaggcggaggtttcggtgagccgagatcatgccactgcattccggcctggacaacaagagcgaaactctgtctcaagaaaaaaaaaatagagattcaagaacataaacaggtttgaaaattgttagggaaagtttagaatctgtgtgccaattattttgaatcctaatcagaatgaatgtgtatctccatgtatttatacttgtatttcagggaggaaatgactatcagaagtggcctttttgtttaggaatctaggagtgataatttagcactaaagggaaggtgttatgacagatacatagatacttgtttacactagcactgtcataattagcaacttggtcaaataattcctttttttttttttggagacagagtcttgctctgtaacccaggctggagtacagtggtgcgatcgcagctcactgcaacctccgcctcccaggttcaaggtgattctcatgcctcagcctgcccagtagctgggattacaggcatgtaccactattgcctggctaattttttgtgtttttagtagaggtagggttttgctatgttgctgatgctggtctcgaactcctgagctcagacagtctacccacctcagcctcccaaagtgctgggattacaggcgtgagccaccatgcccagcaaatgattcttaataaatatttattagactcctaagttccaagcagtgggtcagtaatgggaatataagcacatagaggggaatatatcatattccctccccttcagaagttcatttgtaagtcaggtatgcaaacatgaagaatatatcatgacaagtatcattacagagtcaggagcagagtgaaaacaagattgagtgggtgaccatgcattcactgaaagaagggatactggaagaagagcaggtttgattaatcaatttctttacgttaaagagaactagctcctggaaaaatgattccttttttgcatgtgtgttctttgaactatttcagtgcatagattctttcccaagagctcagttcatgtacatttttatacagtggctgcttcttgctatgatgtgctgcacaggtgtgttcagcagggtacccagtgtaattagcaggaagacttctgcagcaaaacgtgataggaaaaatggcttttctaacttcaagagctgcttctatctttcctttgcctctattttagtgtcgtaagtcctatagatgggaagtccatggagactataacaaatgtgaagatattccatggatcagaatataaagcaaatggaaaagtaatcagatggacagaggtaaggaaatgaaacttggcatacttgacccactttgagcacaactttttgctaggccaagagccacattctgggttgactttgtaggataagaaaaaaatatctctgagaaaaatctttctcgtttatactacaattcctatctgaaatcaccaggaagaaatgctgccagttgcagcctgcacctgtctgatgtatcctccttcctgtgaactaacttttagatatttctttgcattggaactccagaagagtagatctctgagtggtacattccatctttgctgtattcttcagaaagctgggtcagttattctgtacttataaactattttagataacatgacggtctttaaaaaatacttatttcactaataagaaaactaggccaggcacagtggcttacacctgtaatcccagcattttgggaggctgaggtgggtggatcacttgaggtcaggaattcaagaccagcctgggtaacatggtgaaaccccatacccactaaaaatacaaaaattagccgaggcatggtggtgcacacctgtagtcccagctgcctgagaggctgaggcatgggaatcacttgaacccgggaggcagaggttacagtgagccgagatcacgccactgcactccatccagcctaggcaacagagcaagactccgtctcaaaaaaaaaaaamaaaaaaaaaaaaaactaggccgggtgtggtggctcacgcctgtaatcccagcactttgggggagaccaaggtgagcagatcacctgaggtctggagtttgagaccagccctaccaacatggagaaaccccgtctctactaaaaatacaaaattagccgggcatggtggtgcatgcctgtaatcccagctactcaggaggctgaggtgggagaatcgcttgaacctgggtggtggaggttgtggtgagccgagattgtgccattgcacgccagcctgggcaacaagagcgaaactccgtctccaaaaacaaacaaacaaaactaaagctcagagactaattaacttgctcaagattacaaggcaaataaataatgataaaatcctgattaaaacccagatctggccaactcctaagctctttcccactgtattaatttgctccttaacttgaaagctgtattagaggctcacctgggaatgagaggagcagggcagtgacccttttttgtatgtacatgtcatatagatcagaaagtttattctcttcatccccaagaggtctgagaaaaaataaaatacgaaaaaaattttaaaagttctcgtaagctggtagatcttagatccctttattacttttgaacctcatgtatgctcatttgtaaaggattaaattataagatctctaggattcttttcagctttgaaactcttatgtttttttaaaaaaattctacgacttctggcttttccatttcacacaaaaggaaacagagacccagggttgttaaatctcttactcaaattcatatggctagttcctgatagcagagatgagacctggttctccagttctgagcagtagtcctaagggactcatcctgcataacaggctccatgatttcatatgcagccaagggattttagttgcttgctatgtaatgattcgtccctttgacacattttgagcagtgcagagtctggaacgtgtaaaacactttatggcttataaagcagtttgacctctgttccctcctttttgctccccagtagcagtgaggtaggcaagctacccatcctaagatgcagatgagaagacaggctcaaacaggtcatgtgactgtaactttgtgactgatgttggttaatggcagagcaggggccagcgctcaggtctcctgactcccactckgtcatttcatgccaccactctccagtgcatccaggtacggggcttcggagctgcctcctttgtagtcctctcagtgtaagttccttatggagcagtaagctaggggttgctatatagaaacatcgtgtatttgcatttctgtgtcttttatattttgcctttttttttttttttttgagacagagtctcgctctgtcgcccagacggcagtgcagtggcgcaatctcggctcactgcaagctccgcctcccgggtacacaccattctcctgcctcagcctcctgagtagctgggattacaggcgcccgctaccacgcccgactaatttttttttttgtatttttagtagagatgaggtttcaccgtgttagccaggatggtctcgatctcctgacctcgcaatccgcccgtcttggcctcccaaagtgccttttttttttttttgagacggagtctcgctcttgtcacccaggctggattgcaatggtgcaatctcggctgactgcaacctctgcctcctgggttcaggcgattctcctgcctcagctttctgagtagctgggactacaggcatgtgccactacacccagctaacttttgtatttttagtagacagggtttcaccatgttggccaggctggtctcaaactcctgaccttgtgatctgcccgcctcggcctcccaaagtactgggattacaggtgtgagccaccgcacccggccttatattttgcctttatatagttttatctttacaataaccagagaagtcaggtgctttccactttacagaggcaaattaatttttttttttttgagacggagtctcactctgtcacccaggctggagtgcagtggtgtgatcttggctcactgcaagctccacctcccaggtccacgccattctcctgcctcagcctcctgagcagctgggaccataggcacctgccaccacgcccggctaattttttttgttttttgttttttgtatttttagtagagacggggtttcaccgtgttagccaggatgatcttgatctcatgaccttgtgatccaccctccttggcctcccaaagtgctgggattacaggcatgagccaccgtgcccggccgagacaaattaattattaagaagtcctcagcctggccagcatggtgaaaccccatctctactaaaaatacaaaaattagtctggcttggtggcaggctcctgtaatcctagctacttgggaagctgaggcaggagaatcgcttgaacctgggaggtggaggctgcagtgagccgagatcgtgccattgcactccagcctgggcaatagagcgagactccatctcaaaaaaaaagaaaaaaagaagtcctttgggccgggtgcggtggctcacacctgtaatcgtagcactttgggaggctgaggcaggaggatcacctaaggtcaggagttcaaggccaacctggccaacatggtgaaaccccgtctctactaaaaatataaaaattagccaggtgtggtggtgcacacttgtagtcccagttacttgggaggctaaggcaagagaattgctggaacccaggaggtggaggttgcactgaactgagatcgcaccaccgcactccagcctgggcggtgggcaacagagttgagactccatctcaaaaaaaaaataaagtaagtcctttgggccaggtgcggtggttcatgcctgtaatcccagctctttgggaggccgaggtggacagatcacctgaggtcaggagttcaagaccagcctggccaacatggtgaaaccccatctctactaaaaatacaaaaattagccaggcatggcggcacatgcctgtaatcccagctactcaggaggctgaagcaggagaatcacttgaacctaagaggcaaaggttgcagtgggcagaggtcatgccactgcactccagcctggtgacagagtgagactttgtttccaaaaaaaaaaaaaaaaagtcctttaacttcctttagtcctctaacggacttgctcatgacccttcctctatggtgctaggacttaggtcatcagttccaagtgtgttccacttctgcctgtgcacagtgctgacacagttcccgcctctatagtggcagggctgtgtggtggaaaaagctctgcaataaaaggctcagatgccaggctcagcctggctcttcctctgtctcttaaattcttctgtgcccttgagccagtcaattcccttctaagactaattgtaaaataaagcagctgggtcacgtcagctataagagccattctcttagacttaagatcattttctaggtaaattgtccacatacagggattaccttttagtggcatacaatgcaaaatggaggccttttctagttctgagaagaatgtgccattgcaaccatggaggcttgcagggagttaggcaggctgctgctgtcattttgtggatgcagagatggagagacagggattgttttttttttaggtggaagacaaatgcccaacttttcctggaccagggactttatggtgtcctgttcctgtcatgtcttcttgcacatcttggagaatcagggtgctcatatacagtgagctaatctacttctcycaaaatctaggcacaagtttaaaagtctcttttgtttggggaacaggtgtttttcctagaaaacgatgaccagcacaattgcctcagtgatcctgcagatcacagtagattgactgagcatgttgccaaagctttttgccttgctctctgtcctcacctgaaacttctgaaggaagatggaatgaccaaactgggactacgtgtgacacttgactcagatcaggtatgatgtgtcttccgcagcttttaaagctggccttgggcaacgtctgtatttctgacgtgagtttttctgcatcaccccagagagcttaattctccgaccttctggcctgactggatatagtgtttttggccctctctttaatagtactatacccacatgtgatgcttggtcagattctctcagaaccatttgaactgtggcttcttcacctgcatgccttccaaggagctggtttccttcttagtgtggggtaaagaggggagcatgtggtaggacctgccaggtcctgccttgatgtttacaaattgccagacctctctgttccctcaaccctttagctccgagtcacttggaacttgggtgtaggctcagcttgatcccccttccccactgagtgagtgttaattctgcccagcaagctgcttctggcctgagtgcttatgaggagaaactggttcctgatcacagggttgtgccattatcagggaatgatgaaaggttctgtgtctggccccagttcctgactagtcatcaatcaacaaatatttattttctgcttaacggcttgcccaatgctatactaatgaagtattctggtcctatctcacataaaacaaagaacaagcatttttctgctaaatatgtgagcctcttgagggcagggccctgttacattcatctttggatccctgcatttgtagttgctcagaatggtgcatggatgaacagatggatgcaagaacaaatattcagttcctactaggttagggagctgtacattgtgtatttctcattttaattttcacaaccaaagattaaggtattatttctgatactccatacctttttacacacctctacccttccccagaaaactaagaccataacaggttaagtggcttacccagtgcctcatggttgtcaagtggtcaggaggagtaaacaacaggataagtgatcacccagaaaagaggataaatttgtattcactgccatatgtttagcctatggccaaaaaggacatctcctttcctgctcagcctccttgccctcagccctggagaggccttctctgttcagtaacctctcctccttttctctctgtggtataggttggctatcaagcagggagcaatggccagccccttccctcgcagtacatgaatgatctggacagcgccttggtgccggtgatccatggaggggcctgccagcttagtgagggccccgttgtcatggaactcatcttttatattctggaaaacatcgtataaacagagaagacttcatttttttctgttcagacttgttgcaacagcagtcatacccaaatcatttgcactttaaaactggaagattaagcttttgttaacactattaatggggtggggaatagggtgggagtgggggtttgggagacgggtgggaaagggtggttggggggaccgatgttccataattctaagtcttctatgcattgtccaccaagaagatctgggcagcttctgttcctgcacaacagttatgctatccttgcagctaatccccttctgttactgtttagacaagaattccgctcctctctcaagatttacttatggtcatgtgctcagaaatgctcaaatgggtacaaccatcaccaagggtgggatgggagggcagaggggaaataaaatataaagcatcagttcttgcactctttgtacagaattggtataaaaaggataattccacactgatcttgtcccagttacatcacagctgtttatcaagtagaagtcacacttagatttttgtttttaccagattattcattgaagtgaatcgaagactcaagggcttaatctactcttccagtttcggaagggcaactcagtgtaaatgtcatgtggagagcagaggtgagttcaggattgctggagatctgcccgtgtggatggcaggtattcaactgggtatttctgtgaatgctgatggaatacacccaggacatttttagttataaatactggaggaatttaaaaatacattttattgagaaataatttaaacttctaggaagttgaaagtacaaaaaaccccacgcacactttacccagattcccctcttgttcacttattaacattttgtcccatttgatttgtcagggtttctctctccctttctccttctccataaaaaattgaggcatttgagagtaaattgcgtacatcataggcctttcctcctaaatgcttatttcctaaaaataaggatattctcttacacaactgtaggacagttctctacttcagtcaaacatggatttgatactttaacctggcatctgcccagtgatgttctttgtagcattttttccctccagtaaaccttccagtatagaatcagacatggctatggctgtcatgactcatcttgatcttttatgtcattgatatgtattttttttgagacggagtctcgctctgtcacccaggctggagtgcagtggtgcaatctcggctcactgcaatctccgcctcccaggttgaagcgattctcctgcttcagcctccggagtagctgggattacagacgcccgccaccacccccagataatttttttgtatttttagtagagacagggtttcaccatgttggccaggcctgagctcaagtgatccgccatcctctgcctcccaactcctgatctcaagtgatccgccatcctctgcctcccaaactgctaggattacaggtgtgagccaccgcactcagcctcattgatatttttggtgaatgtagccacccccaaccccaccctgtttttttttttttaacagaaaacaactcagtttgatatttcctcatatttagaatcagtttatgtgtttttgcccataatgacttgatatccatctgccccctcattgatagtggtaaattttgatcacttggtcaaggtgtccaacttctctgtatatccccctacctggaacttataaccagtatatgtagactttcagaccatgcaaatctcttgcctatgaaagtgtcccgttaaattagcatgcattgatgtttcttacctgcactgatcttttactatgtttgcaaaatgattttccaattctagcgcattctccagctttacaggttgcacttggtaatctactataagcagaagcccttccttcccaatttattcatttaattttcattatacactcatggactgttgttttgctttgttttgttttgaaacagtgtctcactctgtcacccatgctggagtgcagtggcacaatcttagctcactgcagcctcaaacttctgggctcaagcaaaccccccaccttggcctcccaaagtgctgggattacaggcatgagccaccaagcctggcctttttcagtggttccaattcattattttggtgcacaaatggtctcagctttagctagacaagagacccttcaagctggctcctacatcctggtgatatgctattttttttttttttttttttgagtacttcttttttatttctatcctaacaagatgcttcaggcttatcttgtgcttatcctgccctagccctggaatcagctatttctgcaaggagccctggcttcttttaatgggagtggtattagaaaccaaaatctggtttatccatgatatgtgtgatgcactctgacctttttctgtttcattaaaaatttattttgatcttagaccaaatggattccacaatgcacattttgaaaatactgctttagggcaatgtactccattgtcactggcatcttctgaaagccaaggctaaactagtttttctgcagtattagtacagctccaagaattccctggaagctagcgcaggcctgtgggacagcgacaggctgctccccagtggctagtgctgggtttagcacgaggcaacagcaggctgtggagctgtgtttgcggcagcagctgttttccagaggcctaaaggcctggcctgggaaacatctgggtaggttcatcctgctctctgaggtgggagcttatagtcgacatctgcctctccaaaggttttaccgacggtggttgcacagaactcttactgtgacctttcccacaggctcagaggtactcagagcttctaaggggaagcttggcccacagagcagcagcttgtcaggaccgagccctggtaaccactacctccaaacctgacaagaacaggaagcacttgttaacaggggcagcttatttttggtctaatagccagctttgtctgaacatacctcaaaagtctggaacttctacagggactggtcctgttttcctgtggtttatcttcctgcttgccattgtacttatttattctggttcagtgcaagcttttaaattctcccactaaggacaaactctggccctcagatcctttctcagctgcatcaaatgtcctctgtgtttagtaaaatcatttgtggaattgggcataaaatagccaatgatagttaattgttttccttgtttatccttgcttttatacaatgtatattgtaagaattatataaagcaaggggctgaaccacatttcgaaataggcaaatcttctggattgtaaacttaaagattgagatacagcgatccttctatacttaagaggaatagaattgccattctggtaatttattaaattttttaaaattattaaatgcttatcaaatgctaggcaatgtatttttatcaacatcttctgaggaactactggactctagggctacagatttgaaattatgcctctgtaaattcccacgtcttgtcttcccccagccacagtggttcctgagcactggtgggcccaagattttcagttaagtttacctctagataactggtcacctgggaaataatttatgcatttaacacatttcaaacaacaatcaacctgctgaacattgtttctggaattagcaagtttgtaatgatgtttctattttttttttttttgaggtcggagttttgctcttgttgcccagactggagtgcaatggcactatctcggctcactgcaaccaccgcctcccgggttcaagtgattctcctgcctcagcctgcgcagtatctgggattacagtcatgcaccaccacgcccagctaattttgtatttttaaaagagatggggtttcacattggtcaagttggtctcgaactcctgacctcaggtgatctgcccaccttggcctcccaaagtgctgggattacaggcatgagccaccgtgcctggccggtttctatttttataatgcaaaaataataatcatggcaatgggaattcagggattgtatgtagtcagaagggctaagaagtagggagaaatgatgccattttagagcctgggcagctgaggcagagaagaaacgaatccatctgtggagctgacccaggtgcaagctcccaggatctgccagtctcagtcgcatggtttcatcctgaaagcagctgcccttacttaagggacaaagtcttttaggagctgcccacaaatacttggaaaacaaggcttcaaaatccagaagcaacaatgcaaatttcagaatggtgctgtgagaaaggaaaaatgttagagtcacaggagtttgccctttaattgtaagcaagacttcttgattctaaaaaatttctgtagtttattcagtttgctaattcagaagaaagtgtgcattgcatgagatcaaagaattgaaaattttaaaatgatttgggttgtagctggctcccaactgcaggtgagtcactaatctccaatgtttggatactgtatttgtgtttgttttgagacagagtcttgctctgtcgcccaggctggagtgcagtggtacaatcgaggctcactgcaacctctgcttcctgggctcaagggattcgtgtgtctcagcctccctagtagctgggattacaggcgccggccaccatgcccagctaattgtttttgtttttagtggagacggggtttcaccatgttggccaggctggtcttgaattcctgacctcaggtgatccacctgcctcagctttccaaagtggtgggattacaggcgtgagccactgtgtcccgcctgtttcctgtatgtggataaatctcaggacaagatgaagctgggacaggctcctcctactaccagtgacgcatgcatgcctttggctacaacaaaggccttttaagaacttcaatctccaagtctggtgggaggctttgtcttgcctcgtcagcctggaggttctgttttgaaagagcaaagcagcagactgaaattgaatgggttgcaaaggagaaacctttagagctatagaaaactttctatctatcgaaataggccatttccaacagaggcctgaatttagaaactcctagagctggctggaactttagaggataaccacagtggtccgtaaccctcttaggaagcactgggttggatacacaccctaaggggagtaggttgggttaggaacccttccagtcacctttctttgctctataggtcatcttatgaaggctaatcaccctccttttcattctagattattgctgtgttgcatacacgtgactgcaattaagtgttaaatctcacatctgtggaagttttggtagctcacttctgataagattggccagccgggtgcggtggctcacacctgtaatcccagcactttgggaggctgaggtgggtggatcatgaggtcaggagttcgagaccagcctgaccaacatggtgaaacaccgtctctactaaaaataaaaaaattagctgggcatagtggtgggtgcctgtaatcccagctactcaggagactgacacaggagaatcgcttgaacctgggaggtgggggttgcagcgagctgagatcatgccactgcactccagcctggctggcagagagctactctgtctcaaaaaaaaaaaaaaaaaaaaaatcggccagagggctcatggggaaaaaagtcacttgtgtgtagttcccgctctgtgacccactaaaagctctgcgtttaagggcagggaagcatggtccagccctgttatcccccaaaaggacacatacaaagctcagttcttgagctgtgcttatgcaatactatagtgatcagtaagctgaatgtatttgcttcacttctaaccttttttaaaagtgatcttgaggaatgctttgttgatcttgaattaataattcaaaaagggggtgggggaagatggggtatttctaagaaatgcagaatatttcagttttgaatattaaatctcttacaactacaaaccccttcatagtctccatccattcagaaaaacaaagccaaaggagaatttcttgtggaaaaaaactaaggaagttccccacataaccagccgaagaggaaaggctttccctgtcctctctcaagaggaagccacagcagccgtttgtcatgttactgctaccctggcttttaaaaagtgacagggagcaggactttagattaggactttggtggatactctgtatagttgagtataaaatccctacaatgagttagacttagtttcctagataaataaacgtgtctacataaaattttatatatatattttttcttccagttaacagtcttttctcttgggtgggtagaccaaacccaagatccaaccttccccttacttcccaccaagtag

SEQ ID NO: 97314 - DNA, 206746 bp, Homo sapiens
caccatgccctgctaatttttttgtgtttttagtagagatggggtttcaccatgttggccaggatggtctcaatctcctgacctcgtgatccgcctgccttggcctcccaaagtgctagaattacaggcatgagccaccatgcccggccttatgtgctataattttataaaactggcagcacagtggctttgtttacaccagtatcacaacaaatacatgagtgatgcttttgcactatgacattgacagctacaaagtgaggaggtgattggaatttttcagcttcattataatctttgggaccatcattgtgtatgtggtttgactggaatattgttaatgctatgcatgactgtatatccagaaagagtggtcagttatgtcaatgttgctgcaaggtcaagcaagatagactgacaaacatccattggacttagctcagggcgtctattataatcttggagaaacaatttctgtggaagggcggggtgtgtgtctgttacttcatgatggtaatcaaatagtctgcatactactgaacatcataaaagccaaaatggttttctattttataccactccccttcccatccttgcagctaagggaaaattaattgctcttctaaatgaatttaatacttaacttgaacctggctgttttaagtaatagaaaaactatgctttattcatccatccatttatccgtatatttagcaagcatgtatagtgcacctaccaactacccaggacatataagcattgtgctagggatgtaagtagggaaggaaaagaaggaaggaagctcaaaatgatgtatttgacccatgtacagttgtcctttcttatctgtgggttccatatccacatattctttgattcaaccaaccacagatcaaaaatatttggaaaaaaaagtgaatgcttgcatttgtactgaacacgtacaaactttttttgtcattattccctaaacaatatagtataacaactatttacataacacttacattgtattaggtattataagtaacctagagatgatttaaagtatacaggaggatgtgcataggttgtatgcaaatactatgccattttacataaggaacttacttgagcatccatggattttgatatttggtggggtagggggtttggaactacgcccacaagataccgaggaataactatgtatctcagtgagttaattctgtgaagtatttttatagcctttaatggctactccaaaggggtttatgctgtgaggcagaggttgcagtgagccaagatcacaccactgcactccagcctagatgacagagcaagactctgtctcaaagaaaaacaaaaacaaaaacaaaacaaaggatggggggcagtggtttaaggtgaagttctgtgatctcaagataaaatttcagaaagtgcctcttttttggctaggtgcgttggctcacacctgtaatcccagcctttgggaagctgaggcaggtggatctcttgaggtcaagagttcgagaccagcctggtgaacaaggtgaaaccccgtctctacttaaaatataaaaattagcctgtaatcccagaactttgggaggccaaggtgggtggatcacctgaggtcgggagctcgacaccagcctgaccaacacggagaaaccccatctctactaaaaatacaaaattagctgggcatggtggcacatgcctgtaatcccagctactcgggaggctgaggcaggagaatcgcttgacctggggaggcaaaggtcatggtgagctgagatcgcgccactgcactccagcctgggcaacaagagtgaaactccatctcaaaacaaataataaaataaaataaaataaaataattaggcttggtggtgcgtgcctgtagtcccaactactcaagatgctgaggcaggagaattgcttgaacctgggaggtggaggttgcagttagctgaggttgtgccactgcactccagcttgggcgacacagcaagactctgtctcagaaaaaacaataaaaaaataaagaaggtacctcttttatggttaagtaaaaaaacaacatttcagtagagaagggctttgttcttgtggagggttctctgataattttttcttttcttcgtctgtatttataccttggtgcttatgttcgagtcattttctttttagatttgaggctcattttaggggaaaaaaagcagagattagtgtgtttttcaatacaatacaatcccattaagtatgggcagtgttaattatggtttaacaagggttagagccaaagtttatttttgtccattgtgcatattaatagacctgcacttggagttaggtggattaacaaatgcccagagaaaccatttcaagtcataactttgaaaggaataacttaaaaatttctatgttactgattacaagttgacatcctaggccgggcgtggtggcttatgcctgtaatcccagcactttgggaggccgaggcgggtggatcatgaggtaaggagatcaagacactcctggctgacacggtgaaaccccgtctctactaaaagtacaaaaaattagctgggcgtggtggtgggtgcctgaaaccccagctacttgggaggctgaggcaggagaatcgcttggacccaggaggcggaggttgcagtgagcccgagattgtgccactgcactccagcctgggcaacagagtgagactctgtctcaaaaaaaaaaaaaagttgacatcctaatttcaaataatttaaaaaatctatttcttaaagctgtaaggatgttatgaaggattattttactttggagtacttgaaaatccatttcttaaagctataaggacgttatgaagggtatttttattttattttatttttttgtttttcgtttttttttttgtttttgagacggagtctcgctctgtctcccaggctggagtgcagtggcgcgatcttggctcactgcaagctccgcctcccgggttcacgccattttcctgcctcagcctcccgagtagccaggactacaggcgcctgccaccatgcccgactaatttttgtatttttagtagagacggggtttcaccgtgttagccaggatggtcttgatctgctgacctcgtgatccgcctgccttggcctcccaaagtgctgggattacaggcttgagccaccgcgcctggcctattttatttatttttgagatggagtcttgctctgtctcccaggctggagtgcaatggtgcggtcttggctcactgcaacccccacctcccaggttctagtgattctcctgcctcagcctcctgagtagatgggattacaggcgcctgccaccacatctggctaattttttatagttttagtagagacgaggtttcaccgtgttggtcaggctggtttcaaactcctgaactcaggtgatccagccgcctcggcctcccaaaatgctgggattacaggcatgagccaccgtgcccggctattttattttagttagaatacttgaaaatgtggcaaaagtttggtaggttagcaaagtcttcaggaataacattaaccttgggttgatccttgcaaattttggaatccaaatagtgaccacagcaccttggcaaaagtggagctttctttaggaggctagaggaagagaaaaaatgggaaatataagctaaggtcacattacagtaggaataagtaaacatttagttgttttacgtagatcttttggtggattcattcaaactgattcttttcttgcagacttaggctagaatcttagggggtcaaaaaatagattcttggccaggcacggtggctcatgtctgtaatcccatcactttgggaggccgaggtgggcaaatcacgaggtcaggagtttgagaccagcctgaccactgttgtgaaaccttgtctctactaaaaatacaaaaattagctgggcatggtggcatgcgcctgtaatcccagctactcaagaggctgaggtaggagaatcacttgaacctgggaggtggaggttgcagtgagccgagatcacaccactgcactccagcctgggtgacagagcgagactcagtctcaaaaaaaaaaaaaaaaaaaaaagactcttttcttaggtttttgtttgttttaagaaataactagaaacaaagattacagtatgctgcaaatcagtggtttctggtaatacttcagttctgattggtgaagaagggaaatagaaaattaagacaattttaaatgatgacattttcagttacaagttcaatcagcatagtcatcaactgacatttattgctaaccccttgggtgagtagcactgaaccaaatcccacaagaaatatcttctgcctacgtgaacaaaccggttcttgaactattgctttcagaagctatagataatagcagttgattttaatatgttgtgagattccagccttggaatcatgaggttaaaataggaaaaaccataccaaaaaacagtttttaatagaaacttggccaggtgcggtggctcatgcctgtaatcccagtactttgggaggcagaggcgggcggatcacgaggtcaggagatcgagaccatcctggctaacacagtgaaaacccttttctactaaaaatacaaaaaatgagccgggcgtggtggcatgcccctgtagtcccagctacttgggaggctgaggcaggagaatcgcttgaacccaggaggcagaggttgcaatgagctgagatcgcaccactgtactccagcctaggcaacagagagagactccatctcaaaaaaaaagaaaactgtatctactgtttgtcttaaagaaagaagtcattgtcttatgcaatgtaacactaaacatgtacaattgttattattattagtttttttttttgagacagggtcttactctgtcacccaggctggagtgcagtggcctaatctcagctcactgcaacctctacctcccaggttcaagcgattctcctgcctcagcctcccgagtagctgggattacaggctcctgccaccatgctcagctaatttttgtatttttagtagagatggggtttcaccatgtgggccaggctggtctcgaactcctgacctcaggtgatctgccctcctcggcctcccaaagcgctgggattacaggcatgagccaccctgcccggcaacatatacaattgtttttaaataattcaccaaatattattttagtataagagttgaattttatttgagtaatcctttgtatgaataatgcaaggtgaacttttattttgacaagtaaaaataaggaggtgagttggttcagagcttatcaggtacaatcttaaaataagtgatttgttcctgcattgaaaactaaaatacaagaaatctggtggatgtcaaaaatttatgactaaaatctatttttacctgacctctaaggttgatatcacatttaacattaaggtgttttttattctaaactaaaagtgattcttttatgccatctctgctgaaaaatttaaaaaattatttaagtgtttaagtatggtcagattttaagtatctaacattctccagtagttccccctcccttgcctattcctctccaccccagtctctttctagtaggattcctattgctagctacccagtcattaccattctaaccatttaaggtagctctgcttggtttatttattctgaatactacaattcagtttccctttatcctggcttcctatggcaagttgacaaaccagtttatttttttcccttttatttcaacaactcgtgatttagattggttaggaggatataatgtaatcaggacacaaccttttcccctcagaatctgtatttgtgagacttcctcctttcccggctgaacgtgctgaagtcagatcgagtaccttgtgaaggacttcagcccccacagttccctgtgtgcgcatgccctctcatcttacagttgtcaaagtgcttttgccagagcggtcacataatcaacctgaaagaagaaaataaatactgtatacttttaaattttatcgattcttaaaaactggacactcaaaggtaactgctactaagattttgttacttgaaattgggttattgcatgtaaaagaatatctattgtgtgtggtgggggaggggaaggaggtatctatttctcactttgctgtaaataagcaaaaacaaaaacaaaaacaaaaaacccaaaaaaacaaaaaacaaccccaagaacacaaaacaaactatacaggcagttgctgagagacgttgaatactacctttgcaaattttatgttaatctattgcttaccttttgtttgaaaaggtcttatttattaaaggtgggtcttgaccttgacagagtgaatttatgcagaaagcaaaatttatatttttaaggagtgttgagaagagaaatgggtgttcctggtataaaatttttaaaattcaatgaatatgttaacattgattacagctactataaaatgttctgagtccagcttactttttggcttttttgctgaggtacagcattaatttttccatgaagagcatgtagtttaaactgaaggcattaacagcaagcattgatacaagcaaccggaaaagcagagtgatattaaaattataatcaaatgcctatttcagccatgatgatatggctattataaagacaattctagctcactggaagtgactcaartctcagattataatggtttactgcagcaccgtttaaaccaagtatgaaaatgtctctttctgtgaccatcttctgtggcagcaatagaactttgtgctgtctaaatcaaagcttcatttgcctctttgtattgtattttgcaatactgatcaaagccattgttttagaccaagggaactgaggaacataaaagcaatcttaaatagattttattggtagtagccggcaatctgtgttgtatattatattgagttgggtttttttccctgggggggttgaagggaggaaaggcaggggaatgaggaatagaagggagagcaaggtggctgcgaagcatttcctttagcccaccactattttgtgtatgaaactttgaaataaaagatactaatgaaccattttaatgatagtctctaataaaataatagaactacttttaatcccatttgtctgatatattttgcataatagttaatattttcattttctgatatgttgattttaacaataattattatcatgaggatgtctagaggcagagcttctgtgtgtatctgaatgccttttcacaagtgtcctgagaaagattcctctccaagtatctgggttaattaagtaactgcattaaatttattaataactttgttgcaattgtactgaatcatcatctaaaaataattatatgtttggtcatatgcccctttaacatttcaaaatatttgtttttagggtctcagcactgtaatatttatatatttaaagcaattaacatgttctaaggacaagctaactacatgtatggcagtctccgggttttgagtgattagtaattttcatccttgaataagaaaacaggctgtatggtagaggtgaatatagcccttctctgtgagatggaaaataccatacactccttatatggctaaatgaagcagtgatggcaatgcactataattacaatgtatgaaaatttgagactttgtactcctctatttttaacacttttgctagcatatggtaattcagggtcttcaaaccatagtgtttcgctgctaatactagtgataagagaatggattctaaatttgccaaagtcttgtgaccaagacagcagcaggaggattcaaaattgaaaatctgacaaccccagaattatcttgactgtctacttaaatctctgagggttttttttaaagccccacccccaccctatctcacaggcgctcgctcgctcgcgcgcactctctgaccttaaatccaaccagaagcatttctccactctgcagagaaattcttaggctcctgttgagacctgaagcactgcgatgccaagaaatctcttgtgcggcagaattggagacaagaaaattggggaataagcagaaaaaccataatccttagagtaacaagaarcaagcacttccaaacgtttcagtaggtttttacttctttaaaaacgttttttttwaaattaactgtctcctaacaaaatggagtagctgcagctactgggaggccagagaatgattgtgcagctgagtccttctaacaaatgccaaggattcctccctcgtggttcgctgcagctaaatgaaacaattaccaacgcaagaaggcagtttgctaatcaagagggctaatactggtttttttgttttgtttttttaaaaagtgttcgagctggggaagggagaagaaagggtcgtgtgtgcggtgtctttttaaccttgctgaaggacgcagcagtatttattgacgtatgcaaataagtgggggagggtggtgcttgggaaaaaacaggaaccagaatcagtttctcattgcagggcgaacgctctgagttccggtgaagggaaaagagacgtggcgaaattgctgtcttttctgtcttataagcacatctctcactaatacagaaaaggaaccaagacatctgaaaggttgaagacgctctcacagtatttttagagaccttgctcgacaccttccctattccccacccaacagcctgacctgttcttctaaatgggagattatggatttgcattgcaattggctagtagcggtggcgatggattttcgcaagtgaaacacccgcccgcttcagcgagggacattcatgatcacattgacaataacgcgtctctcttttttcccgtttcagctgcgcaaaccatgcaggatgatttactgatggacaaaagcaaaacccagccccagccccagcagcagcagcggcagcagcagcagccccaacctgagtccagcgtatccgaagccccgtccacgcccctctcctcagagacccccaagccggaggaaaacarcgcagtgccggccctcagcccagccgctgcccccccggcccccaacggcccggacaagatgcagatggaatcaccgctcctgccaggcttgagtttccatcagccycctcagcagccgccgccgyctcaggagcccgcggcaccgggcgcgtcgctgtcgccgtccttcggyagcacctggtccacgggcaccaccaacgcggtagaggacagcttcttccaggggatcaccccagtcaacgggaccatgctcttccagaacttcccgcaccatgtcaacccagtcttcggaggcactttctccccgcagatcggcctggcgcagacccagcaccaccagcagccgccgccgcctgcgcccgcgccgcagccggcacagccagcgcagccaccacaggcgcagcccccgcagcagcgccgctcacccgccagccccagccaggcgccctacgcgcagaggagcgccgccgcggcgtacggccaccagcccatcatgaccagcaagccgtcctcgtcttcggcggttgcagccgctgctgccgcagccgccgcctcgtcggcctcgtccagctggaacacgcaccaaagcgtgaatgcagcctggagcgcaccgtccaacccctggggcggcctgcaggcgggccgggaccctcgccgggcggtcggtgtgggcgtgggtgtgggtgtcggggtgccttccccgctcaaccccatctcgccgctcaaaaagcccttctccagcaacgtgatcgcgccgcccaagttccctcgcgcggcccctctcacttccaagtcctggatggaggataacgctttccggaccgataatggtaacaatctgttgccatttcaggtaatactctgctgcacctacacactccttccctctgccccgctccttttgccacttctctgacttttaatcatccacccgcttatatttaaaaagggcagcaatgtccagctcctctttccccttccgaagcctccagttctttagggctgttccattatcagaggatgaggttgggagaacattgtgattactggaggaatcgtattcgtcccttcagggtagaagaagcctttttcttttagtttattttctccttcatggtgtttgtacctcttattttgacttcctttgacaagtaaagctgcaagtgtgtggcaaggtgccggcatagtcccaggatgagtaggctgagattcctatcattttgagtagctacacatttcaggttatgcaatcctgagctcagggtgccgcctgcaagcggtccacacccaaaccaccctgactttactcttaaagaggttaacaacccttgagtggtgctatttcagacggttgcgtatgctcagttaaactaatgtgaacacatgtgtttatgtctcgctaaggtgctagaatcattaataacaatcagcatattgcccctgctgggaaaattatgagtgtgagatcctaataaacactcactactgtgtaagggaaggaggtggaagagtggaaattctaagggcaaccctctccatgttacctagaagaaggattttttttttttttttcggaggtaagagacaataggacgtgaccttcagagccatattgcaatggagtctatttgctagctagcactgaaatatttaaagctgcagtgtccttcatcagttgggttaagaaaatacagatcaattacatcatttgaaactgggcaaagtgaaagtcttgcaactttaatgaaaaatgagtcctgtgtcttggtgttaaatgccaatgaaaaactcaggatgtgccccagacaaaaaggttgaaatgaagagtgtccttatttctgttcttgctttctgatctagtccacagccatagcaattggcagtgtcctgggcatcttgggttggaaaggcgtagtgcgggtgtgtgttcacaggcggcttttgctcccaggcaaacacttatccttcacttagaagttgatttggctgtaagcttctaggctcagttaaagaaaaaggggagaggggaaggcctccaacaagacccaatttggatggtcaaggaaatgaagcagaaatcctttgaggagtgcttggtagagctgacagtttgagagaggtatagtgtcaggtgcagatgcagtcttcatctctttacattacagatgtttggagtggctcccattcatgaaggaagagatgaggttattgagaaggacatgactctctaggctagagtaatgatttttaactttgatgacagaggatcttcacaaggaattttcacaaggatccttcaggaatggacgatttcaatattaagttatatttttttcccattctaaagtttgtttattttaataaaatgagatgttgcaaggtgggattcatttcatagagaaaaggaggaatttgctttctggaatttatgtgcttatttttggagggggtagagcagggaggctgcatttggtaggaaaggccctctttttctaacattccctctctttattctcatgctccgtacctgagttcagtcttagaggataacctaaaatcttatagggagttttgggagctgataatatagacagatcttgttatctttttctgggagttgactctgaatacaactagctattggtgaattatctcctggcatggggattagggagagattaaatccacatagtttcgtcaaacctgatattgacgaggagtatagggattgccagttgttacacagcaaaccattcaccaatgatgctaataagagccaaatggactggattcagtatagtctcatctttccatccctggtgatgctattggataggcaaaaatggccaaaagatttgtaggaggacagatttgattgaaaattgagcattatttatttggccttgggaagaattacatatacattatgtctcatttctttttcataaaacagagcttagggttttggagcaattttaggatcagaggaggaagttggttgtgctttggctgggatattagacttgatttctgttgataaccgtaccaagtttgtgttagaaacaaagaacacctgagtcttgtgtgcagaattttgtgtatgtgcatttattgaaataatttttctaaaaaaggaagaaaatatcttaagtggtttcgatgattttttcaaaatatttattctggcaaatgtgattttatttaaatcagagtttattttatagaatagcaactttattttttatttaacagatttttgagctattaataaaagagtctttctgcagtgatctactctaatgtatgttaaaatttttaaagaaacccattctaccctgcactgcttcttttttgccagtttctgccaacacaatagattttgagtagctttacttacatggcttatattgcaaaagcaatcactgtattttatgtgtgtgtgtgtgtgtgtgacaatgtttcacttttgttgctcagggtggagtgcagtggcatgatctcggctcactgcaacctctgcctcccggkttcaagcaattctcctgcctcagcctcccgagtagctgggattacaggcgtccgccaccacgcccggctaattttttatatttttagtagaagcagggtttcaccatattgaccaggctggtcttgaactcctgacctcaggtgatccacctgcctcggcctcccaaagtgctgggattacaggcatgagccaccatgcccggcctagcaatcactgtatttgaatgttgttttacaaactataatacttctttattctaataaagtttattggtttctctgggttttggtggctgctttcttagggattacttttatctaaaagtcacttcatttctataaatagggagactgagatcctgagaggtagagtgactgaactcaggtcctacagttctagctaattttgttgtatgtgtccttaacgtccatgtagtgcaggtgctgtcaggtagaattcattttaagtaagattctctttggactccattcagagggacttagtgaagttttctattaggctaatgcatcttggtgatgtacctctcagcaacagagctcaagaacagagaggcactccactggggggaattatatatgtgaatctttctatatttctacaagtcaaggaagcctagatatgtattagtttggtgcataagtaattgtgggttttaccattatggcaaaaaagtaatggcaaaacccacaaattacttatgcatcaatttaataaaaggactagagctattttctttatgttgtaaatttgggtttaaatagcattgctgtcaagaaaagtttaggagggacttttgagagcacctattctagactactatgctcattttacagaggataaaatcaaagtcccaacatgtgaggtgacgtacccaggttcaggttgataatttctgtcataagcaagctttgacagcagattgcctggatttaagtctccactttgcaagttattggctttgtaatcataaacaaattatataaacgtgctggttctcaatttcttcacctgtaaaatgggaataatattagtttttggccttgtatgagttaaaatgtgaaactaaatataaagtgcgtagcacagtgcctggcccatagtaaagtatcccataaacgtagggttatgattattcttactgtaatggtgaccataggctttgcatgatcttgtcataatacggattactgatttttttttttttgagacaatgtctcaccctgtcacccaggctggagtgcagtgtgttatgttggctcactgcagcctccacctcccgggttcaagtgattctcctgcctcagcttcccaagtagctggaattacaggtgcccgccaccacacctggctaatttttgtatttttagtagagatggaatttcgccctattagtcaggctggtcttgaactcctgacctcaagtgatctgcctgccttggcctaccaaagtgaattgccgatttttcatacagtgcattctaaatatccccaaacttcagtgtaatgccatttgttcttttttcctgtctgatggtaccttcatgatcagagcctttgaccattgtagtaatgtgaggatccagcatttacctatgggccaggccctgtgccaagcactttacatatagtttctcactggaactcctttgagataggaactcctttgacataggaggactattgtcattcttgcttatttttttgttttgtttttgttttttcgggggatggagtcgtgctctgtcgcccagattggaatgcagtggcgtgatctcggctcactgcaaactctgcctccccggttcaagagattctcctgcctcagcctcgtgagtagctgggattacaggtgcgtgctaccatgcccagctaatttttatatttttagtagagacggggtttaccatattggtcaggctggtcttgaactcttgacctcgtgatctgccacctcgccctcccaaagtgctgggattacaggcatgagccactgtgcccggcctattatccttgttatattgacaaataaattgaggttcagtgcatttacactgtttgcttaagatcacagccagtaattggcaaagttgcctccagagcccatggctcctactcccttgactattctgtctctaggacatcgcttaatagtgcagtgtagatgtaagaagctggactgaatctgtacttgaccctatgagataccctggaagctgtgtttttaaaaaattttgtatttgtagaaatgcagaaagaaaaaaatacagtgactgtaagtatgccaccatgaagattcatcggttataattttttctgttttttactttacatattttactttacatattttttaatattatgaaatcaaagtcccaaaataggaagtgacttacccaggttctggttgataatttgtcacagaagcaggctttagcagcagattgcctggattcaaatttaatttggaaaaaaaaatcaaattattccatactttctgtctgtatctctgcctttatccttctcctttttttttttttttttttgagacaaagtctcactctgttccccaagctggagtacagtggtatgatctcggcttactgcaacctccatctctgggttcaagcgattctcctgcctcagcctcccaagtagctgggactacaggcacgtgccaccatgcctggctgatttttgtatttttaatagagacggggtttcactatgttggccaggctggtcctgaactcctgactttggatctgcccgcatctgcctcccaaagtgctgggattaccggcatgagccaccgcaccctgcgtatccctctccttttccttctattcccaagttaaaggtgattgcaaggagttttatattttatgacatgtctaggtaattataacttagtattaattttgctggtgggttatcaataactgaggaagaagtttcttacatgaattcatgggaatacaaatgatattaaaaacaaatatgcctactcataataaatttttaggaaataccaatatttttcaagtagtttgtgttccttttccttttttttttccaagtagtttgtgttctgtccatttcctttttttttttttttttaaagacagaatctgtcgcccaagctggagtgcagtggcatgatcttggctcactgcaacatctgccttccctgttcaagcaattctcattcctcaacctccctggtagctgggattacaggtgtgcaccaccatgccccactagtttttgtatttttagtagagacagggtgacggggtttcaccatgttggctaggctagttttgaactcctgacctcgagttctctgccagcctgggcctcccaaagtgctgagattagaggtgtgagccaccgcatctggcccccactttcttttttttaagaccatcttttcaggaggtaatataaattgtcttgtttgtgcttgcttttgaataaggatagtatgacctagatttaagactcttctctagttggtttcttaactactatttcaatgcaaaaccactttaaggtctactcatccccacaaactgtttcagaacctgttatgacatggttgatatgaatgccagcaaaaccacattatctattttctatttaaaagagggattggttaggaaatattaggtttttgtgctactagaaacgttaatataaaactatatacttcaaaattgcatgttgaaaagtggttagccttgtttaaactctttatgaccttgtcgtgagttagtacaaaagaaccctcttagaaatgtaatttagatatcctctgacaaagaaacaaatttctacttacatagctttctctattggttagccaatttgatgtattttttttttttttttgagatggagtttcccactgtcacccaggctggaatgcagtggcacggtctctgctcactgcaacctctgcctcccgggttcaagtgattctcctgcctcagcttcccgagtagctgggattacaggcgcctgccaccatgcccggctaattttttgtatttttggtagagacggggtttcactatgttggccaggctggtcctgaactcctgaccttgtgatccacctgcctcagccttccaaagtgctgggattacaggtgtgagccaccatgtctggcccaatttgatgtatttcaagggctgtataaggtgtaatgccatccagttggaactggttttcattgctaagttgattttttatagtgttttgatctgcaggtatcaaaagattatgctttgttgctcaggcacggtggctcacgcctgtaatcccagcactttgggaggccgaggtgggtgtatcacctgaggtcaggagttcgagaccaacctggccaacatggtgaaaccctgtctctactaaaaaactacaaatattagctgggtgtggtggtgggtgcctgtaatcccagctactcgggaggttgaggcaggaaaattgcttgagcctgggagctggaggttgcagtgagctgagatcatgctattgccctccagcctggatgacaagagtgaaactccctctcaaaaaaaaaaaaaaaattatgctttgtttactgcaatatgaaaagtttgaggctgggagtggtggctcacacctataattccagcactttgggaggctgaggcagatggatcacctgaggtcaggagttcgagaccagcctggccaacctggtgaaaccctgtctctactaaaaatacaaaaatttgctgggcgtggtggcgggctcttgtaattgcagctacttgggaggctgaggcaggagaatcacttgaacccgggaggcggaggttgcagtgagccgagatcgcgccattgcactccagcctgggtgacagagcaagactctgtcttaaaaagaaaagaaaagaaaagaaaagttgattaagctgtgtgggttttactgaggaaagagaattagatggaggggagcatacagtagtggacaacctatgaaacttggaataaggaagacattggttaaagccttggctctgtcactagtgatgaggtcaagtcacttatccagtgattctttttctcagtctgcgaaaatggagggatggagtgggagagagagagtggacagaagggaaaaggaggaggtgggaggggagagggagcctagcttcagggtttggtttgtgagagaatgtgtacaaagtgttctgaaaattatatactgttagaggaatactgttgtggcttttggatgtttgcctaacttctgtaattgtagtcagaattagagtttaaaagaggaaatattgttgatattcagtagtccaaagttaaacactagctgatggcatgtagtggagggggctagaaggaggcatggaagaacatcaaaaggcactttgtatattagggtgactgcctattctagaaagctagtcatggtggtccgaagactagggagtatatatagacatgtcacactaatggtggagatgtgtgactatctgcttgtgcttatggctgactcaccaatgtaagtgtaagggttttcctggatccatgaacattttaattggtgatgggagaaatgcttaaactcttaattttctgactgctataagggttgggttgattttgttggttctggagatatcaaaggtctaatttgaatctccttaccaccatttccctgtaggccatgcctgaccctctttaggggccagtgtggttgtcagagttagaattcaggatggagcctcaagttttgatcttgagagttgaggtaatatagccataacttataggaggctttcctgggaaggttgctgtacttgcagtagaaaccagcttcacaaggaattttctacagctggtccttataccttgtgggtagctgctcctgtgagggttcaaatgctgcatttcacctattatacttcagttctgctacatttagttttcacaccctttagtgttctttgtggtgctgggcatttaaacttcttaatgtgaaaccattccaatatttgcattttgtgaacttgaaataggaaagtactagtgaattaaagtactacagtaacttagcatcttggaataaagcctacttttctctcctaagaagcactattatataattctcagaaataataaatattattatataaatgcttgttggcaggcctcagaggagagaaacagaaatgggcacaaaacagcctttatattatttgaagtgatcatagaattaatacacacaaagggaaggaaacattgtgtactgattatgtatgcataggactattgtgtggccaaatagctttattcctcaagcattcaaactcatttcaaggtcaagatcaaaaacaagtaactccctgtctgcagtaactcagtgcaactaattaaatggtcaatgccatgaaataaatcagtgcctggaagtgcctgacacttagtaggtattcattaaatgaatgaatgaacatttaaaccaagttataattttgtcctttatctttacatgtggtatatttaacatttttgtgacggattctccattctagtatttctttttttttttttagacggagtttcgctctcgttgcctaggctggagtgcaatggtgcgatctcggctcaccgcaacctccgcctcctgggttcaagcaattctcctgcctcagcctcccaagtagctgggattataggcatgcgccaccatgccctgctaattttgtgttattttagtagagatggggtttctccatgttggtcaggctggtcccgacctctcgacctcaggtgatctccctgccttggcctcccaaagtgttgggattataggcgtaagccactgcgcctggcccgttctagtatttctatacaagatatctgtagaatatggaaacacaggtgtatgtacataatattataaaggacatcttcaatttgtaaaaatataaaatatatgtttcccagactttatggacaccccatagttctggcctgtgacttcatatgtgtagatttggtatgccaagaagtaagcagagttcttgctttgacataaaaggtttatgacagccaataaatgggaacactagcttatatcttaagagttagatttttctttatcgcttcatcattgatcaactcattcttttggagttaatttatcttgttaatggtgatttggtttgtttctgacttgtcatgtcgagttattaacaatagaactgactagaatgagagtcaggataattttgacaataacacttagaaatattaaggagaaggctgggtgtggctgctgaagactgtatttgtagcactttgcggggccaaggtgggaggactgcttgagcccaggtgttcgaaaccagcttgggcaacatagtgagaccctgtctctataaaaaaattaaaaattttttaaaattagctgggcctgatgtcatatgcttgtagttctagctactcaggaggctgaggcaggaggattgcttgagcccaggagtttgaggttatagtgagccatgattgtgccactgcattccagcctaggtgacagagtgagaccctgtctctaaaaaaattaaaatattttttaaaaaattggctgggtgaggtggctcacgtctgtaatcccagcactttgggaggccaaggtgggcggatcacgaggtcaggagttcaagaccagcctgaccaacatgatgaaaccccgtctctactaaaaatacaaaaattagccaggcatggtggcatgcacctgtaatcccagctactcaggaggctgaggcaggagaattgcttgaacccaggaggtggaggttgcagtgagccgagattgcaccactgcactccagcctgggcaacagagcgagccactgtctcaaaaaaaaaaaaatgtatatatatatataaattcgacaaagaacaggttatatagtatgcccattcaggtagtcattaattccaggcatgtgagattagaaagcagagatataaaaggcaaataattttctaccttaaagatgcggtagggtttttgagggctgattaaggatgggagggaatatttcagaggaaacatcttagtgatctgacaatcgaaccccctactcaaactccaggagtcgtagttcttaggtttcagataagcagcaactaaaggagacgagaggtaaatgtatctagaagcacctctcttttgcaatctggaatggaaaatttattttccttttttggaccagagaaatataacctagataagcagagaattaaaaatagtgaaaaccagtaaagtttatgagtttatggaggaaaggctgagagataatgtttggatcatttgttataaatctgtttctgtgtttgcatttgattttgtgggtagactgttcaactctttgccacatcattatttaaagcaattataggctgggtgcagtggctcacgcatgtaatctcagcactttgggaggccaagatgggcagatcacctgaggtcaggagtttgagaccaggctggcaaacatggtgagagcctgtctctactaaaaatacaaaaaattagccaggtgtggtggtgcacgtctgtagtcccagctactcagaggctaaggcaggagaatagcttgaatccgggaggtggaggttgcagtgagctaagattgccccactgtatccagcctgggcgacagagtgagatttcatctcaaaaaagaaaaaaataggccgggcgcggkggctcacgcctgtaatcccagcactttgggaggccaaggcgggtggatcacgaggtcaggagatcgagaccatcctggctaacacagtgaaaccccgtctctactaaaaatacaaaaaattagccgggcgaggtagcgggcacctgtagtcccagctactcgggaggctgaggcaggagaatggcgtgaaccccggggggcggagcctgcagtgagccgagatcgcgccactgcactccagcctgggcgacagggagactccgtctcaaaaaaaaaaaaagaaaaaaataaaataagtaaataaagatgttgtaaccagtagtagaatcctgaggtcagataaacagttaagaaggttggcattaggtagtatttttgttacccatatagctattaaggaattccctgatcaaagggatgggatttacattgttaagtttcttttggcacctgtgttcaaaatcataatccatgtgctccagcttttgggtgttgtattattttgatgtcctcctctaaatagatactactaacacaaatataggggaccagaatgccagcactggcatcatactttccacataaataattttatgtaatccttacacgttcttgtgaattagggattattatcctatttgagactcagagaatattacctaactggtagtaagaactctcctccgctctccctacctcagaccacagaggtaaccaagaggggagtgcagtctccctgaccttttgttttggaatctcacaaacacacagcactctagaggaggggcctattagttttcattttataaaaataggacaaagtgcccatactgtgcaacaaccttgcttttcagatgaacaaagtattatttatgcttcctttctgtgcatataccatatacagattttgacaaaattggggctcagtcaggaggcgctgcagttctgaagggggagggggcggacatctgggttcgctcccccctccctgttccctccatcccttcccctccttccaggcccccacccccacaggccccttctcccagctcctggcccctcctgcaggtctcctccctgagcccccactctgcccaggtcagccctctctcttgcccctccctcaatatgcctttgatgttctgttctttccccacatcttccctaattcctcttatgctacattgtcttacagtattcatcactctctgtaatgagctggtttattttgttttgttcttccacagtagaatgtaggctccacaagggcaaggaccttttcactgaagtgtctccaggggctgtgatagtaccagggatattttgggcacatggtaaatattttttgagtgtgtttatgatctacatttacaaatgactgattaggcatttattggtcatttacatgtagctaccagtgtgagtaattaaaacgtttagctggtttctaccaggtgtaaggctgataggaattaaagttgaaccatacatttcccgttttaggacaactccttgacaaacatgtattaaaatatagaatgataaggtctaaaacaagagtgtgttgtgtgcaacaaagaagagtttgtacttgaatcagacaaaggaatgattaaatttgtgtgtggttgggaagcctctaggaaagtcttcaatagtttaagatattttcggagtttttccgattttgaaagtaatacctgttaactatttaaaacttgagagggaaaaaacacagataaaaaaccccagttgcctgtaattattattattttttttttgagatggagcctcgctccgttgcccaggctggagtgcattggtgcaatctcggctcactgcaacctccgcctcctgggttcaagcaattctcctgcctcagcctcctgagtagcttggattacaggtgcttgccaccacgcccggctaatttttgtattttcagtagggattggatttcaccatgtaggtcaggctggtctccaactcctgacctcgtgatctgcctgcctcggcctcccaaagtgctgggattacaggcgtgagccactgcacccggccaattgcccataattctattaatcagattcaaatactcttaatgttttggtatattttctgttaattatttcttttttgtgtctgtgtaatgtaatttacatagtggagatcattctgtttatgcagttttacagttttatagccatatttttaacattttatataatttataaacattttgatgattgcataatattccattatgggaatccattataacaaaatgttaacaatccattatacaaaatgttttcatatttgggggatttagatagattgttttgttgttttttttgttttgttttgtttcatttgagatggagtcttgcattgttgcccaggctggactccaactgggttcaagagatcctcccacctcagcctttcaagtagctgggactataagcatgtgctaccatactcagctgttttcagttttcgaatattgaacatgatgctgtcatgaacatcgttgggcatcataatactttatttagaggtgagtgggcagagtttgacaggcagatcagaaaatggggtaggaggctgggcgcggtggctcacgcctgtaatcccagcactttgggaggctgaggtgggcagatcacgaggtcaagagattgaggccatcctggccaacattgtgcaaccccatctctactaaaaatacaaaaattagctgggtgtggtggcacacacctgtagtcccagctactcaggagggtaaggcaggagaattgcttgaacccaggaggtggaggttgcagtgagccgagattgcatcattgcattccagcctggcgacagagtgtgactccacctcaaaaaataaaaaaaaaaaagaaagaaaatggggtagggttcatttttttaaatttatatataatatgtaaattattaaatatataaaatatatatatttttaaatttatatatatataaagttatatatatatagttttttttwagaagtcaggtggtcttgctctgtcactcaggccagagcacagtggcatgatcatagctcactgcaacctcagacccctggactcaagcgatcctcctgcctcagccttcctggtagctaggactacaggcgcataccaccatgcccagctaatttttaaattttttgtagagacaggatcttgaactcctgggctcaagcaatcctttcacctcagcctcgcaaagtgctgggattacaggcatgagacaccatgctcagccagggttgttgttgttgtttttttttcagcagagggactaggttgtgtacaggcaagaaacaacatggtgtgctgagagagcaagagatttagggtaggggttaggcaagagagagatgaggctggagaagtagataagtgccaccagatcaccaagagtattctagcattctgtgtcttcagctttctcaagtgaggaacattgaaggatttttaagctgagaaacatagctattgtaaggcttttttaagttggtgagtgaagtgatcacatttttgttttagaatgattactctaggatatctttgtcaggaaccaaactcgggaaaccagttaacgtgggagaacctaaagtgattaaaaggaagggacagatttaagcaacaatcaggggcacggtggctcacgcctgtaatcccagcactttgggaggctgtggtgggtggaacacttgaggtcaggaatttgagaccagcttggccaacatggtgaaaccccatctctactaaaaatacaaaattaggctaggcatggtggtttacacctgtaatcccagcactttgggaggccaaggtggatggatcacaaggtcaggagttggagaccaacctggccaaagagaccaacctagccaacatggtgaaaccccgtctctactaaaaatacaaaaattagccgggtgtggtggcaggcgcctgtaatcccagctactcaggaggctgaggcaggagaattgcttgaatccgggagttggaggttgcagtgagccgagatcacatcattgcactccagcctgggcgagagagtgagactctgactcaaaaaaaaaaaaaaaaattacaaaaattaaccaggcgtggtgacaggtgcctgtaatcccagctgcttgaggggctgaggcaggagaatagcttgaacccagaaggcggaggttgcggtgatccgagattgtgccattgcactccagcctgcgtgacagcgagactctgtctcaaaaaaaaaaaaaaaaaaaaaaaaaagaaataattaggagctcacctggaaggacttggtgattacttgcatgtaggaaataaaagagaaggaggagtctagaatgactgccaggtttttggtttaggcagctggggaaaatcatttagaggtggaaatggttaatagtggcagattagaattttcatgactcgtaaatcaggtgggttttagagtggaggaattttagaaaggaaagccatgtgttgggtatatttgaacaagtgatttgacatttcttacccacccatgcttttgtgtgattcctaatgtgtggaaaggaaaaccttattaggatagattactttgtggactacttattagaacactacatcttagagaaggaacaactaccattctaagtcaagagctttttctgactctagcctgattttcctaaattgtaccctgagaattagaggatgtattagttgattagtcatgttgtttgtgggttatagcctggctttgcaaaggacagtaaggaattcctaaccaattaatcatgtgggaggattatacgcaataaaagaaatgaaacctgccatccttttatttaagttgaataaaatcactgataaatcagtgcatgttattatattagccagtctgagatatcattaataaggtcttagcaaagttgaaattagaccttatggaatttagttctgctgttctaatacaaggcatagttttctaaatgggtataaaggtgatgaaatgctttgcagcttggggtgtgtagagtcataggttgatgagctttgaggcagaggtgggtaaaagggtacaggagccatcagaactgcattttatgtctccatttgtatttccagggagaraagtgagctgtaacattcattaaattttcaaaggggtccataacttaaaaatggttaagaattacagatacagagtaaaagcactgctacatggcacccaacaacatggcacccaatgcaaagttttaagattttaaaacatagacatctcttaaaatttctctttttccctcttcagagctgagagaattcctgctgaactttgataacgttttgaataaatgaaacctgattgctgttgtatctagctttttctaaattcaaatctagcaaattcaaattgcttttcatcaaataattttttggcattcatttcattggtttgcatatatttaagtcacataattacaataatactgacattaaaaaggtttagaactgagtgcagtggctcatacctgtaatcccagcactttgggaggctgaggtgggtggattgcttgaactcggtagttcgagaccagcctgggcaacataagaagatcccatctctatgaaaaattaaaaaaaaaaaaaaagaggtttggagacaaacctttaccatctctaggtaagcttgcaattcatctgttggacagaaatttatggtcttattggtcacggctgttgaatgtgctgtggatattttttatagggaagataaaacacagagattaatctggaaagtcaggtaagtgaacgtcttcgatggggtaatttataaataatagaaattttaatacttctcacaattatagaggctagaaagtccaagataaaggcactagctgattcattgtctggtaaaggctcgttctctgcttcatgaatggtgcctctttctgtgtcctcacatggcagaaggggcaaacacacacccttcaatcaatgtctctctctctctctccctcttttaagagatggggtctcattgtactgcccattctggacttgaactcctgggctcaagctatcctcctgcctcagccttctgtgtagctgggactacaagcctctctttcttataaaagctctaaccccattaatgagggcagagcctccatgacttaattacttcctcgaaggccccacctcttaatactatcacaatggggagtaaatttcaacatgtgcattttgggggtataccacattcagaccacagcagcaaagcttcagctgtagtagatgcttattatatatttgaataaataaatgaatttgagagtttttatttttttgagatggagtcttgctctgttgtccaggctggagtgcactggcgtgatctcgtctcactgcaggctttgcctctcgggctcaagagattctcctgtctcagcctcccgagtagctgggattacaggcacctgccaccatgcccagctattttttgtatttytagtacagatggggtttcatcatattgtccagggtggtctcgaactcctgacctcaagtgatccacctgccatggcctcccaaaatgctgggattacaggcacaagtcaccacacctggcctgaaagttttgattcaagagtgagatgttgttacatttctggtacaggagttataactcagaaatattaacttgacaggtattgctgtttgttcaaatgacctcctctctttaggggaacatttctactctgcattcacttatttggtggtgttatgacctaaggtctgttcctactattgtaacctaatgaaaggagtggaaartagagctggggaaagtagtaggagttggtgatttctggagcagaggggcatctgtgagaggcctagttcctgggtctcactggtagactttcaactcagagaagcatgctagacttgtagattatgtacggttttctgtgtctttgtttagctttgtaaccaattatctactacttacaggctagaatggaaacctaaccatcatctgttactttgtttctattggtaaacagccagtttaacaaaagagcatttcggaatgcaatttgtttaagatgtttaacatcaaggcctggtaagaacaattgactagacttttgccagctctaaactctttttcagcatgatggtctatgtatatgtaaatgaaaacaaaaggatcctgtcttgtttacttgttttggaaggaggtttttttttttttttaacatggcagtttaaggtgtaggtttaccaggtacttcattgccatagtgctcatttaaaaggaaaaaagttatctgggtgggatgggggtggggtggggaaggctttactattaatgccatctatggaatggcattatcaaaatagttgaatctagttaaaaatcgttggctcttatgctgcagaaacacaatctaagtaatttcaatgattttacaatgctgatgaaacattattttgaatatttgccaaattaaactttgtgttaattttagacagaacaaagacagattaattgtgctaatacttcaggtggttacaaactaagacttttagtgaatggaaagttttaaattttactttcatacgcattacaaatttaacattttagaagatttggggctgggtgggagattgatttttttttttgagacggaatctttattgcctagtctggagtgcagtggcccaatctccgctcaccgcaacctccacctcctgggttcaaacatttctggctcagcctccggagtagctgggacgacaggcatgcgccaccacacttggctaatttttgtatttttagcagagatggggttttgccacattggccaggctggtatcgaactcctgacctcaggtgatctgcccacttcagcctcccaaagtgttgggattacaggcgtgagccaccatgcccggcctggagattgacttttatcatattttgatctagaatttctcaacatttcaaagatatgagctcatcagaaggtaataaaattatttagttaacattttagagcttactgcctgttttctgcttatttgccagtgtagatgattcattttacctattaactctggtgtgatctagaatatgaaatgttattccagagtagctattttaaggtaggtgaatcatgcaggtataacacaaggttttcattttaaaatgtaacgggatatctgatattctgcgttaggctgagattcgttatatgtgaaaagtagaaaacagcttttaggaaattatagcttaaggtcaaaaattcaaggcctgtggttaggattaaaggcagaaaaatctcttgatagtgaatttattccttcacattgtgaggtataatggaaggttgaagcatacaagggggttgaggtgacatattctgttagtgggacataaataatagagaatgtattgaatactgagacatcaaaggacactgaaagacagtgaagatttcagcaaagaggacaaagctgggtaaaaggatgcttcagcttttgttacaataattaaatatttaaaagggcagccattttatacagtccaagaagttaagcaattgcccattttatattccagttttattcaagcaagccataggcaagcaagctgatattaggaatttatattaagaattttcttctaggggtgtcataagcaagttcaaaaccgaatcttttaatctcttggggcatgatcataatattcatgatgccccgaagacacttcgtttgttctaaaccatcaaagaaagtrtgttcaacataatttgcattgcacatattattaataatctggactgatggctttttacagtagtcagtattataaaaagatatatagaaaagttatgcactataggtctatgttcacctgagccttaggaagtcgaggctgcagcgagctgtgatcataccactgcgctccagcctgggtggcagatttgagaccctgtctgaaaagagaaaaaaaaaaagaaaaggtggggaagtggaactgctgtgaggtcaggacctggagtgaatgagagcatctcttcatgctatagagcaccctatgacaatctctattgttcttactctataggtttcacaaaaggtctttgtttgacagtttatgttggcctactgtgggtagttcacttgtgggtaggctggagaacaggatctatgcttgtaatggttttcattaaaacacagacccatgtctcaattttttatatacctaggcatacacatatgcacatatatccatgcatcctgtaagattgagtaggagacattttcaattggccatgtaatggcaaagtcgtatcagtgatctaaaagtcaaaatttctctttgattttgtttttggtgtttgtttgtytgtttgtttgttttgagatggaatcttgctctgtagcacaggctggagtgcagtggcgcgatctcagctcactgcgacctccacctcccaggttcaggcgattctcctgccttagcttcccaagtagctgggattacaggtgtgtgccgccactctgggctaatttttgtatttttagtagagacgaggtttcaccatgttggtcaggctggtctcaaactcctgacctcgtgatctgcccacctcggcctcccaaagtgctgggattacaggtgtgagccactgtgcccggccttgttgttgttttttgagatagggtctcactcttttacccaggctgcagcgtactgatgtgtaatcacagctcagtgaagccttgccttcttgggatcaggcgatcctcccatctcagcctcctgtgtagctaggactacaggtgtggaccatcatgcccagataattttttgtagaaacggggttttgccatgttggccaggctggtcttgaactcctgggctcaagctgttttactgcctcagtttcacaaagtcctggaattacaggcctgacctctttgattttgaaatactgttttgtcagtggtcatttataatcatttgttgttaaaatgaatttattttttttttattatttttttgaggcgcagttttgcgcttgttgcccaggctggagtgcaatggcacgatcttggctcaccgcaacctgtgcctcccaggttcaagtgattctcctgcctcagcctcctgagtagctgggattacaggcatgtgccaccacgcccagctaatttttgtatttttagtagagacggggttcctccatgttggtcatgctggtctcgaactcctgacctcaggtgatccacccaccttggcctcccaaagtgttgggattacaggcatgagccaccacgcccagcttgttaatatgaatttaatttgatttcttgagtaytcattgatggtagagacttgaaaagcatgctgggagtcaaagttgcagaatttattgtgaatcatcatattgataaatcaattaaatatgttaaatttagatgccaccatagtggtttatatcattagtgcatggctctcaagttgggaattttattctgtgcatatatatatgtgtgtgtgtgtgtgtgtgtgtrtatatatatatataattttttttttttttttttttttttttttgaggcagagtctcgctgtgtcgccaggctggagtgcagtggcatgatcttggctgaccgtaacctccgcctcccaggttcaagtgattctcttgcctcagcctcccgaatagctcggactacaggcgcataccactatgcccagccaatttttttttttttttttttagtcttagcatttactttctccaccctacattcttggaacagcctttagttctacaggaaatggcactgatggacagaagactagcattaccttcatgaaagggctgttagagctgcctggtaagaaggcgtgccttggggaactgggaagatgccgtcagtgtgggtgggcaggaggacagccagtcgtcctgccgtcagcccagtagcttccagcggcaggtgcccaggtgctaccggagctcctcataggggtaggggcagggactgcacctcctccaggcactcgtcgtaagcctcctggtactcctcgtggggcttgaccattatcacacaggtggggcgcttggagcctgtggctgcacccaggtccgtcttagaggggatatagacatagggcagatttcggtcctcacacctaactgggagatggcagtatacctcaatgggcagtgtgtctcctgccaaaaccatgatccctttttctcctttgttgacaaatttctgaacctctttcaccccgcgccgwatctgcttctgcttcaccgctttcttaatgcatttgtagagcttycgcttgaggcggcgagaagccaggagctgcgcgatggggttctggttgaccagcagctcctggtaggtgcgctccccggaacacacctccgcctgagcctcgggcccttcgggatctgcctttattttggtcatcgcagcggccgctgaaacctagtcccagggaggctgcccagccaaattttatgtttttagtagagatggggtttcaccatgttggccagtatgatcttgatctcttgaccttgtgatccgtgctcctcggcctcccaaagtgctgggattacaggcgtgagccactgcacccagccatcaaaatatatatatatttaaatgattttaattctgatgttctagttcaggtttcataggatttagagagtatctgatatcttcgcttattaaaaaaaaaaaaaaatgagctgggcgcggtggctcaggcctgtaatcccaacactttgggaggccgaggcaggtggatcatgaggtcaggagatggagaccatcctggccaacatggtgaaaccctgtctctgctaaaaatacaaaaattagctgcatgtggtggcacgcacctgtagttccagcctactcgggaggctgaggcaagagaatcgcttgaacctgggaggtggaagttgcagtgagccgagatcgtgccactgcactccagcctggtgacagagtgagacttgttctcaaaaaaaagaaaaaaaaaaaaaaaaaaagccaggcgccatggctcatgcctgtaattccagcactttgggagaccgaggcagacagatcatgaggtcaggagtttgagaccagcctggccaacacagtgaaaccccatctctactaaaaatacagataattagctgggcgtagtggtgggcgcctgtaatcccagctactcaggaggcagaggcaggaaaatcgcttgaacccgggaggtggaggttgcagtgagtcaagatcacaccactgcactgcagcctggtgacagagtgagactccgtctaaaaaaaaaaagccaggtgcagtgactcatgcctgtaatcccagcactttgggaggctgtggtgggcggatcaggagatcaggagttcaagaccagcctggccaacatggtgaaaccccatctctactaaaaatgcgaaaaattagctgggtgtagtggtgggcgcctgtaatcccagctacttaggaggcagaggcaggagaatcgattgaacccaggaggttgaagttgcagtgagctgagattgcactactgcactctagcccgggcaacagagtgagactccgtctcaaaaaaaaaaaaaaaaaaatcttggcttggcactgtggctcacgtctgtgatgccagcactttgggtggccaaggtgggtggatcacttgaggtcaggagtttgagactagcctggccaacatggcaaaaccccgcctccactaaaaatacaaaaattagccagatatggtggcatatgcctgtaattccagctacttgggaggctgaggcatgcgaatcacttgaacccaggaagcagaggctgcagtgagccaagattgcaccactgcactccagctgggtgacagagtgagactctgtctcaaaaaaaagaaataacaaaaaacttttactgatgttaggaatgctgggaaagttgaaaaaaaaattgttaaaataaatttgagccaggcatagtggctcatgcatgtaatcccagcactttgagaggccgaggtgggcggatcacgtgaggtcaggagtttgagaccagcctggccaatatggtgaaacctcatctctagtaaaaatacaaaaaaaattagccagatgtcgtggtgcatgcctgtaatcccagctacttgggggactgaggcaggagaatcgcttgaacctgggaggcggaggttacagtgagttgagatcacgccactgcactccagcctgcgggacagagtgagacttcatcttaaaaaaaaaaaattgagtggtatcttagttcatttgtgttgctgtaacaaaaataccacagtttgggtaattacaaagaacagaaatttatttcctcacagttctggaggctgggaagtccaagatcaaagttgccagtgggtttgatgtctggtgagggctcctctctgcttccaagatagtgccttgttggtgcattctccaaagagcatgctgagtcttcacatgacagagggatggaaagtcaaaaagggtctaagctggttccctctaacccttttataaggcactaatccatgcatgagggtggagccctcatgacttaatcacttcccaaaaggccccccacctcttaatatcaccacaatggagattaagttcaagtcatgaattttgggggacattcagtccatagcaggtgggatgggtgactatttggtggaaaatgaaaatggttgtgtgttacttgagattaatatgtgtgcaatggtaaaaagttgaaagttgagtcatatgtatggttttctgtttggtgattttggggataaatttggctttttagaagtatggcttatatttctgtaattctggagtttaaatgtgaccatgaattgcagtcaaaatggcagggtataattcactttgtgctggggagatttggtggacttcaactaatttgccatattataattagctctagactaggagatttaccctagttgttgggctttaacatagtgttctactgagtcctgagactgttggaaaaagtagtggagatggccatgtttgttttgtgtttcatttaaaatctgctttaaagacccagtcaggagttaagtgtcaaatcataaaaatagtaaggttctacaaagtctaaaaatttaggacatgtttatagcctgttcttaagattccagcttcaatgaaattgatatattatgcctgttgtttctacattaatcttatgttctcctactctaccattccaggaaccgaaataaggtagattgctacaagtatggattttaattttggtaatttaaatcattagacagaacaacttatttataaattacccttttcaaaccgatcatcattgtttctgtttgttaaacttaatgaatctccaacacaacttatttcactttacaattcttattcattgacttttgttaaagccccatgtaaacaccactagggaaatctgttaattatatgaaactgagtttcctaaacttgctgagcaagcactaccttgacagagcctcaggagtatcttagaagaaggagtgtcttaggatgggagaagttagggtacttaataaggttttggggcctggggttactcataatgtggttttagggcagaagtaaacaagatttgggtggggattggtaaaatgtataaactggcctagttgctgaaacttcggaatgcaggaatttaagcagagttaccatgaactctgtctatagcagtgctgtccaaagaaatagactgcaagctacatagatcattttaaattttctagtggcacatttgaaaagtaaaaagaaacacttgaaattttttaaattttatttattttttgtagagatggggtcttgctatgttgcccaggctggtctggaacttctggctttaagtgatcatctcaccttggcctcccaaagtgctgggattataggtgtgagccaccatgcttggctgaaattaattttactaatatattttatttaacctctatatgtgaaatgttatttcaacacatgatcaatacaaaaattattaatgagatgttttacttttttttgtactaagtctttgaaatccggtgggtactttacaaatacagcacatctcagtttattctagcgacatttcaagtgctcaatagccacatgtggttagtggctactatattggacaatgaggatatattgttttaggctgggcaaagtggctcacacctgtaatcccagcactttgggagaccgaggtgagtggatcacctgaggtcaggagtttgagaccagcctggccaacatggtgaaaccccatctctattaaaaacacaaaaattagctgggcagtggtgagtgcctgtaatcccagctacttgggaggctgaggcaggagaattggttgaacctgggaagtggaggttgcagtgagctgaagttgcaccactgtacaactgtcttgttgtacactgtcttgttgtaccactgtcttgttgcctgggcaacaagagtgaaactccatctcaaaaaaaaaaaaaaaaaagaatttattgtcttaaaacatatatgttggagctgggcacggtggctcctgcctataatcctggcactttgggaggccaaggtgagcacatcacttgaggtcaggagttcaaaaccagcctggccaacatagtgaaaccccgtctctactaaaagtacaaaaaataaaaataaaaaattaaccaggagtggtggcgggtgcctgtaatcccagcttcttggaaggctgaggcaggagaattgcttgaaccctggaggtggaggttgcagtgagtcgagatggcaccactgcactccagcctgggcaacaaagtgaaactccgtctcaaaaaaagaaaaagatatatgatcttagaacatatatgtttgagctgggcgcagtggctcatgcccataattctagcactttgggaggctgaggtgggcggatcacttgaggtcaggagttcaaaaccagcctagccaacatagtgaaacccggtctctactaaaaatacacacaaaaaaattaacctggtgtggtggcgggctcctgtaatcccagctacttgggaggctgaggcaggagaattgcttgaacctgagaggcagaggttgcagtgagccaagatcgcgccactgcacgccagcctgggcaacagagcgagactctgtctcaaaaaaaaaaaaaaaaaattatgatatatgtttgaatgagctgttgtttaaaacaatttgagcttagatagtttgtgttccgtgtcatgatttggcacagtttatctgttctgagtcatagtttctgtttctatgtggtttctgtttcatttctcactttcatgcataaatctgtgatcttccattagcatgccattattaatacacatatacagagatataatctataatttacaaagacaatgtaagagttttcttggatacttgataaattatctaccagactaagccttcacttccagtaggtattgtttcatcaaattttctaaacaaaaattgtctaaaagtggctgaatgcttatattgttccaccagtttttattttatgtggtgctttctttatagctgacaaaagcattttacatatattctcacttataagatatttcatggtattttctttgagctttcatgtttatagcttttatttattgatttattttttgagatggagtctcactctgttgcccaggctggagtgcagtgatgtgatctcagctcactgcaacctctgcctgtatttatatatgtaccaggctcaagcgattctcctgcctcagcctcctgagtagtgggattacaggcatgtgccaccacgcctggctaatttttgtatttttatacagactgggtttcatcatcttggccaggctggtctcgaactcctgacctcaagtaatccgcccgccttggcctcccaaagtgctgggattacaggcatgagccaccacgcctggccatatttatagctttaaatgaaattgtttttatttagtatagatgttatcaacacaattataacattattcaaatgaagagtagttgttaaagtcatcatatatccattggaattgaattataccctcagtttttccaagagactacagattgttcaatagtttatgtattaccccttaaagtgtgtatgtgtgcgtgtatgtttatatttttcttcctttcttttggtttccagcaactttcctatcctgcattatttcaaaataattgctattaattttttatacacattcagttccacttagttgaatggaatatatttgccactttcctttttcacagtttcatagtttgctgcctgtaaatcatgcctgattttactttggttcattattactccttcatgaagacagaattgaggtcccttctgcttccataccatagttgatgaccaccttcatttgtatctttatagcatccaggtgaggtaggcattattgttatccacatttctcaaatgaggaaactcatacacagggagattaaataacttattcaattctattgaaatttgagtgcttacagtgtgctgtgatttaaatctttttatttttatctaactgcagagcggcagagcattataattctggctactacaggtcatcccaatgaaagactgattattttgggtatataattatataaatagtgagttctgtctgctttttccttttcatttcttcttggcttctctctcctttttccttcctgaaattgttccttgaaattccacttttttttttttttttttttttgagacagagcctagctctgtcgcccaggctggaatgcagtggcaagatctcagcttggctcactgcagcctccgcctctcgggtacaagtgattctcctgcctcagcctcctgagtagctgggattacaggcgcctgctaccacgcccagctaatttttgtatttttagttgagatggggtttcactgtgttggccaggctggttttgaactcctcatattgtgatctgcctgtctgcctcccaaagtgctgggattacaagcgtgagctgctgaaattccacttttgagtccttgcatttggaatattgtatatacctgatagtctcattgaaggaagataatcatactaccagtcttcttgcttattgtttcggcctctaaaaagtcttttttgtttgtttttttgttttttgacacagagtttctstctcttgttgcccaggctggagtgcaatggcacgatcttggctcactgcaacctctccctcctgggttcaagcgattctcatgcctcagcctcccaagtaggtgggattacaggcatgtgccaccacgcccagctaatttttgtatttttggtagaaatggagtttcaccatgttggccaggctggtctcaaattcctgacctcaggtgatctgcctgcatcggcctcccagaatgctgggattataggcgtgagccattgtgcctggcctaatatgcagtaaattaagacggttcagtcagaatttccaaaatgtctacatcacagaatttttttttaaataacagctttattactgtcaaacgttagtgctaacaaaatttttccaagtatgctcagggctgtttcactctttcttcacttgttcaacatgtttactgggaactttaatatgccaagaattaaagataaaaagattaagtgaggcatagtctctgactacaagaagctagtgatctacttaatagatgatgattatataatgaggtaaatgcaatgacagagccatatgctaggaattatgggaggacaaacaaaggaggagtcaaaaaaagctctcaggctggcagtggctcctgccctgtaatctcagcactttagaaggctgaggctggtgaatcatttggggtcaggagttcgagaccagcctggccaacgtggtgaaaccccgtctctactgaaaatacaaaaaattagccaggcatgatggtgtgcacctgtggtctcagctacttgggaggctgaggcatgagaatggcttgaacctgggaggtgaaggttacagtgagctcagatcccccaactgcactccagcctgggcaacagagtgagactctgccttaaaaaaaaaaaagaaagaaaaaaaaaaagggctttcagaaaagggaggccagacacattgcccaacttccttaaaatttggaaagacccaagaagagattcctcaaaggacacacaggctatagggctgcaaatagctaagatttatttgtaaatagcaagtttcttctacataaatacttatcagattcttgaaaactattaacattaaggatgtagcttggtaaaccctttctccaggacagcatctggttaatttgtgtatgaatatgcagaagttcaaaatggcattctaccacaaaggagtctgactttaaagacttgtaaaatgtgtagccttgaatctttaccctggtattcaacttgggggatttgtagggaaatattaccattatctgttgagctagacaagcaaatattcactttctagcatactcaggctacaaaataatctaatttcttcctattaccatttatttatagaatacttatacagctcataaagcatttttcccacatatttttgctcatcagaacctcaccaaggtgttcttttgagccttgcttaggataccctatcctacttcaacatatcccaggtcctttctcctcttgttaagccaacaacaggactatcaaatatttttggaagtaaataatagcagaacattaatgaccaatattggctatgtgcccagtactgttttaagcacttaacatgtttttttgttgttgtttgttttgagacagagtctcgctctatcgctcaggctggagtgtagtggtgtgatctcggctgacttcaacctctgcctcctgggttcaagcaattctcctgcctcagccttgtgagtagctgggactacaggcatgtgccaccacacccagctaatgtttgtatttttagtagagatggagtttcaccatgttggccagagtggtctggatctcttgacctcgtgacctgccagcctcggcctcccaaagtgctggtattacaggcgtgagccactgtgcctggctgcgtggtgattaaacatagattaacatgttttatctcatttcttcctcgcaaaagcctataaaagtaaatacgattattatcccatttacaaatgagaaaactgaggcacaaagatatcacatacaaagtgtctgagtcaaaattaaagtgcaggcaattcagagccttaaaaccattctgtctttctgtctccaggttgagaattattcctagttagcaattctcatttctcctattgtcttaccattatcttatctttctactcagcctagtatgtggtgtgtgtatgtacatgaaagaaaaatgggctgggtatggtggtgcatgcctgtaattccagcactttgggaggccgatgggggcagattgcttgagcccaggagatttagaccagcctgagcaacatggcaaaaccctgtctctacaaaaaataccaaaattagcagggcatggtggcatatgcctgtggtcccagctactcaggaggctgaggtaggaggatcacttgagcctggaaggtccagactattagccaagatcgtgccactgtactccagcctgggtgacagagtgagaccctgtctcaaaacaaaaaaaaaggaaaaaagaagtgtaccttctcatattgtttcttattcattaagctgaattccacaataacaaaggaaagcaaaaacatgaataattccaaagcacttttttagtctataattttaaataactctcccagacctattaaaggactcaaaaaatctgttttacttcagtttgtttccatattttggggaaacggtttacttaagtgaaaaacttgaataatttgcctagaaaagtaattaaagtatgacctttaagtatagctatctgaaggttattaaatggactcaatatgcaaaaattaattatattccccaagtttcatagaaacatttattgcctacaaaataagatatgaacataaataaatatataaacataaatacaagtttaagaattaaaaaaagaaaatagccaggtgtgttggcatgtgccttaagtcctagtatttgagaggatgtggtaggaggatcgcttgaacccaggagctggaggctacagatgtactccagcctgagtgacaaagtgagaccctgtctcaaaacgaaagggaaaaagagtacatagagattactttttctggacccaactatcaccagaatatattaagactttctgaggccgggtgtggtggctcatgcctgtagtcccagcactttgggaggctgaggagggtggatcaccagaggttgggagttcgagaccagcctgaccaacatgccgaaatcccgtttctgctaaaaatacaaaaaattagccgggcgtggtggcgcgtgcctgtaatcccagctacttgggaggctgaggcaggagaatctcttgaacccgggaggtggaggttatggtgagccgagattgcgccattgcactccagcttggaccagcgaaactctgtctccaaaaaaaaaaaaaaaagtatttactggacttgactttatgacatttaaagtaccctaaagtatcattattagaatggtactggctttattttaaagtaaaattttttaaccttctaaataccaaatattttaataaatgtggatgctttccattttagatgctttattaacatgttcacctcttaaatggggtaacatttaaatggaagattaggttaaagacttaggttcttttctccctggaatgcttacataacacataatttgtgtgtagttggccttcttcaaggatacttgatttgtattaactgaatttaggctgggcgcagtggctcacacctgtaatcctagcactttgggaggctgaggtgggaagatcacttgagtcaggagttcgagaccagcctggccaatgtggtgaaatcctgtctctactaaaaatacaaaaattagctgggcatcatggcgcacacccataatcccagctactcaggaggctgaggcaggagaattgcttgaacctgggaggcagaggttgcagtaagctaagatcacgccactgcactccagcctgggtgacagagtgagactccgtctcaaaaaaaaaaaaaaaaaaaaaaaaggactgaatttaatatttagtttcctcatctgtaaaaaaagatattgtaatatctacttcataggacagttataaaaattaaatgaggtaatccaatgagatactcatcagcacagggtctggcacatattaattatctattatatggtagctatgacttaatcagttctacgaggcttgttatgaaaaacagtatacacatccattttcctctccccagaggcagattggctgcttttgaaaaataaaccagcattactttgtcagggataggtttagcatgaaagcagtttgggcgtaagcctgttcaaattaaaaaatgataaagctttaaaagtggttaagacagctgcacctgtaatcccagcactttgggaggccaaggtgggtggatcctgaggtcaggagttcaagaccagcttggccaagatggtgaaaccccatctctactaaaaatacaaaaattcgctggacatcgtggcaggtacctgtaatcccagctactcgggaggctgaggcaaagaattgcttgaacctgggaggcacaggttgcagtgagccattatagtaccactttactccagcctgggtgacagatcaagactctgtctcaaaaaaaaaaaaaaaaaaaaaagtggttaagatagttttggcttttgaatacaatattctattatgtttattttggttatttaatccaattttattatttgtctcattttaatttaagtctctttttatctggaattagagttgtacaataaacttgagattcaaggggttttttgtttttgttttaccattttccttccactagaagagaggggtttggaaactaagataatgagcttctatttctctggtcccagaccatgaacttggagtgaatttctttggtacttaccaggttccctgttttaaaatatacgaacatgtacattggtgacctttccagtgatggccagggagtgacaatgaagagctatagtctgtagctcttaatctgtgtgtacactgggcagggcatcatctgttggtttctgaaaggaggaggagccctagaaagctgctagcccaaattgacacagctgttgttttattgcttttattgctataggatgatttgcataaaagctgctgcttagttcctaaattcaaggatcaaggggataacagggggccacagcagaagcgttcacgtcgcagcccctgtcagattctggtgaatctgcgaattctgctgtatatctccttacccaaccacccaagtcaaacagcaattgaaatgaacagcttataggtatcttttacggcccagtgatgcttctagggagatgctgtagcatgtcattcttaaaatgtgccctggtcataaatggggtcagctgggcctctgaagaacacagtatatcactgtaagacaggaatccatgggattaaaaaaacaactcatcagaagcagtgggagacaggagaagatgctgtttgtgggtaatatggttaataattgcttataggttcctggagaaatattaaagacatctttagaaatgtaaaaggtgcatgttgtgatgatagatggcattagttatttgactggcagtagggttaccttgggagttttactactgtctcgtttaggtttaattcctgggttccttcattggctcctgaatggagcagctgaagtcaagccgcagtcagtggagcagctgaagtcaagactttgccttccttcagctcaaaaaatcgaggacgtggtggctcatgtctgcaatcccagcactttgggaggccaagcactttgggtgaatcacctgagttcaggagttcaagaccagcctggccaacatggtgaaacctcgtctgtactaaaaatacaaaaattagccaggcatggtggcaggctcctgtaatcccagctacacctctaaaaaaaaaatatatatatatatatatatacacacacatatatatacacatatacacacatatatatacacatatacatatatacgtatatatatacatatacatatatacgtatatatatacatatacatatatatacgtatatatatacacatacatatatacatatatacatatatatacatatatatatatatatatcatctcttatgtcttgtacctaaagttagatgatttaccggaagtgtcatagttctgttaaagtcttagaaatgccttttaaaaataacagcttaaaggctgggcgcggtggctcacgcctgtaatgtcagccctttgggaggccgaagtgggtagatcatgaggtccggagatcaagaccattctggctaacacggtgaaaccctgtctctactaaaaatacaaaaaattagccgggctttgtggcacgtgcctgtaatcccagctactggggaggctgaggcaggagaattgcttgaacctgggaggcagaggttgcagtgagccaagatggcgccactgcactccagcctgggcgacagagctagactccatctcaaaaaaaaaaaagcttaaaaataaaaaatttaaacaagataagaaaaaataaaaataatagatttattgagatataattcacatatcatgaagttcactcttaaaatatacaatgtagcrgtttttagtataatgactaaattgtgtgtcagtcattatgatctaattctagaacatttttatcaccccaaaaagaaaaaaaatcaaactcactagcagtcaatctgcattttgccctgatttcccagccttaggcaatgaccaatctacttcctatttctatagataatatgtctgttctggaccttacatataaatgaaatatcatatgtaattttttgtgattgtcttctttctcttagtgttttaaggttcatccatgttgtagcatgtatcaatacttcatttaacttttaaaatttttatatttttaattttataatttataatttttgtgggtgcatactagatatatttatttatagtacttcatttatttttactgctgaatgttattgcattatatgcatgtgccaaaatttgtttatccatttaccagttgataggcatttgggtagtttccagtttggggaaattataaataacattgttttataaagttgttataaacatcagtgtatatggatccataggtttttgtgtggacatatgtttttatttatcttgggtaaatacttgggagtggaactgctggttgtgtgcttaagtatatgtttaactttataagaaacagccaaactgtttttccaaagtggctgtgccattttgcattcctactaggaatttatgagaattctggttgttctgcatcctagtcagcatttggagttgtcagggtgtgtgtttgttttttttatccattctagtaaatgagtagttctttcttagtttaaagtaaaagtcttgcaagatgaattcatcaaaagaacaatttaaatgtgaggtaagcatttactgaatgtctgttgtatgccaggccctctgctcgataatgggaatgcagagaaataagacacatttctgctcccatgagacttacagtttattgagagtgacaggcatgtaaagaagtaattacaatatacttagttctaattacctagaatcagtctgggatggggaaggagagttgatacctggaagaagaaaataatattaggagctacatgtacttctgcataaagttctaagataggttttgatagcaaaggttaagctccccctttattgttatacctaataaatcaatgcccagtaaacttcttgagataatattctgctggctaacaacccaatgatttggggtgacatcaactaatcactttcaaaagtcacatatgcacactaaccagggaaaggggcaactttaatttttgttggtttttgtttgtttgtttgtttgtttgtttctgagacagtgtcttgttctgttgcccagactggagtgcggtggcaccaccttgactcactgtagcgtctgcctcccgggttccagtgattctcctgcctcagcctcccaggtagctgggcttacaggcacatgccactatgcccggctaatttttatattgttagtagagacggggtttcaccatgttggccaggctggtctcgaactgctgacctcaggtgatccgcccgcctcggcctcccaaagtgctaggattacaggtgtgagccaccgtgcccggcctaatttttgtacttttttgatgccttctcttctgaccgtcatagtcattgctttccctttctgtatccttcctgggttggcctcatttctgccttttccctagcacactgctaagctgtataatcactcctttttattttcaatattttcttttagtcagacaccattgactggaaaaatcactcctttttaaattgcatatgtacttaactatgaactgtttaccacagtcagcaatggcagcaggtggcatttgtactttttatacagttgaccactgtagcatttaccctgctgaatccagcctcaaaatgtagggtcatgtcaggtaattccgagagccatgtttctctgtgtatgatatactaagcctcttatctgacctgcctggctaaaaccagaagagctgtgaagaaacattaggaatagggagaacatgaaaagacttggcaaaaatgtgcttcaagttgagtcatgtttatctaatttttgagcatccttcagagcaggtgatactatccttggttttttttttaacttctccagaaccttagcttggtttcctgttacacagcaagtaaaaacacaatctgataaaaagctttaagtaagtggaattagtcatcctcaggaagaaaaagatgaggaatctataatttctctgtatgccctaatcttttttttttttttttttttttttgagacggagtttcactcttgtcacccaggctggagtgcagtggtgtgatctcggctcacctcaacctctgcctcccgggtttaagcaattctcctgcctcagcctcccaagtagctgggattacaggcatgcgccaccacgcccggctaattttgtatttcttagtagagacagggtttctccatgttggtcaggctggtctcgaactcccgacctcaggtgatccgcccacctcggcctcccaaagtgctgggattacaggcgtgagccaccgtgcccggcctgtatgccctaatcttatactgggctattttgagggttcttgagaatttattgcatggaagactgtttaacaacaattttaaagaatattaaaattcacagtagatgctgataattttcccccaaggacagaaaagggagaaaagtttcaacttcattaggactttaggttagatataaggagcatttgcttgccattgagtgactgaaggagaatatagaattaggttttccagagggctacaaatataatagtctcatttgggatgggtaaaatataccattgaatgaagacagtgagtggaggcaggattggagatgttggcattttaaaataattctctctctctctctctctctctctctctgtgtgtttggagaaaaataggttcgtatattatgtaatgaatatctatttaaaaacagataaggcattttcattgctcttaaactgtttatagtgcagaagggacctgacatatttcccaataacatatactgagtagaaaataagagcagtaggatggaaatttagaagcagctagttttgtgagtttgkcctttttttttttttttttttttttgagatggagtctctgtcacccaggctggagtacggtggcgtgatctcggttcactgcaaccgccgcctcccaggttcaagcgattctcctgcttcagcctcccgagtagttgggactacaggcgcgtgccaccacacccagctaattttttagtatagacggggtttcaccgtgttagccaggatggtctcgaactcctgacctcttgatctacttgatccagcctgccaaagtgctgggattataggcatgagccaccgcgccyggcctttttttttttttttttttgagacagagtttcacttttgttgcccaggctggagtgcaatggcatgatctcggctcaccgcaacctccacctcctgggttcaagagattctcctgcctcagcctcctgagtagctgggattacaggcatgcgccaccatgcctgactaattttggattttttgtagagatgaggtttctccatgttggtcaggctggtctcgaactcccgacctcargtgatccgcctgcctcagcctcccaaagtgctgggattacaggcgtgagccactgcgccctgccagttaatcgtttcttatgtgttagatgcatttaacttcggaatgttttatccatgtatatgttgcagtcatgtgataaatagaaaactcttccttaggaattcctctaaaaagtttttctgttttcaatgaccacatttatcttttcctagctctttcagacatctaccatccttttgatttttggtcctgtctgtgtccctttcttcccaactaagcctccattgttcatggatcacactgcagctagttagtgtagaagcattagaacattactggtatggacttgagagtcacagacctagttttatgtccttatttctgatcagctctgtgactgagcagttacataaacctttgtgagcctcagttttcctcagtgaaatggagataatacctactctgcagcgttgtagtgaggagggagatagaactttaaaccatttagtccagtgcctagcacatggttaattttatcatttggttccagagctacttttatccccagatgctgttggccctttcagccttccactttgtatgtctagcagaggaaatgtctaggtataagctagaaagagtagcaaggggttctggattcctcttccaagaaaagggcaggtgaatgggttagggctgttagaggcggacctgggattgtatagaggtagatcaaactacttcttgaggttaattagttgtcagttgagcaaaggtcattgaccaagggcaagtgagggtcaagttgcttgtgttgcagggtggggtcaaagaaacctgtctctggattgtgacagattaagttaaagggagtgtttgtaaaaaggatgtaaggctagagagaataggaggaagtcaaggaagcagtacaatgagaatccttaagagcacggtctggatttgactgggtttgagccctggctctgccactcaccatccccataaccttgagccagttatttattctctccaagacttaatttttattttatttttattttatttgagatggagtctcactgtgtcacccagggtggagtgcaatggcgtgatctcggctcactgcagcctccgcctcctgggttcaagcgattctcctgcttcagcctcccaagtagctggggctacaggcatgtgccaccacaccggctaatttttgtagttttagtagagatggtgtttcactatgttggccaggctggtctcgaactcccgacgttgcaatctgcccacctcggcctcccaaagtgctgggattacaggagtgagccactgcgcccagcgacttgtttaatttataaaatgggacaaaagctacctacttaatagggctgtgagataatgcatatagcatacttagaacagtgacaggcacatgttaaatacttgaaaaatttattactattaaatccagctgagggaagaaagagaggactaatgcagtggaggtgagctgttctgtgtacagctaactgacaacatcttcactggttatcttcaaagaaaaagagtcaataatgggctgcattatttatagatgttctaatacttcttggtgtgtttgcttgtaaaaacaaataatgatgctttcctgtttctctgtattgggaaacaaaacttataaaaaaaggtctaacaggttagttgccacttgcaacttttgtcattgaatgataaattgtggcctggttttctgtatacataatttctgttgatgaattccactgtagatttttctgtttttttctatcctttttgttctgtttttgcagacttcctggttaatcacttatttcagcaacgtttactacttctaaaacaaaaaggatgaatggtatgcatcaaatataagttgatgaggcatggatggaattaattttaatgagaactctcagaggcctgaagtttgtttaattaagcctgtacaaattctatcatgccattcacatgtcatatgttttcatctcttgagcattaagtgaaccctgttaggttagtatctgtgaactgctaggtttaaaaatttatttttcagtactcttgagatagcatcacagaaatctttttgtgttctccctaatattatggtagccaccatggtacagatgcctatatgttctgtatttagtactgaagaaaccatgaagagagaattatcccctaccctttttttttttttgagatggggtctcactctgttgcccaggctgtagtgcagtggtgtgatctaggctcactgcaacctccacctcccaggttcaagtgattctcctgcctcagcctctgaagtagctgggattacaggcacctgccacaatgcctggctaattttttttttttttttgagacggagtcttgctctgtcgcccaggctgagtgcagtgccatgagctcggctcactgcaacctccgcctccccagttcaagcgattctcctgcctcagcctcccgagtagttgggactacaggcgcgtgtcaccatgcctggctgattttttgtatttttagtagagacggggtttcactatgttagccaggatggtctcgatctcctgacctcgtgatccacccgccttgacctcctgaagtgttgggattacaggcgtgagccactgcacctggaaaattatcccattttatagatgaagataaccaaggcttagaagcatgttcaaagtgacatgccagtaagtgggagagccaaaatttgaaaattggattttgattttaaaatctgtgcttttaaaaactaggccaccaactgtttctctaatactcagtaaatcagaagactgcaaaactgaccctctgcaaggtagccaggcttgtttattgcctgctgctcacactagtccctgccctcactttactgtctaattttactgaacagaatcatgggtgtaaaggcttaacttgaatcatccaatttagtggctctagccagttacagaatttattttgttttaaattatgattaagtaggtttgagctggaacccaggaatctatgttttaatcggctctacatgtgatttttgacagtctgacaggtttgggaaccatttcaatttagttacatgaatccctcctcccaaaatcctgttttattttcctgacaggtagtcatctaatgtcagatatccatttgtgataggaactgactgttacattaaaacattgtaatgtgcagttagttacagtgctgtttttctatagaagtaaccatggatttaaataatttctttggccagatttttatactccttaggttttggcattgagggctcttgaatcttctctgaaccttgccttcttcatgtgtaaaatgggtatattgttatctaccttgagggattatcaataattaaatgaaaaaataaactgtcctgtctggaaagattcttgaatgccttcaaatagcgttttcttatagttcccttaccatgtcagtctattctgaaacactctcatgtcttcagagttctagttagaagtgtggatgtgatagagggctcctagataattcattttgggattgttagtgccagaaataggttatcattttgcctcctcatcagcatacttctttacctctggctttttctttggacaaagtatatgatagacacctcttatgggtacagataagcctgcatttctggaaattcagctttactccttagagtttccactaataacttgaaccaaaacaaaacaaatgatctgcaggaagactttaaaagaaaaaaccttcttagattgtatagagaccaaagtagacaaccaaagaaaatattccatgtctctttcctatccaaggggagagataggtaatgggtgagtgttgtccatagaagaggataaatgatcaagtgcaaggctggaaaagactgctcaagaccctgaaaataatctctcatcactgtagtttgacttggtttggttgttgagttgtatgcttatcttgcttttcttaaccaaagcaaacttgatctgttctttagtattaacttagttttttttttgtacgtgtgtgtgtgtgtgtgtgtgtgtgtgtgtgtgtgtkttttgagacagtctcgctctgtcgcccaggctggagtgcagtggcgcgatctcggctcactgcaagctccacctcccaggttcacgccattctcctgccttagcctccctagtagttgggactacaggtgcccaccaccatgcctggctaattttttgtatattttttagtagagacggagtttcaccatgttagccaggatggtctcgatctcctgacctcgtgatccgcccgcctcagcctcccaaagtgctgggattacaggcgtgagccaccgtgcctggctctttagtattaacttagaacatgagctgtgtttcccttgaggctcagagtactaagaagagtttgtaggtgatagtttcctgaaggcttgagtgaaatgtggtgaaataatacttttttctttacttagtttgtgttagagttctagtttcaaaatgtttttgaatctaacatcttgaaaatactcctttgggttaaggtttcttcgtgtcagtgcttttcaaaaggtaattttcgtactttggacacattaaaaattttttttcctttttgccattatcttcatgaatacaacttagaacacatttttatttttaaattttgagatggagtcttgctatgtcgccaggctggagtgcagtggcgtgatctcagctcacggcaacctctgcctcccgggtccaagcaattcgctgcctcagcttcctgagtagctgggattacaggcacgcaccagcatgcccagctaatttttgtattttcggtagagacagggtttcaccttgttggctaggatgatctcagtctcctgacctcatgatctgcctacctcggcctcccaaagtactgggattacaggtgtgagccactgcgcctggccacatttttatttttaaaaagtgtatccaatatatgtaacttactggtcagaaatgttaaaggtaggccgggcgcggtgtctcacgcctgtaatccctgtactttgggaggccgaggccggtggatcacgaggtcaggagatcaagatcatcctgtctaacacggtgaaaccccatttctactaaaaatacaaaaaattagctgggcatggtggcgggtgcctgtagtcctagctactcggaaggctgaggcaggagaatggcgtgaacccaggaggcggagcttgcagtgagccaagattgcgccactgcactccagcctgggcaacagagccagactctgtcttaaaaaaaagaaaaaaaaaaaagaaatgttaaagatatccaatacattttcattgaaattatagtcaccctttggtttttcaggaaaatgattccgtttgagttcttaactgtggtctttatcgyttgcactcaggaattccagaccagcctgggcaacatagtgagaccccatctcttaaaaaaaaattttttttaattagctgggcatggtggcaagtgtcctagctactagggaggctgaggtgggaggattgcttgagctcaggaggtcgggactgaagtgagccatgattgcaccactgtacttcaacctcggcaacaaagcaagaccttgtctcaaaaaaaaaaattgtggtctttctctggggtggggtggggggaacatctctgttcgtttgacaataaggttattgggtggagggtagagagcaaaaccaattaacttgactcgtccttttaaatttactattttagttcctttgcgagaaagtcactctgcaattacattgcattatagagtattagggaaaatgatgcaatttaattaattatggagacttgtattaaacttaatgttaccaagtcattgttcttttttttttgagatggagtcttgctctgtcatccaggctggaatgcagtggtgtgacctcagctcactgcaacctctgccttccaggttcaagtgattctcctgcctcagcctcccaagtagctgggattacaggtgcacaccaccatacctggctaatttttgtatttttagtagaggcgaggttccaccctgttggccaggctggtctcaaactcctgacttcaagtgatctgcccaccttggcctctcaaagtgctgggattacaggtgtgacaagtcattattcttaatgaaaagagcaggatcagcgcggtagctcacgtctgtaatcccagcactttggtaggccaaggcaagaggattgcttgagcctagacattcgagaccagcctgggaaacatagcgagaccccatctctacaaagtaaataaataaataaacaaataaaaagaaggactgtatgctgttggggctctctgtaactttcattcatgtcatcaatccacagcaggaagcaaatgatatggtgttaattttatgaagtaattttatgtattgtcttgtttttgtttttattcttaggaccggagtaggccctatgatacttttaacttgcactcgttggagaactccttaatggatatgataaggactgatcatgaacctctgaaaggtaaacactaccctcccagtggcccaccaatgagtttcgctgatataatgtggaggaatcattttgcaggttaggaatattcatatgtccatttcttgcttggtgttttaagcaaaaatcagctttttaataattttgatttttctggtttgttttttgtttgcttgtttttgttttgcttctgtaaagcattgtggaatgtatttaaagttgattttttttaacctgggttcagctacctataataatcaaggtggattgttatcagtcatgtctggcaggagcatgaattgggtagctgaggttagtcacattatgagttaatagcgtgagaccagcagccaggttttctgggctttgtgcatttggaatcctcagctgaaccgggataattcatttaagtccatgtatatatactgcaaggagctgtgagagttagtaaagcagtcttcaaaaattgcttcagaaaactgcatataaaggacttctattttattacagcataatccccttcctagtataggaagtatcaccacacaggcttaggggcagctagtgaccctttgcagtctctgaggccaaatcacaagaaaaatatcttaaagtacataaatgttttgggttaaatataaggcagaaagtctcaaagttagcaatattaggacttcctgtttttacagcctgtgtaaattcaggatagatgttggtrtttaattcataattacagatagttctttttatgggttataggactttttagataccttaagatatttaaaaatactgtaatgcaaattacctatggaaatatccattatacttgggttaagatctaaatttccgaaaactgtgaagaggtagccatggggatgcccatcttgtatgaaccattatgtctttcaaaattgtgagaaattcaatcccctccggttctctctaggcccatattatagtgtgaatgactgtgaacacctgatgctcatttcctcaagccacaccagaaatctctttcatcattttcttgtcacactcatgattttcttctgctttcctcattttccagtgaaaagaaagtagtcaataggttataaagaaaagaaggggtttttggggaaagtgagtttattttttttttattttttattttttttattttttatttttttgagacagtggagtgcagtggcacaatcttggctcactgaaacttcctcctcctaggttcaaatgattattctgcctcagccttccaagtagctgggattacaggtgcccgccacctcgccctgctggtttttgtatttttaatagagatgggatttcatcatgttggccaggctgttctcagactcctgacctctagtgatctgcccacctcggcctcccaaagtgctgggagtgccaccgcacccggctgatacttgcattttaaggaaaatattaaaaaaaagtttttgactttaaaaagtggagaaaattagaagaacaaaaaggtaactaaaaaataaagattgtgatggtgtattattcgtctaattctcatatgataagcattatccatgcttctatcagatctttgtaatttattgctaggccttgactttagactcttaggttgtttccagtttttcctccattattaggtaatgctgccatggatgagttcttgcacatagcttttccttaaggtaaattaacagtgagagtctttgggtcaaaagagataaacatttaggtggattgagctttaagagaaggatggtaggctagaggacctgccatgtggcttctgtatgagtctgttcggaagcacttccctctactatctggtttttcctcctcctttttttttttttttttttttttttttttttttttttgagatggagtttcgctcttgttgcccaggctggagtgcaatggcgtgatcttggcttaccacaacgtgtgcctcatgggttcaagcgattctcctgcctcagcttcctgagtagctgggtttacaggcatgtgccactacacccagctaattttrtatttttagtagagacagaatttctccatgttggtcacgctggtctcaaactcctgaccttaggtgatccacctgcctcggcctcccaaagtgctgagattacaggtgtgagccactgcgcccagcctcctcctactttcaatatcctttactcccacttgaacatggggaacactattttgagggtctcaaaactcaagtacagggtaactggatttttgttggtttttttgagacaaagtcttgctcttgtcgcccaggctggagtgcaatggcgtgatgttggctcactgcaacctctgcctcccagattcaagtgattctcctgcctcagcctcctgagcagctgggattacaggcacctgccaccactaccagctaatttttgtatttttagtagagacggggtgtcaccatgttggccaggctggtctcgaacttctgacctcaggtgattgcccgccttggcctcctaaagtgctgggattacaggcctgtgccaccctgcctggccccagagtaactggtttttgtatgtttgtttgttttggtgtttttttttcctagagcttaatttcctttgtttttcagaaaaaaatacatttttactcattataagaaatccaaatagtatgtaaaaggacgaaaaggaaagtaaaaaagaaaaaaaaaaatcactggaggcagggcgtggtgattgcttgaaccagggagttggaggttgcagtgaccgagattgcgccactgtactgcagcctggcgacagagcgagagactctgtctcaaaaaaaaaaaaaaaaaaaaaaaaaaatcactagagactctctacctagaggtaacaaaggttattatttttattaacatccttccagatattttatattctccatataggagatgaaatttcaactcagtctttctgactttgcagtcagtgaaacctgggtgtgaattctgtctctgcctctggctgcctattaatctggataaattaacctcttcaaagcctcagtgttcttattgttaaaataaattccctacttcatagagtgagtgcgaagatcaaataaagtccctggcactagaaactgctcaaatgttatccacaattttttgctggaagtagtatggtatccttacagtactgacttctttccaactagacttcagctaaatgttgaaatttttcaggtgcaagttgtcaaaattttatatttttcataagtagtgattattgaaggataaacgtcttaccattttcaaagccacttaaaggagaaaggaaaataattttttggttattttggttttccaattgtaaatctgaatgatgtaaaaaatatataataaaataggatatctagtactttaagatgtacttgaagaacatggtaaaaatatgttcacaataatattttatcttagaaatgtattcagtaaaaaatctctttattcaactatcctcttgattcaggggaaaaaaggattagcatgggagataacagaataggaagtttaggagataatgagacttctgttttagtaaagtaaataagctttaatagttttttggtcatgtattcagtttaccagccttgaagatatttgtaggaaattttaaaagtttctctatttcatcccccatgataaaaattatatagaataaaagctgaattgaactttcttcacagcacactgaaaaatatcttctatagcattaatcagatcacagaatgcatatttaaacaaaaatttgactaatttattttttatttatttattttttttctgagacggagtctggctctgtcgcccaggctggagtgcagtggcgggatctcagctcattgcaacctccgcctccctggttcaagcaattctcctgcctcagcctcctgagtagctaggattacaggcatgtaccatcacacccggctaatttttgtatttttaaatagagacgggtttcaccatgttgtccaggctggtctcgaactcctgaccttgtcatctgccaggcttagcctcccaaagtgctgggattacaggcatgagccactgcgcccagccggactaatttatttatttattttttgctttttaaagatcccaaactacgtgcttggctgtaacggaataaggtaataatctcctgggktttttttttttttttttttttttttttttttactatgtcttacatatacttttcttttcgtttgagagaatgcctcagagatgagaaaggaggcttttgaagagggtaatactctaatgacagctgtttcttattttatttatttatttattttttgagacaggttcttgctctttcacccaggctggagtgcagtggcacaatcttggctcactgcagccttgacctcccaggctcaagcagtcttcctgcctcagctccctaagtagctggtactagaggcacaggcaccatgcctggctgattttttctatttgctgtagagacaaggtttcaccatgttgcccaggctggtcttgaactcctgagctcaagcaatccttccacctcagtctcccaaagtgctaagattataggcatgagccactggccctggccctgtttcttatttctttttcgaagtacagaaatccttgggttggcagatgtagtaggagggagcaactgttctctgttctcatttctagtggattgaaggaaaatgcaactctcttcataactatgaggattaaggggattaatcgtgttgagagaggtggggtaagagataacgaaaaagattcatccctattgtcttctttatagctgttccttgactttctacctatgatgcaggttcactaagctcctatggaaccactctgaaaactcatggtcgtcaggtcaggtttgattaatcatattctcccaactctagaaggatagtaaggaaataccaactatagcacattgagcagagaagtaagatygtataccctaactggggaagcccagtatagcaggcatcttggcaaaaacagggaggagttactttttcttcatcccatgcaatttccctcttacagcagaaaaatagtcctggctgactatctggggttcgtgcctagtaaaacatttttatgtatttgaattttctcttccctcaccattcatggaactgagatttgaaaagtgaaaagaacaggtgtcagttgagaactgttattgaaagctttgcttttcgaaagtatgctgagagtgtctagagaaaaatagcttatctttcagtaatagtgctttaaaacagataatgccacccctttggtgttaaaatggaagagataatgccacccctttggtgttatagaggcatttttctttattcatcacaatttaaatttagtattgtagagcctttcacaaaatttgtcccctcttacggaattttgaggtcttcttattttagaaaaatatgccttcattacattttatttgcttgtttgttccagaaaaatatactgtctctttatttacttctgtggcttgaattattgctcagttctatttttgtgttatttcccttgatagcccatatctgtttatcttgtttgaaagttagcagattacacaaactgttagggggcaggttctaagtcagcaagaagtgatggttcttgttttgtacattcttgggggcagagacagtaagtagaaactgagtgatttgtataagtaccctcccattaatttgcgtaatcatcctttaagcatagcatttaaattacctgagtttttagcggccaggcatggtggctcacgcctataatcccagcactttgggaggctgaggcgggcagatcgcttgaggtcaggacttcaagaccagcctggcctacatggtgaaaccctgcctctactaaaaatacgaaaattagccaggtgtggtggcaggcgcctgtagtcccagctactcaggaggctgaggcaggagaatcgcttgaacccacgaggtggagcttgctttgagccaagattgtgccactgcactccagcctgggtgacagagcgagactccatctaaaaaaaaaaaaaaaaatcacctgagttttaaaagataaagatgatgatgattattattattttgagacagggtctcgctgtgtaacccaggctggaatgcagtggtgcgatctcagctcactgcagtcgtcacctcccgggctcaagctctcctcccacctcagcctcgtgagtagctggaactgtaggtgcatgccaccatacccacctaatttttttttttttttgtattttttttttttttgtggagacagggtttcgccatgttgctcaggctggtctctaactcctgagctcaagcgatctgcccacctctgcctcccaaagtgcctggattacaggtgtgaaccagtgcacaccaggctgggaattgtgatttaattgttctcgagtacagtctttattaaatgaggaaacagaggcacaaaatatttaacaacttgccaaaaattacccgctattagtatgtgaataaactaggatttgacctcaggtctaagctcacaggttttgattattggttatttggaacatatttagaatattttagtatcaaagttttatcatttccttaaaacagatttaaaaaacagtttactatatttttacatatcacagtattacatttttaagatacttttctaaagcaatgtctctctaactttatagagaaagttagtgggaaataaaacccagtagaatatgcattttacctggtaagtctttctgaaacgtggcactaacattctgttacatgaagctttctgatgtacttgcctttttcgagcaaagggagtgattagaggaaggtacagcagttgttccctatctcataacatattgtagaagtaaagagatgactttcgtaatcaattatgaattaatgaaaatttcagtttttattttgaactcataaaagcatgagtttagttggattctgaaactttgaatcatgatagacatagttttttttttataactagtgttttaaatatgaatgtgaattgagcttatgggactgtgattttaacagaacgaataaccatatgtaaccctattctctaacctctcccttcatcccctctcacccctatttatcagatcctgtgcagtggggaaagtgggacacagtctcagatttccacagcatcatttaacttagtaaaaccaagtatgccttccagtttttgaaatcttacattttacactatacttaaaagatagctagctgacaagaacaatttaaaaatagcagaccatggacaggtgacgaaatgtcacgctggcaacaccagactacattatacaaaaatcatcagatgtcacgcacttgattctattttcacagctgattaaacagcagtatttgttggacaaaaggaagaaaaaagaaatggcctcttctgaatttggaatcagtttttcttttgctgttatatattttattttcctccaaaattccttaataactgtaaaacttaagatatacaatgtattaagttaaaaaattatgaaataatttcaattttagaaaagaaacctttacacatatacactccctaacgtggaaractgtaaatcaaaatgttaacagtgcttatccttggtgagcttgttttctccatttttttgcattatgtgatttttctccaatgaaaatatattgcattttataatctaaaaattacttttggaagaggtaaagaaaccagcttaaagatgctgtgaatgattttactttaaaaaattacattattagttgggggaaaaattagattatatttagataattgattctgatggatgtggccttctcgacccagagtgtcttttcttttcttttctttttgagacagagtcttgctctatctccaggctggggtgctgtgacacgatctcggctcactgcaacctccacctcccaggtttaagcgattctcctgccttagcctcccgagtagcggggactacaggtgcatgccaccacacccagctaatttttttgtatttttagtagagatggggtttcaccacgttggccaggatggtctttatctcttgacctcttgatccgactgcctcggcctcccaaagtgttgggattacaggcgtgagccacggtgcccagcctggagtttcttataaaatcttttgttgctcactttcatccagagacctgctgaagtcaaagaggtcaaagaattagagagaataccaagaaaggtaaaaagtgttctgcttttcaccaattagtgatactttcaatctgcaaaacactgcctaaggctcttgttttactgcatcataaggaagtttaggttggaagtaatcagcgtacgatagagaataataatttgaaaactaccaagcttcctttcagtttcatctttccaagctgaaaagttctaggagcttatggaaagggtcaaaaaggatccatgtaggtatgtttaacttctggaggacaaaaagggtacccctttacatttgggaaactaagtagttataggaacatgtaaaaactttatttgatatagtggttgtaaactacataattctttaccgtaaatggtagacacaggaaagaaaagaagtcaaataaggatcagctaaatttgggtttgcatgatttccttgataaccctttattattattctagaaatatttagggaatattgctaactttttagatagcacaccctcctctaaatattccttggttaaagtttgaaaagatcctccatatatgcgatttccttaagttctgatgggcagtgattttgaagtcttgatgggcttttaggtagactttccagtgactggctaatcattgttatatttgaataccccagaaaaggatgaaagctggtttagagtaaatcacatatagttttcatagatattaatattttttgataatgaatccaaataaggtcttgattatccaaaaacgatggtgagaacattgagatagctagttgaaatgagaatatactttctccctactgagtgaaagccttgttctggtgacagtttttcctattataggttctgatcaaggtggtggtaggagataacacttgttgccaactataattttcagggactctaaaatgacttaggaactgaaaaaacgtaaggcacgtagaacaattatatatagatacagtacatgtatcttttaacaatggggtagtttttgaaattcctaataattagcttctagtaaatatgaaaacgtttatgaaatctataaaaaatagatggttcttttagattttactcatatggctttttaatagaaaacatgatctaatctaagaaaataattttactatattacaaatgctagcaaaattgtctctgcaaaaccagagagagatgaaacatttttttcctaataaggtttgaaacgataaaaactaaaaattttcattgaaagctctataatgcttcatgataaagttagaacagttttatcagaatccatcaaattctagtggattttcttatttatggatgtatttaagattttctcattcaatacatacatacacaccaatataagtgatgcttcacttgcgagggttttgtttttccctgcctctttttttttttttttttttgagacggagtcttgctctgtcgccctggctggagtacagtggcgcaatctcggctcactgcaacctccacattccgagttcaagtgattctcctgcctcagcctcccaagtagctgggattatgggcatccaccaccacacccagctaatttttgtatttttagtagagatggggtttcaccatgttggccaggctggtctctaactcatgacctcagatgatctgccctcctcggcttcccaaagtgctgggattataggcatgaaccactgcgcccggccttccctacctcttaatatgaaatgaccttttacaaattatcgtagcctggggagcaataagaaatcaggatggtcctgtctaggcaaaaacttcatttgcttaggaattcatgattctccctttttatttaaggcaaatgccctgctttgtctactgtgatgctttccttttgggcaaaaagaacttaataatgctatttgcctccagtcccctgtaacggagtttaccatcaaatgatcactgactcttttgcaattatgtaatataaaactgtgtatgttgtaaaaatcaatcattttaaccttatctccagctttttctgtatactttctcyscaaaatactgttgacatttatttaaacaatggtagtgaaataagattaacattttttgagaatttcatgataacccttgacataattgaacattaaaaccttgcagagccaagtttatagatattagctttacacaaaagcattgtttcaataactattttgttgaaggaatttggtcaagaaagctttctaagtacattttttttttttcatataagactctctcaaattttccttttggtacatctacctccttgtcccaaataattaatgaagaaaacataacaaaaatgtctgcatcttccattcttgcccctaggggccattagttgaagcatctgtttctgacttaacatcttatagaccaggggttggcaaactttgtgaagtgctaaagagtaaatattttaggctttacgggccacatggtctctgtcacatattgttctttgttttatttttggtttggttgtgtttacaagcctttctaaatgtaaaaatgatgcttaactcagaggcatacaaaaacaggaagccagctgtgtcagcagacgtttgcaactcctgttatagacttaaggatgaacatgtggagattagcattatattcaaggtcatatcactagttagtgttagggagagccaccagaaccctagatttttaggccaatcattttcccccattctgtctcttttatgaattttaccgtcttccttctggttgccattctgattattatattgcatttttgagccactatgaaacctctctttttattctctctaagcttcaaatttatatacttgtttgaatctatttttttttttttttttttttttgctgcttgaatggaaggacagtataaatggttgtttaaataaaatgtttaatccaaggagttggcatgtttaaattggaatgcaggagatgtgttaaatttcagactattataacagaagcttctttttttgtttttttttatttatttgttgttgaaactttggctttaagacttttcatgtgtatgttttatgacttaatttttaaaactgttgtaactgctttggcctttgatagcattgttatagattaatctgttttagatttttgtaatgtttatattttaagatgtgtttgaaatgattacattaaacattctttttgcttaaaattattttattttttaggacgcatggggataaatttccatcatccaggaacagataatattatggcacttaacagtaagtcttcatatgaaatattctattaaattagcagtcaagtttgcagcrtgtagtttctacattcttgattgttggttacattttaaccttccgctgaaaggagtatagaccattgttctgtactagtggttctcaaagtgtggtccctggaccagcagcatcagcattgcttgggagcttattaaaatctcaggccccatgacagggctattgaatcagacacttaaggatgaggcccggaggtctgtattttaacaagcctgtatgtgattgtgattcaggctaaagtttgaaaattgctgcttcaaaccagggttggcaaactatagctctgcaagctggatctgtttttgtaaatgaagttttattggaatatagccacacccattcatttatggattgtctgtggctacttttgtgctacaaaggcagagccacaaaggccaaactatttaccatctgaccctttacagaaaatgtttgccaactcctgctgtataccattgggttggaggaatgaaggaggtaggtgaagggagagaggaagtggggtagagaatataatgtgaatgaataaatcaacttatttatacataactcagaattttttcatggtggtagatagccaggtatttcaagctggacatccaggggtctcccattaatggaatttgcatggtatatatgtcagcagctttataggtttgaaacagttttgtcagtataattgtttgatcaagttctaaagcagcaaaaacttactaactggaaagtcattatattaattaacaccagaagaaataatctgggtggcatcagctctccttcctagtgtcaatggatcagatacctttgcagaagaacagtctctaaatggaaattgttcattttcagaaggacctgtataagccattgaatcttttagactttaagttttctcctctagtaaatgagtgatatcagattgtcccctctcatcttcccagatatacaagctgactctcaatacacatgggagacatactggataaatctagggttgtgtacaatattatttctttccctcttgcttgagtaggtatgttgaatgtcattggagttctttagaacagattttaggttatctctaaaatatatatttcacatctccttggtctgacatgcaaccaatgagtactgctgagaaccactggcagtgcttgatgatgcaggtcytaagcctctccatgcatatttttttctagattgctagtatccctgccttttggcagggttagggagatggtcttagagacaataagaattccaaagtatctacctctaattttctaacttctaaatgaaaggtcactttaaatttagattatgctgcctctaactttttttctagtcgatgggaattaataaacatgcttaacttgctgaacttgagcaataattaattgtgaaaagacttcagttagattatgggatttaaagttgaatgtaaaagaaaagaacagtatggtagtgtgtctgcctgaaggaatgagtgtgtatctcagaaaagacctaattgacatgatgtgaatcctcttctgcaagagggagaggatatagtttgtgattttttgtgggaaaaaaatggagctaaaagacatttttctttttaaaaactttttattctctttggtttgattttctttaattctctgcttttaaatccaagatttcatttatgctctttccattttgttcatgttgtgtaatcccctgtttagcttcaatttctccaatccttgagagaaggggggtgattaggtaatcttaatgattgttttcagcatgaagatactgttattctgtaatttttttaaagtaccaaaacggccattttgctgatacctataacaaatgttgatgagttacacatagttgcaacagatatcagagtgcatcaatctttgaatgtctctgtggttgctgcccaaagtcaaagaaccttgttgtctccttaaaataaaccatacgaacaaccagagtttgatgtttacattacctaccatcagttttctttcaaagttgactccagcttgagatgatcagaacaaaaatatcctccatagtaggtacttgtgggacctgccagcttcgacaaatttgctgggataaaccttgttttcctttttgtacagttgatcccagcccatctggtgacttacatatgtagcatatgcacaaacacacacctatctattatttttgtcttcttttttaaaatatgtatgtattttttatattttatagagataaagtgttgctatgttgcccaggctggtcttgaactccttgctgcaagcaatcctcccacctcgacttcccaaagtgctgggattaaaggtgtgagccaccacacctggtctttctttttatgcctaccatttgttgccctaacactttttgtccgtgactggtctatccttcttcctttctgtcaaccttcatgtaggaataattgagatcgctgggcgtggtgcctcacatctgtaatcttagcactttgagaggccgaggtgggcagatcacttgaggtcaggagctcaagaccagcctggccaacgtggagaaaccccgtctctactaaaaatacaaaaattagctgggtgtggtggcgcatgcctgtgatcccagatgctcaggaggctgaggcaggagaatcgcctgaacccaggaggcagaggttgcagtgagccgagatcacgccactgcactccagcccgggtgacagagtgagactccatctaaaaaaaaaaaaaaaaggaataattgagaagaagtaacaaatcctgaaacattgttaattcagaattgtgattatcgaagggactaggttgaagttgagctgtattttcggaaaagaagggattggctaagaaaattatagcaaattgagacagtttaaatttttttaaaaaagaaaatgcgagtcagttgtagttctttctttcttacccttttttgctatgtgaaatttgtgcttcctaggtctctatggaaagctgccaatcattatgtttcccaaaaaatcttccatcctttttttactttcttgacctcaccaaaacctgtctcctaaagatatggcctcagttctcctgactttatgggaaagatagatgtcataatatacattcttctcagtactactttccagctttgaattggccaagttcccattttttggtgttcctagtgcatgccctccagttataccttcctccaagaatcaccactgctgacataatctagaagacagaaaatgaagcttagaagacaaagataggataccactatggaagacaaataagagttaccagtaaaccttcagacatttagggtgtggaaaaattggcgaggtttgtgtaaaccaaagagtctactgatttttcctgttcaagaccatgaatctattaatagtaagaattggcaggccagcctttatggaggaacccaagaggcacattccaaattttggcctttctcaaaatattaggtcctcaagtattacagaatatagaaggggaggtagggggaagaaactccaatccatcagtaagacctgccacttgtccaatatttccaaaataaagttagttctgaggcaatataccccttctacttaatcaggtaatatattttttcctaactgtttaataattctgcccattttattttaatcttccttacttttaaacaaaaacactcgacgtttgcataatgtattttaatttttcccattggagaaggaggctgctaagagttcttctagctacatatgtggtagtagttctaccatccrtatttttctaatactaatagtagcttgtgtttcctttttctttttcttttttacattctaggtcagggatgtccaaccttgtggcttccctgggccacattggaagaataattgtcctgggccacaaataaaatacactaactcatattgttttaaatttgtcttaaaacaaatctcataatgttttaagaaagtttacagatttgtttgggccrcattcaaagccgtcttgggccacatgtggcttgcgggacgcaggttcgacaagtttgttctaggtgtagagttggtttagcattcgtggtcttgtgtaggattgatgcctaacttggtgacttttcctctattatgctgatccttagaaaaggakactggtgcctccatgattcatcacataaaccaaatttatgttcaaattaatgttcaaaatcagcatgcctggtctttactccatttgactggtcagttcctctttttccaagtagaaaatgggcttgggaaaacagataaatatcggaaagttgcttgataggtacaaaagcagaaactgggaatagtgtttcttaaggaatagtatcattcagttctaggaagatgtctttgaagcaggctggaaggcatgtgaaacttgaagatgcagcaatgaattagcaaagccaaaggcatcatctggagttaggtagatcccattccctctttacaagctatatggccttgaggccacattcttaactcctctttgcctcgatttcttcacctgtaaaatggagatagcaatcaggaaagtggttatatatatatttttataaagcttagcatagtgcctgatttgtagataatgctcatatgagctgctattgtgaatgtttgcaacaggcttattattacctttaaagatctttctttctttacatattagtttcaaaaatataagtttatctcacattgtttacatttaggtagatgctttcctgatagaatttaagacagcacacctgtaagtcatttggttacatttatttacttatttggagacagaatctcactctgttgcctaggctggagtacagtggtgtaatctcggctcattgcaacctctgcctcttgggctcaagcgattctcctgaatctgcctcccgagtagctgggactacaggcacacgccactatgcctggctaattttttgtatttttagtagagatggggttttgccatgttgcccaggctggtctcgaactcttgagctcaggcaatccgtctgccatggcctctcaaagtgctaggattacagctgtgagccaccacacccggccacgtttagataggtgctttcctgatggaattgaagacagcacacctgtaagtcatcacataagctagcatagctgtattgagatgtggttccatttgtttttgtgtgaatctttttctctggatgaaatactttctattacttgactttggaacatgcaaaygtgcactgtytttggatcctactggcctttctcagttgttaaatatcttgtgatgttgrcactttaaaaagtgtcacacgctgctgtttggaatgtattaataaaatgatacggccactttggaaaacaatttgacagtttcttgcaaagttaaacatacaactatcatatgatgcrggagttctcctgggaatttacccaagagaaaaaatgaaaacgtatgtccacacaaagacatatgtgcgaatattcaaagcagcattgtggataaacaaattgtggtacatccatacaatggaatactactcggcaaataaataggaatgaactattaatacatgcagcaacataaatgactgtcaaaataattatgctaagttaaaaagctaacaaaagaatacatactagatgatcctgttaatataaaattctggaaaatgtaaactaatctattgtgacaaaataccacaacttcaagaaaggaatttttgtagtaacattgtcttcttttttcagaggacaaaattgagggcttagatcttggagaagtcatgtgtaatgatggcatctagttgagcaagtttctgaatctccttaagcctttgcttgaaaacctgtaagtgggcagttaggatatttactctacctcattgtttttgtgagattcagatgaagtaaggcacacgtacaaatagggtattattactgctacatttgggaagtaggaagcatagtcttacccagagaagatacttctaaagagttaatttttcyttttttgaagatcatagctttgtaatataacagagattcaatattgtttaaattaaaagttttcctgccattccttttccgagatctttgatgtaattagagtctgttacaagttataaggagataaattagaattctgaagtaccacttcccttctgacaaggaaagatgattgtttaccctcactcttccttatcaaagtttgtaactttgcaaaattgaagattcctagaataaaacctaagtagtttgaagacttaaacttttgatatctttcttctttattttttctgtatctcatgaattgatatataaacattttgatatcttaagccaaaaaaagacactcacctctttagaagctctgaggtcattgattgttaaacaatgtatacatagctgatacaccaagaaacttggaactttaggttattctgttttctacattttcctcttattaatgccttgaaaacattttagaaggttttgcttatatttctatttgaactgagggctgccagtgcatttgtggaatcaaaagaggcaatgtgaaagggcattgacatgaacatttgtgttgggcagagacccctgtgtggctgcagagcctcctcttccccctcccttttatcctctgctgggagtgaactccttggggagaggctcagctgagaggaagtggcagagagggagctgagcacctgatgccagaatgggaataaagccagctttgctagaattccaaatggcattttccaaaatttgaagaacacattgttgtttctgttcactgtgagtggatataagtaaataatttcttggtagcataaaaaagtatagtaaaggaattatcttgagattctcagattaaagacattttgtctgagaatttttaactttttgaagacaagattcagattttctctttctgtctgaacaggtttctatctgaacaggtttagaaataaaactaatatatggttgtgctatgaatacattgtaaaggatggctaatttagaaatgaaaaaattagaagaataagtaatgttccatgacttccaagtactcaaatttcaaaccattctagttggatgctgcacatgaacatggtaagggacctaagagatggttttgttttgactttctcattttacagactggaaagctgagattcaaaaggctgtaagaattggccagggtgatatggagctaggagcagagcctcttgcctcctggttgagggtggtaccttttgctttagaaacttaattgttaagagtagttacattattattattattatttactaccttaacacaaacatgcaaattcggtgtctttgggaaaatagtttctctattattattatttgtcaccttgtttatgctctgaatgcttagtaaattctcttttcctgaaaaatagaatggtaaacctagtttacatggcctgatattgaatattgtcaataagtgaagtctgaaatgttcttgactgactttattgcattttggaagaagttctttgtatttgtgaatgtgtctaaagtgacagtattgggtagttctaaccaaataaggaagatgcagaaaactgaaaatttacttactcttcccggtggacttccctgttttctccacttgtataggcagtggaaactggacttcacatttacagcattcaccccacttgtaattaactatttaatgttggtgtttttctttaatgtgtatgtttcaagagggcagagactagcttttattcacagttggtccctggcttgaagtayaatgcctggcctgttgaatacgcactcaatatgggtgatcagaagagagagaaggaggactgggaaaacatctcagtgtgactgtgaaaagcacagtctaacagtcttagagaatatccagtccaccttaatttcttcctaaaagatgtgctttaattcttccttttgaaagatggttataacacatatagatctagcaatgagcagtttacgaagtggtctcacagacctctgtgcttttgtaatgcttactatggtttttccagaacatggaaaaaaatccacttttcttgagcaccaactttaccccaggactattttcttatccagacaaaacatggccatatgatagagtagtgtgtgaaactgaaatgcagtttttttccccctttcaacttttaggttcagggggtacatatgcaggtttgttacatgggtaaattgcatgtcagcatgttgctaatgtcatacagccagcaaatagctgtataaggtttagacacacagattattctgccaaccagttcctaatcccgtgtgatttttactcttttggattttcccaaaaggtcacttgggtttcatttaactcctttataactattaaataaatgatactttattgattgtggagagtcagtatacttccacacatgttcagtgttactttcagaacatagtctccttcaatagcagcaggaattttaaatgccttcttttcttcattaccctccacacacatacactcttgttatatgaataaagttttgtgttttttttgttgttgttgtcttgttttttcagctgaatatagtagaaacagtgcagtttgaggtagggaggcagacagatctgagtttaaaccccaaatccatcacttatttgccatgtgaccttgtggcaagttacctgtgtcttttattttttattttatttttaaaatttttttgtagagacagggtcttgttatattgcctaggctggtgttgaactcctaggctcataggatcctcctgccttggcctctcaaagtgctgtgattacaaatgtgagctactgcaccgagcctgtgtcttttattttaaatggacactttaacccctctttacaaatggtaaggttgtgtagtgctcctaataccatatctggcaagaaatatacaccaaggctgggtgcggtggctcacgcctgtacttcccagcactttgggaggctgaggcgggtggatcacctgaggtcaggagttcaagaccagcctggccaccatggtgaaaccccatctctagtaaaaatacaaaaattagtcaggcatggtggtgcattcctgtaatcccagctacttgggaggctgaggcaggagaatcgcttgaacccrggaggaggaggttgcagtgagccgagatcacaccactgcagtccagcctgggcaacagagtgagactctctctggggaaaaaaaaggagtacataccaaacaaatgttagtctttgtttcttccctattctaccccccttcctttgtttccttttgagttcacactaattctcaactctagttatacaatcaaaacaggagccaaaatagaaaacacccatgtctgagagactgtaatttcattggcgtagggtgaaatctggttgggggtggagggtgggcaagggatacggaaaggaccaaaattagatgtgtgtctatctttatttgaggatgaacgaatcaagtagtatcgggactatgctgtgcatatcgtagtgttctttcttttccctcaagacttggtctgcttttattgttccctgaagttttcccaagtccagatcagaagaggaaggtgtttttgaaggatcagggcagggctgatatgaatgagcagcttctccatgctactgcagcccttccgaaatgtccaggtcaattccttgtcataactttcttctgtgaaggaactctccttcccacatgagaggagccttgttgatagagagaagacaacactgaccaacgggcccagcctttggttcagcttaggctcctgaacacaccagcacccattttgtttaccttctcttctttctgtattattccttatgttatttgggagttcagaaatgtagaactagcaagtattggctgtcctgaacagtgtaggaattgagtctttatatacagttgtagaaatctcatgagatttttggcatagtggtggttcaaagaagatggtttgttgaaaacagatgccagatatttgagtgtataccactgtagtaagcaatttcagacctgaattggacagattgatcagtataaaatacaaaatactctgttatgtgattacaattcttagaactttcttctttctttctctctcttcctccttcccaccctctctttcttcctctctccctccctcccttccttcctttcattctccatctttctctttttttccttccttcttttctctttctttcatcagttattgtttcatttagcaatgtgctactgaaataaaagcaaggtggttattaattattcttagtggaatgctgtcaggtcacaagtatgagggtgcataaacatcacctgatgtaagtgggtgtggatgcccactctctccagtaaggtatagcagtattatgcagaggaattctttaccgaggtttgtttccagagatgtcttgcctgatatatacatttttaattatctttttctgttttgatgaggaatttaggaaatgaacttggaaattctagagtgattactttgataacatgttatatattgagaagttgtattagtatcttatatgttaaatgtaatttagaaagtaaattaatactaagtatgtggggacactgaaatgtggtatagcaaatccttgagcttgcattttgtacaagacaggaagaagaataatagaggaaatggacaatgtggactaggggtttcctagggagtagaagagactagatgtcaaggcatgcaggtatcaagatttttattctctctgaataggtgcttacttgtaatgataatactggaagagtaggttgaattgggattactggaatgtatgggtctgttatatggaatagtgagaatgaggatctgaaagatggttggggccaaataatgaagggctttggatgcttcatgagaagcttagacagactagtattgtcttagtggaaattaggtttatccaaaggagaatattcagtctgatatggaatatggaaaatgatttcttacgaagaatattgaattgactaaaaagagtgaataaaaaagataaaaccaaaaggtgctaaagtaatggccccccagtaaaagtgggattaggctggggtctgtgggtaagaacaacaggagagtgtaaaaaagaactttgtaacaataagaatggtcctaccatggaatatacagatctttggttttctagttgtgttctatggaatgccaacatccaagaaggtactttaagtgccactgtgggagaaggatacccaacatttggggccatgggtccttgccatgcttgaacttgaacagccttgctttaatacattgtctttactgggggagagaaggctctgctactgtattcacccattctcacactgctataaagaactgcttgaggtcaggtgcagtggctcacgcctgtaatcccagcactttgggaggccaaggcgggtggatcacctgaggtcaggagctcgagaccagcttggccaacatgacgaaaccctgtctttactaaaaatacaaaaattagctgggcatggtggcaggcatctgtaatcccagctacttgggaggccaagacaggagaatcgcttgaacctgggaggtggaggttgcagtgagccgagactgcaccattgcactctagcctgtgcaataagagmaaaactccatctcaaaaaaaaaaacaacaaaacctgctcaagactcagtaatttataaaggaaagaggtttaggccaggcacggttagctcacgcctgtgatctcagtactttgggaggctgaggcaggtggatcacctgaggtgaggagtttgagaccagcctgaccaatatgatgaaaccccatctctactaaaaatacaaaaattagctgggcatagtggcatgcacctgtaatcccagctgtgtgggaggctgagacaagagaatcgcttgaacctgggaggcagaggttgcagtgagctgagatcgcaccattgcactccagcctgggcaacaagagcaaaactccatctcaaaaaaaaaaaaaaaaaaaaagggcaagaggtttaattgactcacagctctgcatggctgaggaggcctcaggaaacttacaatcatggcagaaggggaagcaaacacatccttcttcacatgacagcaggagagagaagtgccaagcaaagaggggaaagctacttataaaaccatcagatctcgtgagaactcacttcactatcacgagaacagcagcatgggggtaaccaatcccatgattcaattacctcccaccgggtttctcctatggcacatggggattatgggaactacaattcaagatgagatttgggtggggacatagtcaaaccatatcagctatttagaaagaagtttgaaaaaaacacactagaataggctgagagacttgaagcaagcctctttattcttttatctcatactttttatctcataatatctttattaaggtattctagcagaaccaggtaaaaacacttttctattagctccagaaataaatcctgttttgcttaagatacctgtaggtttctctgtaagatattgaaagcagtgaaacagaatgttgcaaaagttcagttggtgagaatacaggatatattttcttatgtttctaataacaactaaattttctgaccaatccacaaaagtacctataggcatgtatcattttattgtgcttcactgtatcatgcttcatagaattatgttttttataaattccaagtttgtggcaacagttgtgctgtttttctaacagcatatgctcactttttttctgtatatcatgttttgttaattctcacaatattttaaccttttttgttattactatatctgttatggtgatttgtgatcagtgatctttaatgttactattttattttattttattttttttgagacagagtctcactctgcctgcccaggctggagtgcagtggtgcagtctcagcttactgcaacctctgcctcccgggtttaagcaattctcatgtctcagtctcccgagtagctgggactacaggtgtgcgccaccacrcctggctaatttttatattttttagtagagacagtgtttcactatgttggccaggctggtctcaaactcctgacctcaggtgattcacctgcttcggcttcccaaagtgctgggattacaggcctgagccactgtgcccaccttgatgtaactattgtaatagttttgggatgccatgaactgcacttgtaggagatacaaacttaattgataaatgttgtgttctgtctgctccaccagctggccattctactgtttctctccctctccttgggccttcccattttctgagacacaacattgaaattaggtcaattaataatcctaaaatggcctcaaaatgttcaagtgaaagaaagagttgcacacctctcacttttaatcaaaaactagaaatgattaagcttaatgaagaaggcatgttgaaagctgagacaggctaaaagctaggcctcttgtgctagttagccaagttgtgaatgcaaatggaaaggttcttgaaggaaattaaaagtgttattccaatgaacacactaatggtaagaaagcgaaatagtcttattgttgctgtggagaaagttttagtggcctgagtaaaagaacaaaccagccacaacattcccttatgccaaagcctagtccagagcaaggccctaactcttttgcattctgttaaggctaagagaggttaagaagctgcagaagaaaagctagaagctggcaaacattggttcctgaggtttaagggaaaaagccgtctccataacataaaagtgcaaggtgaagcaacaagtactgatggagaactacagcaagttacttacccagatttagttaagatagttggtgaaggtgactaccctaaacagcagattttcagtgtaggtgaaacagccatctattggaagaagatgccatctaggactttcataacgagagaggagaagtcagtgcctggcttcaaaggataggctgactctcttgttaggggctaatacagctggtgactttgagtttaagccaatgcttattgaccattgtaaaaatcctaagggccttaagaattatactaaatctactttgcctgttctccacaaatagaacaacaaagcctgtatgacagcacatctgtttaacagcatggtttactgaatattttaaaaccactgttgagacctgctgctcagaagaaaaatactcctttcaaaatattactgttcattgacagtgcacttgatggagatgaaccggacagtaatgttgttttcatgactgctaatacgtcatccattctacagcccatggatcaaggtataatttatacttccaagccatcttgttgaagaaatacattttgtaggccaggtgtggtggctcatgcctgtaatcccagcactttgggaggtcgaggagggtggatcacctgaggtcgagagtttgagaccagcctggtcaacatggtgaaacctcatctctactaaaaatacaaaaattagccgtgcatggtggtgcacgcctgtaatcccagctacttgggaggctgaggcaggagaatcacttgaacccgggagacggaagtggcagtgagccgagatcacgccactgcactctagcctgggcgacagagtgaaactctgtctcaaaaaaaaaaaaaagaaaaagaaatacattttgtaaggcaatacttgccatagattgtgcttcctctgatgaacctaggcaaagttgaaaaccttctagaaaggattctttattttagatgccatttagaacttttgtgattcattggacgaggtcaaaatatcaacactgacaggaatttgaagaggtcagttccattcctcatggacaactttgaggggttcaaaacgtcagtagagaaagtcactgcagatacagtgtaaatagcaagagaactagaagtggagtctaaagatgtgaccaaattgttataatctcatgatgaaacctgatggatgaaaaattgcttcttatgtacaagcaaagaaagtggtttcttaaggtagagtctacttgatgaagatgctgtgaacattgttgaaatgacagcaaagtatttagaatattacatacatttagttgataaagctgttgcagggtttgaaaggatcgaatccagttttgaaagatattctactatgggtaaaatgctcttaaacattgcatgctacagagaaatattttgtgaaaagaagagtcaatcgatgtggcaaacttcactgatctcttttttttaagatattgcctcagccaccccaaccttcagcaaccaccactctgatcagttagcaacaatccacatggagggaagaccttccaccagccaaaaaaaaaaaaaaaaaaagaagaaaaaagtgacaacttgctgaatgcacagatgatcgttgagatttttagcaataaagtattgttttttattttatttttaattttttcgagatagggtcctgctgtgtcacccaggctggagtgcagtggcatgatcatggctcactgtagcactcagctcctggcctcaaacagtcctcccacctcagcctcttaagtagctggggctacaggtatgagccactgtgctaggcaacaataaagtattttttaaattaagttatatatattgttttttaagacataatgctactgtgcacttaatagactacagtataatataaacataacttgtatgcgctaggaaataaaaaaattgtgtgacttgctttactgtgatatttgctgtattacagtggttaggaaccataaggctgtaatatctctgaagtatccctgtattttaattcataatctaacagttctaagtgtaataattagtagaaaacaatartgttgtgttagtaataatgaaataaaatttaaaaaagaaaattggggtgagaagtttattttcttaaattttggattgtgctgctgaaaaacaggataatggaggctgtgaaaattctgaagagaatttctgggtactttcaaggtctttatagatttgaaatactgattcttcaaacttagtggttaagagtaagggtttttcaaatgtttaccgactggtgaatggataaattgtagtttgtccatactatgaaatactactcagcaataaaaataaacaaaatacttatacatgtaacaacatgaattaatctcaaaaacatgctaagtgaaggaagtcaaacatattggtttcattaatatgaaatcatagaaaaggcaaacaaaactatggcgagaagggagattaatgcttgccaggaaccatgagttaggggaggggatcaactgcaaaagcacacaaagaaattttcaaaggtgttgaactgtcatatcttgattagaatggtggtggttatatgtttatatataattatcaaaattaatcagatcgtatacttaaagtggataaattttattgactgtaaataataccttgagttaaagtaggtgctttagagccagactaaacctggattcagtcccagctctgctgcttagtagctgtataactttgggccagtcatcttctctggaccttggtttgcccatctggaaatgtgtataatgatagctgccttggggattagaagacgtacaagtacttagcatatgcctggaacatgataaattatcagtaggttattattttactttatgatcgtcattctcctttataaaatatcccagtaatgctagtattttgcttatcagtcattagtattactttttaggtttgcaaatacaatggaaagaagatttttctgagaagaatgtgtaagagtaaaagagaagggaaggaaggagttttaagacatccaaatgcttaatgtatacaaaacaaaaacaaaaataaaaacaaatacttaatgtgaatgtagcagatgaatatatatccttccccttcaagcatcttttttacctgctactttcatattgttcatggagaaattgatcttttcaattataacttgcctagtttgagaaatgctatcaaacatcaaacattgggttaaaagtatcttatctgccattataagtcaaagatataggaggagcatttaaagacaaaccccagcactcctgctgtttaagaatttatagtctaatgagggaaagggggacattttgattcaaactttaaggtcttaacccatcttaagtgaaattttttctatgactaatactccaagggaagctgaaagggaacattagatgtttgaataattttatgatgcctactgaaatggtgattcaaaaaataagttgcaaggtgtttcttaaaaactgattttatcacaaggaaagtaattttttttttttgctcttgttgcccaggctggggtgcaatggctcaatcttggctcactgcaacctccgcctcccgggttcaagcgattctcctgcctcagcctcccgagtagctgggattacaggcatgtgccaccatgcccggctaattttgtatttttagtagagacaaggtttcaccgtgttgcccagtctggtcttgaactcctgacctcaggtgatccacccgccttggcctcccagagtgctgggattacaggtgtgagccactgtgccttgcggagcacaggggatttttaaggcagtgaaactattctatatgatactgtaacggtggatacatgttacacattcatcaaaacccatggaatgtacaccaagagtgaaccctaatgtaaactgtagactttggatgattatgatgtgtcagaataggttcatcagtttttacaaatatactatggtgggggatgttgataattggggaagctatgcaagtgtggggctagggggcgtacacgaaatctctgggtctttcttttttgctgtgaacctaaaaaggttctaaaaatataaagtctctaaaaaacaaacagcagagcataacatgcccttcccttggggagtcacatgtataagaatgcaaccattaaaacttagtgcaggccaagtcataaggaataacagatgatctattttagtgttgcctcatgtgcccagcaaagtaccatgccattaacatgagagtgctgttgacagtgtacttgtcactgaccatacaaatccacttttggaataattcttgtatttccccctgtaaaatacatgtaccatttaatttttattctgatggattggaaataagcatttttttcaatttttaattattcaggtttatgatttaaaagctacaaaaatattagcactgtggattttctgcactatttttataaccaatgaactaatctaaaatatttgtaatgtttcatttttaactattcaaatacaaacagtacacaaatcatagatacataatatatgtatctatgatttaataaatatattgctcaatgtagtatcacaaattgagctcacccatgtaactagtacctggatcaagaccaaaacattactaataccccaaactaaacccttaggctcctctctggttactatcgctagccaagggtaacactactctgatttctaaaaattagaggtaattcgtatgggctctaaattgcttaatatatatgaaacagtaaaaagattctttctcttaaaaaaaaaaagaattctatctctaaggctggtaatagttgataattgagaattaaagttcttagagggagtagatagacctttgaaagaatattgtatcttgttatatctggtataaatccatcttagcatagataggatattagaaagatgaaataagtcacattactccctttttaaaaatgtggagtcagccgggcgcagtggctcatgcctgtaatcccagcactttgggaggccacggcaggtggatcacaaggtcaggagttcgagaccagcctggccaatatgatgaaaccccatctctattgaaaatacaaaaattagccggcgtggtggtgcacgcctatagtcctagttactcaggaggctgagacagaagaatcgcttgtaccgggaggtggaggttgtagtgaaccaagatcatgccactgcactccagcctgggcgatacatgtgaagtattttgaactgttcccggcacataggaagcactcattagctgctatgataatcactataacaggaccaaggtagtacataataaattccacaatgaatgataaaaacaaatctaagccactgggcgcggtggctcatgcctgtaattccaatactttgggaggccaacgtgggtggatcacctgaggtcaggagttcgagaccagcctggccaacatggtgaaatcgtgtctctactaaaaatacaaaaaattagctgggcaaggtggcaggcacctgtaatcccagctagtcaaggggctgaggcaggagaatcggttgaatccaggaggcagaggttgcagtgagccgagatcatgtcattgcactccagcctgggcaacaagggcgaaactctgtctcaaaaaaaagccaaaccaaaacaaaatgaaacaaaaaaaaatctaagcatctcagatagatcactacttgatattggctacctatcccatatgccatcctgtctctctgatatcagagttcccaaccatcatgaaccaatttacagtcccagcactttgggaggccaaggtgggcagatcccttgaagtccaggagaccagcttgggtgacatggtgaaaccctgtctctacaaaagatacagaaattatctgggtgtggtgatcccagctgctcaggaggctgaggtgggagaatcgcttgagcccatgaggcagaggttgcggtgagcagagatcttgccactgcactccagcttttgtgccagagtgagaccccgtctcaaaaaaacaaaccaacaaaactcccaggtaggtcttttgtaactcttcctctgtccccaattcaacatgctgccctccacccctaagcctgtctagatctactaacttcatctatattacttggatgtttagtggttgaagacttgtgtgaacaacattctcctttatcctttatgggtgttaatgtccaattagtcatttgtaccttagtattgcaatcagatttgttttcattgggtatctggccagaaatcagatataaggggaaaaaaatgaatttgttgtttgggagagaaataagtaattttaaaatatggagtatttcctttctcaataaagatttttcattgggttgtcaggcagcataacatcattggggatgggaagaagggacaaagagacaagtgataggatgtcaaaatttatttcatcttttttgaagtgttatattaatccatccatataattatggatgaagcaaatttgggggagggatcaaggtaggaagctacctaccatttattatactttttgtaacaagaggaattcaaggtgccaaataataaacagtataaaagtcccttaaattgtttttggaatgcatcccctttcgtaagttatgtaaacagtaatagctatgtaaattcagaagagatttttttcagctgggcgcggtggctcacccctgtaatcccagcactttgggaggccgaggtggggatcacttgaggtcaggaattcgagaccagcctggccaacatggcaaaactccatctctactaaaaatacaaaaattagccaggcgtggtgaccagcacctgtaattctagttacttgggaggctgacgcaggagaatcgcttgaacctgggaggtggaggttgcaatgagccgagatcgtgccactgcactccagcctgggtgacagagtgaacgagactccatctcagaaaaaaaaaaaaaagatttttttcattgaggtttgtagtacaggaggaatcagggaaaaaaatagagcttgagctggataatcctttctaatatttgagtagtgggaaagtgaagaagttaaaggtgtggagtgagggcaagtctgatgcctgaggaaaagtggaaagtagtagaaaatgagattggcctagtggtatttcaactatccggctgaaaagtctgaattattttcctatggaataaatagtttttttgtttgtttgttttttgttttctgtttttttttgagacggagtctcgctctgtcacccaggctggagtgcagtggcatgatctcggctcactgcaacctccacctcctgggttcaagcaattctcctgcctcagtttcctgagtagctgggactacaggtgccctccatcacgcctggctaatttttgtatttttagtagagatggggtttcaccatgttggccaggatggtctcaaactcctgacctcagatgatctgcccaccttggcctcccaaagtgctgggattacaaacgtgagccactgcacccagtcagaaatagttttctttaatgcttaatataatacactgtaaatgtaactccaaattatcttcctttttcagtataagctagttgtgtgacatttcacagttttatttatttttttacttatttattttgagacagagtcttgctctgtcgcccaggctggagtgcagtggcgtgatctcagctcactgcaacctctacctccaaggttgaagcaattcttctgtctcagcctttcaaagtgctgggattacaggtgtgagccaccgcgcccggccaattttttgtatttttaatagagatgaggtttcaccatgttggccaggctggtctcaaactcctgacctcaaatgatcctcctgccctggcctcccaaagtgctgggattacaggtgtgagccaccacacccagcctgttacacttttaagaaatggattaagctctaaatcattttttaaaatagaacctgaggtttcaaatttgagaaactttccactctgaaaatcattccgcttgacaggatcttttagtgatacatgataccacagtctagctctattaaacaatgtaacaatacattctatagggctggagttttaaagaggaagaaaacctttaaagcactgtattattaagcatggcctgaggtggacccagtgccttagtctcattttacttttgcagttcattttatagatcaaaaagatattacattcccccatctgtaatactgagtggaaagtaaatggagagagtaagagaagctttactgaaaattgtgcagaaacacattctgtaaagtaacagctagttgtatataaaatttctatacatttttcaggggaatctatgaagagagagagtgtgtgtgtgtttgggggcaatgtgtgtatagtaagaaattcagagtgaccaccgcatggtacagtttttagttatttagaatgaataattttttcttatctggtggtaagataaagtacaaatgaagatttataaatcagttttttaaagtactctatgtctgatatagataataggctccaatataaaccctcataagacttctgaaacatccattgtatctgttccagtggctgccacatccagttaaatttctttttaagattgtgatttagcctgtacttcataaaggttttttaaaaaaatatagtgtctgcagtcaagttgaacagtatcttcatatcaattgaatagttccaagaatacatagaaaagctttgtgtgaatttttttttcatttctaaattcaccattttgatacaaatacccatggttttcttctatgtttacatgcagccaggagctatgggcggagacgaggtaaattttttttttttaaatgagatcttttgcttgccaaattgtgagtaaatatgagtgtgtttatgtgtgtgtgtatttatacctgtgtgtgtgtaaaacaataattatcatatggtgtgatgttctatcttaattattttagcaaaataatttatcactttcattaaaattatttttttgttgttggtaatttgttcttttaattataaaaaagatatagcaaagactatttctccttaaagttttttgttatatggtttattgtgaataaacatgaggaaataaaggccaaacatatatatttttctgccctgtattcattgtgttcttttcatacaacttagaaggcagaacttgggttttggagggcaattcttgatcttattaggttggctggtgatttttttctgttatattcagagtcagatttaccccggaagtaaatgaagcttaagtttcagagcctctcacttgcttggaccccttccaaagtctacgtaatttttgtgttcttttgcttaaagagggtccccaaaataggctttagtccccataaaacttgcattctctcctggtcacacccaaacaaaataatacaactttcatttgtgtaatgctgtaactgttctaaagcatttcccatatctgtagttttttcaaataattttacgaagtagctaggagaagccggatgtcgtagaaagcatatgggacttagggtcagacacgtaggttgtaatcactgacttatcatttagatttggtatgctcatctgtaaattatgaggtaataaaaccagtcttgtcctacttcagagtattagtaaagttctagttaaaaaaacagggaagtgaaaagctatccatgtaaattaaaagtattccacaaatataagttactttggtgctcatttgcagaagctgaaggaggagtcgtaatttacttgctgtgtgaccaagttaaagccagagtcaagatcacaatctgtgtcttttggctctttatttgctaatgtttaccattcatcaggctgtctctgactttgtagttgagtcatgaagagaagataatgatgctaaattcgtagtattttattatgttttaaaaaatattaaaaatattttctgcctatgcttacccaaacaatacttttatcatttatttcacagcaaatatttgttgaatgagtgactactggcagaagctaatatatatgtacagtggatcatacagtccttttgcttttcatcatcatcatgtgtaaaaacgtttgtgtaaatgattattttctatccttggaaataaatatcattaaattttattgccttatttttaaatttaaaaaagttaaagcctataaataatgttattaagacatattttgtaccatacttgtttcatgttgctagaaaaatgatcactgtcaggaaagaaaaggaaatggactgttttatgtagaaaatagacaccatctggagaatagacagcagggcctggcttttcctcttctcacgtactaatcagtcaccagatcttgtcaagattttccctctagttttctcaggccttgtccttctcatttctgctatttttatttctcctgttccatttctacaacttcatctttctgaaacaccgctttgtgtcatccccattctcaattcagggtccccatgatctggcttctgcctctttcaccaacatcattatcttcatttttcccacttcatcttcccctgaccaatctatttgctttcccactctctggccatacaggtcacccttcctctcatctatgtatctaagaactatccttattttactagttcaaaccttaccctttccaggaagccttctccagtggccttgcagacagtgttttcctctgattctgctgtcttgcattcttcctgccttttctgtatgccctgattcttcatctgggataagttctttgaggatagttgtctctagtgcctaacactgggccctacgtagcgttagcccttattaagtgcttattgataaggattattttgaaataacaccctacatttatgcagagcagagtttgccatcatatttttaaaaattatcttatttttataaataatagcatattaatactatacatcaagaatataaagtcgcctatagtttctaagcttctgaaaaaaatactcatccttttttcattttactttctccatatctatttgtgaggttgattttattgttctcaaaagtcacgatcttctttgtatgaggtgctacactaaatatttcctagaatgacttggtccctgctcttggtctgcagtttgataggtgtaaatgaagaagagaatgatgagagagagaggaagagagacagagagaagtgcaaatgctaaaagactgaatgttgcctttctgtaatgaaaaaagaacggacagaaaatgttttgtccatgctttcaataagtctttcatttccaaagctgaaaaagaagtcatcttccttaaatgtaatgatataaccatatgggatgaagcatgtctagatcgcatatctagaacacttattctctgagatgtattcatttgagccaactctgcatagtatacttctgatgaattggcagacttcctcatgcttattttttcatgtgaacagggattaaattaatgtttgatccctttcctctaattaacatttagacttgcccaaaaagaataaaaattaagcttgctgatgtatgttacttccctctacctatgattaaggatagaactggagttataacttattttctatgtgttacataaacatgttggtaaacttttttctttttttgagacagagtctcactttgtcgcccaggctggagtacagtggcataatcttggctcactgcaacctccgcctcacgggttcaagtgattctcctgcctcagcctcccaaatagctgggactacaagcatgcaccgccatacccggctaatttttgtatttttagtagacatggggtttcaccatattggctaggctggtcctgaactcctggcctcaagccatctgcccatctcccaacgtgctgggattacaggcatgagccaccacatctggccatgttggtaaattttctaggaacagaaataaagggaatgtaatatatgtgaaagtttttagttctgtcagcaagaatttggccagtggacttttacacctctcctgataagtgttgaaaagtttcctgggatgagtagaatttcaggacctatttggataatggaataggaatgggaagcaagacattctagtatgtgtttctccttagaagaaggcttaaagatgagattgccatgaccagaggcttggagtacatatctctgagtgtatgctgtgggaccagctggagaggagaagctggtagtaggacgatctatgctgccttaatgaatgtttttgaaacaggcggtgaaactcctggacacagatattgtcaggctttagaaagagggttttatgataaagtaatgaaagcaggggataacttgaacatcagctcaaggcttggatgaggacattgaaggtagactcttagcaaaccaagtgcttctagtaatgtagttgaagcagtaataatgagaaatgagaagaatgacatgaaagaataagattgaaaataaatatcaattacatatagtttaaaaatacccaattatatttcccatttatatctattttgaatttgttccagtagacaaaccttgatttcatttgtggaataagaatcacaccaaagaatcttaccatttttctttgggagtgttctgcctttgataagctttaatatgtgtcctcctatacaactgcaacccctgttagaaactagtctaccaggtagtgtcatttaagacttttgcctacacatttaatatatgctgtgcttttcatttcacatgagaatgagtttttatgctctccatgaaactattgtccataagtagacatgttggctatgccagtatttttgatgtttagcagaatttcttagttatagagcagtaaggagaatatgaaaagtccttttaacaatgcaaatgagaaaatacaactagtctaccaggtagtgtcattttggatttttgcctacacatttaatatatattgtgcttttcatttacatgagtatgagtttttatggtctctgtgaaactcttgtccataagtagacatgttggctatgccaatatttttgtttttgttttttgctttttgagatggagtctcactccatcgcccaggcttgagtgcagtggtgcaatcttggctcactgcagcctccgcctcccaagttcaagcaattcgcctgcctcagccccccaagtagctgggattacaggcacgcaccaccatgcccggctagtttttgtatttttagtagagatggggtttctccatgttggccaggctggtctcgaactcctgaccccaggggatcgcctcggcctcccaaagtgctgggattataggcatgagccactgcacccagcccatgctagtatttttgatgtttaacagaatttcctagttatagagcagtaaggagaatataaaaggtccttttaacaatgcaaatgaaaaaatacaaagaatgattagagttactgttataaatgtactcctgcatatatttagttcataaaaaatatattgatattaatgggttgcataattgataacaaaagttctaaaatccaatcaaacaaactcgtgtgctgagttaaagttgagtatttctgtcaaaagcctgctcgagggaagagagatcagctattccagggagaccatgctagaagcaygccatcctgctaattcaaacccagttgtatgagcttgcttgtttaaaggtatggatgattctagaataaaacatggacgtgaatcggagaattttctgaatgttcatggttgtaatatctgaaaatgttactgctcatagtaataggaaaatttgagcacagatgatagtgaggggaagatgactagtttttcactgtcttgggaatttaatctgggaggggccaaaagaaagactgaaggagggattttctgggccttccacccaaattttactcattaagtgtctgcatacctatactgtactagactccagatgtggtctctgacactgttcagtggtcactcttgtagggagagagacaataaataagtgaaacgaatatatttattcttaacagttgtgataaatactaggcagaaaagaataggggaggtcacctctgaagaggtgatatttaaacaaactgaaaggatggagagatagctatctaaaactttttggtattaaggaatttttaaatatatacaaatgtagactagtttaatgaacaccaatatatccatcatcagcttcaattattatcagcatttttgccagttttgtttcatatattctcttccctttttccctgggaatattttaaagggaatttcagatattataagacagatagctagtttaaaaggggaaggtggaaggaactgcatttgtaaaaggcttgaagcaaagtacagatacatgctacaacataaacctcgaaaacattacactaagtgaaagaagccaatctcaagagtcacgtatttgtatgataccatttatatgaagtgtccagaatagacaaatctattgagacaaaacggagattagtggtcgcctagggctgagaggttgggggaaaaccaagagtgactgctaatggattaaatggatcaattgtgtgatatgagaattatatttcaaaaaagtcgtgtttctttaaaaaaaggcttgaggcaagaaaaggcttactttgaggaagcctagaatgactgatgcttggtaggtgatggaggagtatgtcttaagatgagtttggaggaaggaaagagaatctgatcttgctggacattagctcctggtaaggattttgaacttggtccaagtacaagaggaaatctttgaagctttaaagcaaggtcaaatgattggatttatgtttttaaaagagcacgtctggttgctgtttggagtgaagtgaaaagagaattgggttgccttgttaggaggtgatgtcaggcatgagatgaggatagttaggatagggtgatggcagtggagttggagagaagtgaacaaattaaagatagatcttggagaatgggatcaacagtagtgtttaacagatggtgtcaggttgctgaattaaccttggagggtaaataagaaggaagactcaaaaatgattttgagattctggctgaagtgattgggtgaattgtaatgccacatattgaaatgggactgggagagaataagtttaaggtagatatcaaaagttcacttgtaaacacattaagtttgtgatgcctaagaaataccagatattaatatgaagtaaatctatttttaggtaagatttctgtgtaataaaagggattctcctgttcctggggatctgaaatcctgccatctagttaaactctctcattatgcaaatgagaccataagtgaaatgttttttgttcaaagtcacctactggacactaggctggaacctatcttgacttctagggaatatgtatgtattttatgagggagtcatgcctcataattcctttttcttaaacccccaaagtgactgattgctgagctacttacaagactaaaatgaaaagagtcaggcttggagtagaagtgctgggccagaggtaccctggagctgctggagtgatggcagaggccttggtgggagctcagaggtgaggtcccagcagctttcacagcatagcttggccaatgggcttttgtttttccatcatttgctgaaggaaagggagccttctggggaggaattatcttggacaagccttccatgcttaactaatgctttgcaagtcttctatttggcacttttcctgcaagcttgtttggttttaagccatctccacattcagagatgatttgtccaattactggaccaaaaactaattatagatagtaattgaaatagatatcagagaaccagaccattggttgaaagccaaatggccaacttgcagcatttgagaaacctttctcctgcttttattgaaatattgaatatacatattttatgtggcagtatcatggtgttctaaagcaggtttatatcctcctcacatagaaatatattttttgataagtaatgtggcttgcttaacacattttggtcttggaaatatttcccttaaaaaaaagaaatatgttagagagatgctagttagtgaagcaagacttctcctggggcacaatttaggtgcagcctcttaaattttcagtttctagtaacacatgtccaggaaataaaattttactgacttctcagggatgatttgttttggagatggatttatgccaatcaaatgaatgcatgaataccatcctcacaagggattactggacaaatcagaataccactgttttctcatggagctggttgcatatggaaataaaatttcagtagctgactgtctactagctcaagagtcaccccttcacaattgcagagtcctgaatttattaacggaatagtccttcaggagcttataataagagcagaggggccagaagcagtggctcatgcctgtaatcccagcactttgggaggctgaggcaggaagatcactagagcccaggagttcaagaccaacctgggcaacctagtgagaccccatctctatattaaaaaaaaaaaaagagagagagagagcagagggaaatagattattttcaagctctggaaataccacgtgaaccattctgtcccctggaggaataatcctacgtagtatgataaagtcctcatatcgcctgtcggtctgcgctgggtaaatactacaagctcttactctaccattctgtcttttaaatcctttctgcagactttttgttctgccagcacttcaggcagtcatgttacagtaaggatgattaggttatagattttgcattccagtgttgagaatatactttccttaacttgattgaacttggatatttcccagggctgcatatacttcacacaaaatatctctttcagtggctgcctgtagcagacaaataatcttcacatcagtgattcttaaacttgagcataggaatcactggggaaatttgtgcaaatacagattttcaagcctgacccccacagattcagattagtagatctgggggttgggttctcagacctatattcttaattattacccacagttagagaaatatcatttatgtgttagttcttagcagtttcatttccaaggccaactttattttattgctaacgtctatcgtactctaaatactaataataagacagaggtttggttttaaaaccttgggaaatttcttaattacccataaccacttaataaaactgtccaaatttttacaactcttgattttgttttctttgccaaagtactctgagctgtggttatgttggccatgcagaaaattctttttgtgccagaatgtcttccacatctgcttcttcactctttcactgctctcgttcaagacttcctcatgtctcatctggacagtcacagatttcttcagactctcacctcatccaccctctccctgagttcaaaatgttggaagtaatagaagttatggtaggattttggttagaggacaacatggtcataggtatcttagagaagtcattctgacaggacagaagatggattatgtgagaatatcatggtctctatggagttagtgtcgttcaaaataagccagtattagagctgggcacagtggctcacacctataatcccaacatgttgggaggcygagacaggcagatcacttgaggtcaggagttcaagaccagcctggccaacacggcgaaaccttgtctctactaaaaatagaaaaataagccaggtgtggtggcacatgcctataatcccagctactggggaggttgaggcaagagaatcctttgaacctgggaggcagaggttgcagtgagccaagattgtgccactgcgcttcagcttgggtgacagagcgagactctgtctcaaaaaaaaaaaaaaaagccagtattagaataaatattaaattcaaaaaatgggaaaataattttccattttgtaatatagaacattaatgcctgaccaaataaaagcaataggaaaagtctcaattttctaggacatggttacatctctgccattctcacacctgtgtattgtgtttcatcatagatttgcagccacatgccttttcacttactgttttccttccctggatgctgcctcacatttaacatttttggtgtgccttttatgtgacctaattagggcaggaagatacagtggtgaacaagattaaattggtcccatcctaatagagtttacaatttaatagggttagggaaagagatactcaataaaaacgcacccaaatggtataatggtccttggggaaagtgttaggaaggaagaatacagggggctgtgtgtggatagaaaagggaatctaacctaatctaaaggcttaggaaagttcaacctgaggaagacttttcagctgagacctgaagaattaataggaattaattaggaaattggagagttgaaaagggtatgtttgttttaggtagagggaacacattgtccttatggctagcagcaaggaggaataatcgaaaatacgaaggaggtctgtgtgattggcagttagtgagcaagaaggagaggcagcaactgtgacgtagaaggggtgtgcagaggccttgcagttcacagttatgtttttgtactttatccaaaaagtaatgggaaatcattgagggctttcaaggatggggtgaggagtgtgcttacatgttcaaattaatgtttgaaaatggtacctttggctgttttgtggagaaagcattgtggggtacgaggtagaagtcagtagactaaayagactatttactctgcttgaattggcaggatttagtgagagatggatttgacgtggagtataagagaaagggagatgtcaaggatgatttctaggtttctggattgaatccagtgtggataatcagcatttttattgagattttagggaatattagagaaggagcaattttggagggaaagatcaagagctgttttgacagtacttgctctgtggcttcttgttcctttacttcagaaactcccactctgacaagattctgctcaaaattgcccwcctgtgaaaatactctaaaaatctctccccgccaatctccaggagggcagtaagttgtgttcttgtgtcacttggtaaagtcttctcttagcacatctctgttttataattatttatgtacttgcctgtctcccccaccagactgtgattcctttggcaaggaagtatcttatttgttcggtgtcactgaaatatgggtgaatatttcctcaagtgttttccactgagttttgtatggtaaagggttcctttaacatctgggtaatgctggagtaagttaatgttttttttttgagacagggcctcactctgtcacccaggctggtgtgcactgatgtggtctcagctcactgcarcctctacctcctggactcaagcgatcctcccacctcagcttccccagtagctggaactacagatgtgcatcaccatgcccggctaatttttgtattttttgtagagacagagtttcaccatgtttcccaggctggtcttgaactcctggactcaagtgatccacctgcctcggcctcccaaagtgctgggactatgggcatgagccaccatgcctggccagttaatgtttctttactgtagaacttttcgtagccttttattttctgaggtggaaaagcataacgtacgcattattttcccagattatttcatttccccttccccagctctcgttttctgagtatctaatgttactagtgttgaaggtaagaggtgggtttgggaacactcactgggaaatgctgatttgcgcatgtgcctgacactgagtaggcatgtaattcactgagtgtgggctatggaataaagcaaacctgtcagctctaggagaacgtcactggatgtctttggaaagctctttttgcctatagttgctgcaaatctatttctttcacccccagtgatcaaaacaaacatcaagggatgagaatttactgtctattgtttgttgctgccaggctaaaaaagatgggtggcatgagatgacagattttgttctgtttctttatagctaagctggggaaaactgaacaaaaaattatttggtcttcttatttaactcctagcattaaaacagtgtcttttttacactacctgggttgttcacaaaataaccagagttatattaataactttaacttttttgtaaaagaaatacatgttcagtatttttctaagggctatttatattctgttttagagttggctgttgtgacacaaaaacctaggtttcagggaaataaagatagtatagactaaatggggaagacactgctcttttttttttttaagagtatattaatttattttagaggggaattttccttttttcccccaaaagttagagtactctaatggttcatttttagagtggaacctagtggaaagttttgctaggaagtcactgactcaaacaggaaatatatttgattttaaatttagattttattttgtaatgccaaatgacattattgtgttatatttactgctggtaaatttactgctgactctaactgctggtatctttcttatagtcatgtggattgggtagatacttttgctctacaaactttatttggctatagaattaatgaaaataattcttttttcatttcttttcgtatattttttgagtgatataaaatgtagcctagattagtagggttaagggtttcataaccacatccacatttatactcccacatcttaagttatgtgttttcatttacttaccctgtcctttattattgcgtatgtttatttccaaattagagtagcttggaatgacaaggaaaacttgatgatctttagttccactattagaaaagaagttatcagcctctgtcaccagttttgtattcccttggctatcaggaccactctttagaactaaacctctgagattaccataaagagcagataaaaatctgtggatagagattactttgtccatttattttaagaaatgactaaagaaagaaaaaaacatagctgctgaatatactcctagtagctatgatagagactgaatgagtaaaatgcagtgattttttagcaaggaaaccactgaaattttgatgcttttttttttttttttgagactgagttttactcttgttgctcaggctggagtgcaatggcacgatcttggctcactgcatcctccacctcccgggttcgggttcaagcgattctcctgcctcagcctcctgagtagctgggattacatgcatgcaccaccatgtccggctaatttttgtatttttagtagagacggggttttgccatgttagccaggctggcctcgaactcctgacctcaggtgatgcgcccacctcagcctcccaaagtgctgggattacaggcatgagcctccatgcccacctggatgattctttttctttagttagcaatctggtcatcccaaggctgtgcctacccttacacaaaaatgatgataaaaagttatctggtaatattcagtcctgttaatcttggaaaagccacagctcaggacacctttttttttgtatgcttctctctgcacttcgggcttctaatagagcatttattgtcctagaaaatcattttaattatagaaactcccacatttgtttcaggtcgatcttctctctttccctttgaagatgccttcctggatgayagccatggtgatcaagccttgtcatctggcttaagttctcccactcgctgtcaaaatggggaacgagtagaacgctactctagaaaggtgtttgttggaggacttcctcctgatattgatgaaggtactatgcattcattaatgattttgcaaaggctgagtttgttatttgtgtgttctgaccctgcctctcctctccaagtcaactttaggacatctatatcttagtgcataggaggtgagactatttggtggattagaaagtggtagtctattattgtactaagtacttcatgttacattatctcatttaatcctcatagctatctaataaggatatcctagcatctccattttatagataaggaaactgaggatcagagagaaataatttgttcagggttatatagctgatggtgcagttgcaactcaaattcaattagattccagagcttctgctcatgtgcatcacaccaaaccatctcacattttaatataaatactggccagtgcagtggttcacacccgtaatcccagtactttgggaggccaagatgggaggattacttgagcccaggggttcaagaccagcctgggcaacatagcaagaccctgtctctacaaaacaagattagccgggtatggtggtatgtgcctgtactcccagctacttgggaggctgaggtgggagatcacttgagcccaggagtttgaggttacagtgagctatgatcataccactgaactccagcctggatgacagagtgagaccctgtctcataagtaaataaataaataaaaacaaatacctattaacaaaaagcataatccacctctttaaaagaatgaagatgaattagaatttttcttaataatagttttgagatgctatcagtccaaaagtgagtgttcacttatgcctaaagccagtttattttagcacacggtaagttgtcaataaatatttgttgaaaggatgaatgaaataaaattgtgacaaagttaacttaagcaaaaaacaactctagttccagtaggctttgggtctgatataaaaatactgtctgatattctaacagtcttgtttttctagcatttttctagctatgacacacttcaaatttatcatgatttccttttttcatggtgacaggagaaaagtctcaaaaagtggttttattttagactaactacattaaagttatacatagctgaatgcttattttcctccaaattgttcttgtattcatgttaatctcatctattgattagattatcttcaagacaatttttaagatcatggctgagagagtggtaccctaaacctgagtaggagccaggttataacctctgctttgagtcatatgtcagagggaaaatataaatgtattgatctataatttttgatatattttctatatagggtacgtaatatgtagttattaaagagaacattggccatcaacattttcttatcacccaatagaattacctacttattgcccctactccttaccaaaagaatcgtatctatttcttaaataatcttagaggttcctacaagtgaaaccatattttaaatattttctgtaccttactttcttactaaaatcagagaacattcctatttttagaatctttctatttgacatagaagtcaccttagtttaatatgagatacttttcttccaaattctttatgtcaagtttattggcagtgaaaggaaatgaattatagttagaaacacactttgcatgattaaaagtgaataaccaaatgtacacccaagcaatggtatttcacttagtaggtttcacttccgtaaagatgctatagaaaacaaccctcaaaacatttttttaaactaaaaagacatgttttgtgctcttctggttttctgattgcaatatttttttctcttttgctaagattctttctttgttttgtagatgagatcactgccagctttcgcaggtttggacctctcgtagtagactggcctcacaaagctgaaagcaagtcttattttcctcctaaaggtaatgctcttaaaatgtttccactgcttgcctgttggagagatagcatgacagttcaataaaaggcagccttttaactcttgaaatagctgttgaattttttcccccaattaggaaaacattttaatgttgatcatccttttgtgtattatgtttccacttagagactcttcccctgaagcacactgattgtttcatggcaccgattttattgacagtgagaccctggaagtctgttgtggatgagcctcctgctaattttcattattttgaaaggaaagatctagggttttgaggaatgtcagcaatggtaaaggaaaagattatttagggtcagattttatttgtattccatagccctgtggttttatagatcttgtaaaccccaaacctgggaaacctagtggctaaagaatggcattgtacaaaattatctttatccacatctgtatattaagtgacttagcctgtttgggagcagagggcaaactagcaaaagacactccatatgaccttgcttccctgatttttggggaggctcatttgataatwtatgagtgcatgaaaatatattgctttgttcatagtttgtcatttctgcagaatctagggaactttactggtgatattcatttgggtgtgttcctagatttatatagaagaatgttttgggttaaaggttttgtttgtgttacattctgtagatatgcttcaaggatacatttcatttcagaaaaatggctttttgatacgtattattgtgtaatattactcagcacaaaaagatgaagtgaaaatacttgtccttcctgtgcctcataaatgaatcaaattatagcttaacctgaggaaggcaagtggcttccttttatgtccggtttgttaggtttcattgtcagttgtacttctccaattctcactctcttcataacccacaaaaataagttaatatagagggctgttgcttgttctttgttttttttttttttgtttttatttgtttttttttttgagacggagtctcactctgtcgcccaggctggagtgcagtggcgtgatctcggctcactgcaagctccgcctcctggattcacgccattctcctgcctcagcctcccgagtagctgggactacaggctcctgccgccacgcccggctcattttttgtatttttagtagagacagggtttcaccgtgttagccaggatggtctcgctctcctgacctcgtgatccgcctgccttggcctcccaaagtgctgggattacaggcgtgagccaccatgcccggcctttttttttttggtatgttttcttatcaattatttattataaccatatgaataattccagttattatttttatttcaataactattattattattttttattattattatactttaagttttagggtacatgtgcacaatgtgcaggttagttacatatgtatacatgtgccatgctggtgtgctgcacccattaactcatcatttagcaataggtatatctcctaatgctatccctcccccatccccccaccccacaacagtccccagagtgtgatgttccccttcctgtgtccatgtgttctcattgttcaattcccacctatgagtgagaacatgcagtgtttggttttttgtccttgtgatagtttgctgagaatgatgatttccaatttcatccatgtccctacaaaggacatgaactcatccttttttatggctgcatagtattccatggtgtatatgtgccacattttcttaatccagtctatcattgtcggacatttgggttggttccaagtctttgctattgtgaatagtgccgcaataaacataygtgtgcatgtgtctttatagcagcatgatttatagtcctttgggtatatacccagtaatgggatggctgggtcaaatggtatttctagttctagatccctgaggaatcgccacactgacttccacaatggttgaactagtttacagtcccaccaacagtgtaaaagtgttcctatttctccacatcctctccagcacctgttgtttcctgactttttaatgattgccattctaactggtgtgagatggtatctcattgtggttttgatttgcatttctctgatggccagtgatggtgagcattttttcatgtgttttttggctgcataaatgtcttcttttgagaartgtctgttcatgtccttcgcccactttttgatggggttgtttgtttttttcttgtaaatttgtttgagttcattgtagattctggatattagccctttgtcagatgagtaggttgcaaaaattttctcccattttgtaggttgcctgttcactctgatggtagtttcttttgctgtgcagaagctctttagtttaattagatcccatttgtcaattttggcttttgttgccattgcttttgctgttttagacatgaagtccttgcccatgcctatgtcctgaatggtaatgcctaggttttcttctagggtttttatggttttaggtctgatgtttaagtctttaatccatcttgaattaatttttgtataaggtgtaaggaagggatccagtttcagctttctacatatggctagccagttttcccagcaccatttattaaatagggaatcctttcccccttgcttgtttttgtcaggtttgtaagatcagatagttgtagatatgcggcattatttctgaggcctctgttctgttccattgatctatatctctgttttggtcccagtaccatgctgttttggttactgtagccttgtagtatagtttgaagtcaggtagtgtgatgcctccagctttgttcttttggctttggattgacttggcgatgtgggctcttttttggttccatatgaactttaaagtagttttttcyaattctgtgaagaaagtcattggtagcttgatttttttttttttttttgagacagagtctcactctgttgcccaggctggagtgcaatggtgtgatctcggcttctgcaacctccacctcccgggttcaagcaattctcctgcctcagcctcctgagtagctgggactacaggcttgtgccaccatacccggctaatttttgtaattttagtagagacaggttttcaccatattggccaggctggtcttgaactcctgacctcatgatcctcctgccttggcctcccaaagtgstgggattacaggtgtgagccaccatgcccagctgagatattttgatataggcatacagtatgtaataatcacatcagggtaaatggggtattcatcacctcaagcatttatcatttctttgtgttataaacattccaattatactttagttatttaaaaatatacagtagattattgttgattgtagtcaccctgttgtactatcaaagacaagatcttattcattccatctaattatgtttttgtacctattaaccatgcccacttttacccacccacccccaccttctttccagcctctggtaacttacatcattctattttctgtcatcatgagttcaattgtttggatttttagttctcacaaatgcatgagacaatgggaagtttgtctttctgtgcctggcttatttttcttatcataatgtcctccagttccatccatgttgttgcagatgacaggactcttttttttcgtggctgaatactactccactgtgtatatgtaccacatattcttttttttttttttttttatgtgtgtgtgtgagatggagtttcactcttgttgtctaagctggagtgcaatggcacaatcttggctcacytcaacctccacctctgggattcaagagattctcctgcctcagcctcccgagtagctgggattacaggcctgtgccatcatgcctggctaattttgcatttttagtagagatggggtttcttcatgttggtcaggctggtctcgaactcccaacctcaggtgatccacctgcctcggcctcccagagtgctggaattacaggcgtgagccaccgtgcctggtcacataccacatattctttatccattygtctgttgatgaatggataaaggttgtttccaaatcctggctattgtgaatagtgctgcaacaaacatgggagtacaggtatctctttgatatactgatttcctttcttttggttatatatacctagcagtatgattgatggatcatatggtagctctatttttagttttttgaggaacctccatgctgttctccatagtggctatactaatttatattctcaccaacagcgtacaagtgttcccttttctccacatcctcaccagcatttcttatagcctgtcttttggataaaaaccattttaactgtggtgagatgatatcacattgtagttttgatttgcctttcgctgacaatcagtaatattgagcaccttttcatatatctgtttgccatttgtatrttgtcttttgagaaatgcctattcagatctttcaccctcccttttttttttttttttgcctcaaaaagtgacgtttattcaaggaaaaaaattacaagatgtccatcccttggctctctttccttccgcctcctgctgctcctcagtttcccaagaatgaatcctggctggggctaggtagcaggatagcccctcagatgaggtcagcaacattgagggccatcacctcaatsgaggtgttgtataaggtctcagtttcttaaagagtcctcttgtcttcttctgttaccatgttaatagccacacccttatggccaaaccatccacctcgaccaattctgtggatacaggtgggaaggtcacagttgataactgaagaaacctgctgcacatgaatgcctctggctgcgggtcagtggtaatcaatactctgtgagagccagaacaaaactccctcatgatcacatttcattcttttgttccatatctccatgcatggcagagacagtgaagtcccaagcatgcatcttctcagtgagccaatccactttcttctttttttttttgagacagagtcttgctctgtcacccaggctggagtgcagttgtgcgatctcggctcactgcaagctcctcctcccgggttcatgccattctcctgcctcagcctcccagtagctgggactacaggcacttgccaccatgcccggctaatttctttttgtatttttagtagagatggggtttcaccatgtaagccaggatggtctggctctcctgaccttgtgatccgcccaccttggcctcccaaagtgctgggattacaggcgtgagccactgcacccagccgagccaatccaccttctttccagtattgatgaagatgactgcctagggtgacaatcagggtttcatacaagccacacagtgtgctcagtttccactcctcatgttccacattgatgtagaattggtggaccccctccagggtcaactcttccttcttgacaggaatccaaatggggtcccttatgaacttcttggtcacctcaagcacatcagaaggccttgtggctgatagcaaaaccacctgggtgttgctgttgagcttttggaatatgtcatagattgagtccttgaatccatggcttaacatttcatcagcttcgtccagtacaaacatcttgatgtatttgggagacaggtatctctggttaagcatatcagatatatggccaggggtacccacgatgatatggggaacttccatctgtagtttctgcacctcagcatgcacgttggtgcccccaatacagccatgacaggaggcacccatgtagtctcctagtgtcatgaccaccttttctatcttttgagccaattatcaagtggatgctgggaccaaggtgtgggtagcctttagatctaattcaatctactgcagaattgatatggcaaaagtggccattttcccagtcccagatagggcttgagtgatcacatcataatccttgatacaagaagaatggctcgctgctggatggcagaggacttctcaaaaccataggcatagatgccatggaggagggattccaagaggttcatatcatcaaaactgtcaacaatctcatttcagtttctctcaatgatgccttcaggctccatctcatcgggaccattgtctctggatcagaaatactcactcttggccgggcgcggtggctcacrcttataatcccagcactttgagaggctgaggcgggcagatcacgaggtcaggagttcgagaccagcctggccaacatggtgaaaccccatctctactaaaaatacaaaaattagctgggcgtggtagcccatgcctgtaatcccagctactcaggaggctgaggcaggagaatcacttgaatctggggggcagagtttacagtgagccgagatcatgccactgcactccagcctgggtgacagagcaagactccgccttagaaaaaaaaagaagaaatactcactctcagacatgatccttagaaactctcttttgcccgtttttaaatcagattattagttttttttcctattgagttgtttgagctctttatatattgttattaatcccttgttagattgacagtttgtaactattttctcccattctgtgggttgtctcttcactttgttgactgtttcctttgctgtgcagaagctttttaacttgatgtgatcccatttgtccattttgctttggttgcctttgcttgtggggtattactcaagaaatctttgtgcccagaccaatgtcttggagattttccccagtgtttttgtttgtttgtttgtttgtcttagtatttcttttagtagtttcatagtttgaggtcttaatttgaagttttttttttattattatactttaagttctagggtacatgtgcataatgtgaaggtttgttacataggtatacatgtgccatgttggtttgctgcacccattaactcatcatttacaataggtatttctcctaatgctatccctccccctgccccccaccccatgacaggcccctggatgtgatgttccctgccctgtgtccaagtgttctcattgttcaattcccacctatgagtgagaacatgcagtgtttggttttctatcctcgtgatagtttgctcagaatgatggtttccagctgcatccatgtccctacaaaggacatgaactcatccttttttatggctacatagtattccatggtgtatatgtgccacattttcttaatccagtctatcattgatggacattttggttggctccaagtctttgctattgtgaatagtgccacaataaacatacgtatgcatgtgtctttatagtagcatgatttataatcctttgggcatttatctagtaatgggatcactgggtcaaatggtatttctagttctagatccttgaggaattgccacactgtcttccacaatggttgaactagtttacactcccactaacagtataaaagcattcctatttctccacatcctctccagcatctgttgtttcctgacattttaatgattgccattctaactggcgtgagatggtatctcattgtggttttgatttgcatttctctgatgaccagcgatgatgagcattttttcatgtgtctgttggctgcataaatgtcttcttttgagaagtgcgtattcatatcctttgcccactttttattggggttgtttttctcttgtaaatttgtttaagttctttgtagattctggatatgagccctttgtcagatggacagattgcaaaaattttctcctattctgtaggttacctgctcactctgatggtagtttcttttgctgtgcagaagctctttagtttaattagatctgatttgtctattttggcttttgttgccattgcttttggtgttttagtcatgacgtccttgcccatgcctatgtcctgaatggtatttcctaggttttctcctagggtttttatggttttaggtctaacatttaagtctttaatccatcttgaattaatttttgtataagttgtaaggaagggatccagtttcagctttctacatatggctagccagttttcccagcaccatttattaaatagggaatcctttccccattttttgtttttgtcaggtttgtcaaagatcagatggttgtagatgtgtggtgttgtttctgaggcctctgttctattccattggtctatatatctgttttggtcccagtaccatgctgttttggttactgtagccttgtagtatagtttgaagtcaggtagcatgatgcctccagctttgttcttgttgcctagaattgtcttggcaatgcgggctcttttttgtttccatatgaactttaaagtagttttttccaattctgtgaagaaagtcattggtagcttgatggggatggcactgaatctataaattaccttgggcagtatggccattttcacaatattgattcttcctatccatgagtatggaatgttcttccatttgtttgtatcctcttttatttcattgagcagtggtttgtagttctccttgaagaggtccttcacatcccttgtaagttggattcctaggtattttattctctttgaagcagttgtgaatgggagttcactcatgatttggctgtttgtctgatattggtatataggaacgcttgtgatttttgcatattgattttgtatcctgagactttgctgaagttgcttatcagcttaaggagattttgggctgagatgatggggttttctaaatatacaatgatgtcatctgcaaacagggacaatttgacttcctcttttcctaattgaataccctttatttctttctcttgcctgattgccctggccagaacttctaacactatgttgaataggagtggtgagagagggcattcttgtcttgtgccagttttcaaagggaatgcttccagtttttcccattcagtatgatattggctgtgggtttgtcgtaaatagctcttattattttgagatatgttccatcaatacctaatttattgagagtttttagcatgaagrgctgctgaattttgtcaaaggcctttcctgcatctattgagataatcgtggtttttttgttgttgttggttctgtttatgtgatggattatgtttattgatttgcaatgttgaaccagctttgcatcccagggatgaagccaacttgatcatggtggataagctttttcatgtgctgctggattcagtttgccagtattttattgaggattttcgcatccatattcgtcagggatattggtctaaaattctctttttttgttgtgtctctgccaggctttggtatcaggatgatgctgtcctcataaaatgagttagggaggattccctctttttctattgattggaatcgttttagaaggaatggtaccagctcttctttgtacctctggtagaatttggctgtgaatccatctggtcctggactttttttggtaggctattaattattgcctcaatttcagagcctgttattggtgtattcagagattcagcttcttcctggtttagtcttgggagggtgtatgtgtccaggaatttacccatttcttctacattttctagtttatttgtgtagaggtgtttatagtattctttgatggtagtttgtatttctgtgggatcggtggtgatatcccctttatcattttttattgcgtctatttgattcttctctcttttcttctttattagtcttgctagcagtctatcaattttgttgatcttttcagaaaaccagctcctggattcattgatttttttgaagggttttttgtgtctctatctcctttagttctgctctgatcttagttatttcttgccttctgctagcttttgaatttgtttgctcttgcttctctagttcttttaattgtgatgttagggtgttgattttagatctttcctgctttctcttgggggcatttagtgctacaaatttccctctacagactgctttaaatgtgtcccagagattctggtacattgtgtctttgttctcattggtttcaaagaacgtctttatttctgccttcatttcgttatttacccaatagtcattcaggagcaggttgttcagttttcatgtagttgtgtggttttgagtgagtttcttaatcctgagttctaatttgattgcactgtggtctgagagacagtttattgtgatttctgttctttcacatttgctgaggagtgctttacttccaactatgttgtcaattttggaatgagtgtgatgtggcgctgacaagaacgtatgttctgttgatttggggtggagagttctgtagacgtctattagttctgcttggtgcagagccgagtttaagtcctggatatccttgttaaccttcttaaccttcccccatttgtcatttactttttgaccctctttaatgtttttttgtagtactaacataaatttttatataggtaaatttattaatgtcttctttgtgttttctgaatatttatgacatgccttaaaagatttttcccgctgcaagacaataagaaaatactacacatgttgttttctttttgttgttgttgcttgtattactttacttttkacattgacatcttgttttggtctggaatttatattggagtaaggcatgagaaaggatccagctttattttttcaggtagcttgacagatcccccagttttgtttataggctggctagtccaattttttcctcatcgatttgcgttcttagaattgaatattgattgggaggtcatctcttctgtttctcaagaaatgcacagtttatctagaactacttgctgcagtatgtagctaatgagcacttgaaatgtgactagtttgacttgagatatggttttacgtgtaaatatacactgcattttaaaggcttagttttgttttaaatgtagagaatctcattaataattttgtttgcatgttaaaataactttatggagatattggattaaataagatattaaaattaacttcacytgtttctttttaccttttaaaatacagatactggaaaaattttaattacatatgtgagtcatattacatttctgttagacagtgcttctctagaacaagggtcaacaaactacctgtttttgtatgacctgtgagcttaaggattttttttacatctttaaggaattatatgtggcacacacatctctttacagaaaacgtatgttgactcctgctccaaaatggcccacagaattgctcattttgctttgagacatccggtgacaagggaggcagtttatttcagaagtctttatatttgtagscctagttagttattacatgtttccctctattgtgtcaaatgcttccctgcaatctttactccttagtcaacgatgtcttataaagtaagacagaataagtcatcattgtgacatctaactctaggtacttaaaggactatcagtttctctttccaagctaaatatttttattttctcacttatatgttatgtctaatagttgctggatcagcattcttcttttctgccttcttcgtgtatatgccatattttacaacatcctacttaaattgttaactgagaattgaagagaatgttagggttggtcagagcagtacggagtttagcacctctacagcctccatagatagctcttggtacactccaaaataacagcattaaatatagaactatagtacattagtgctggtgccctcattttatagctgaggttaggtgttgagatggaccagtgagagctatgccaagaagagaatctaatctcctgattctggtcctcaggcttgcatcctcagagagcagattgccttcttggtgattggggtcagggaagagaaataattattagactattggctcctgttgtgttttgctctcagctaaagtctgaaggttgatgacctatttgggcagagcctaaagatatttgatgttattccaatgttaagaatatctacattgttcacctcaaactgttcaatgccttcttaataataccccctcttgctgataataatttttcttaggtcacctcacattggccattaggtaaagtttgtttagctgtattaggcttgtgtgtaactagaaaggaaaacatgaaccatccactattcagccctttagcctttctcagatagtgtatacatagtgaaatagaatcatctgttcatgcagcaagtttaccttggtgcagatttgaagtagggtttgtaaaagcatgaccattttcagtggattgttaagagcttaaaatccacatagatagacctcagttggtggcaaaaaaaaaaaaaaaaagccacatagggaaagaatggccaggtggccagatacatggactgtctcgttgcatgtttttgagctagcagagtgggaggccatgcagacttcagctctttcagcacaagggccattaagacatttaatgacccattgaggatatacagagccttatggatcagtttgtctgtggaccacaagtaaggaaatggttgcccttagaacaccactgagaccatggaaggcgaaggaaggcataaaagtcacaatgtttgttttcatgacttggtcctggacctcacaaacttatagtcctatgggggagataagaaattaatcagatagtcacaaaagtaaacatgattacaaactgataagttctctgaaggaaaaatagagtgcagtagagactctaaaaagggggcatcagtttagattgggagtatggagagagcttgtttgagaaaatggcatttaagcagacctgaaaattgaggagttagctagaacatgtagggaagcaaattccaagcagaggactatcatgcagggagaactaagtatgaaaaaaaggcttcagtgcctttggagaaatgaaggaagtgtggctgtaatttgttttttgtttgtttgtttggagacagggccacactctgtcacccaggctagagtgcagtagtacaatcatggctcactgcagccttgacttccagggctcaagcagtcctcctgccttagcctcctaagtagctgcactcactaccatgcctggcttattttttatttttattttttgtggagacagagtcttgctctgttgcctgggctgttctcaaactcctgggctcaagcgatgctctcacttcagcctcccaaagtgttgggattacaggcgtgagctaccatgcgcaacagggatgttgtgaggtagaagaaaaatgaaagagccttgaaggattttttttctcctaaattgatctagtctcccagagagagtagatatgaaggccctcttgtcagttatatgatcccagtattttctattgttattctaattgtagaccttggtattataatgaagtagtagaaccagaacaaagcaatctggttctctttgaacatgttattttataaacaataagaataatcccaacagaacagcagaaccatcccagcagaaccaaccatcatttttctatctccttccagtctttttgttatgtaggtcataggggtttgttatacagattatttggtcacccaggtattaagcctagtgcccattagttatttttcctgatcctctccctcctcccaccctccaccctccgataggccccagtgtctattgtgtctgttgttcccctctatgtgtccatgtgttctcatcatttagctcccatgtataagtgagaacatgtggtatttggttttctgttcactactttgctaaggataatagcctccagctccatctgtgttcctgcaaaggacataatcttgttctttttaatgattgcgtactattccatggtatatatgtaccacgttttctttatccagtctaccattgataggcatttaggttgattccatgtctttgctattgtgaatagtgctgcagtgaacacacatgtgcatgtgtctttatgatagaacgatttatgttcctttgagtatatacccagtaatgggtttgctggctcaaatggtagttgtttttaggtctttgaggaattgccacactgttttccacaatggctgaactaatttacactcccaccagcagtgtataagcgttcctttttctgtgcaacctcaccagcacctgttattttttgactttttagtaagccattctgactagtgtgaggtggtatcttattgtgattttgatttgcatttctctaatgatcagcgatattgagctttttttcatgtttgttggctgcatgtgtgtcttatgaaaagtgtctgttcatgtcctttgcccactttttaatgaaactatttatttttttcttataaatttgttgaagttccttacagatgctggatattagacctttgtcaaatgcatagtttgcaaaaattttctctcactctgtaggttgtctgttcactcttttgatagtttcttttgctatgcagaagctcttcagtttaattagttaccaattttcatatttttaaagaggccacctttcaaggagtttgtaccataactgacttgctttttggtcatctaggccaagcttatccaatctgttgcccacaggccacatgcagctcaggaaaaatttgtatactttcttaaaacattatgttttttatttttgccatttctttttagcctatcagctatcagtgttactataytgtatgtgtggcccaagacaattcttcttcaagtgtggcccagggaagccaaaagattggatacttctgaagggttattagaagtaatgcttctcttggtatatttttgtacatggccttctctttcagattattttctgtaggataaattttgtgaaggttacttaaccacagttaaaataaatgaaaatattaatgactccagatttgctattatatggcttcccaaagcaattttctgtatgaagttttagctaatttggacatctgtatcaaatgttgtgcttagtttcaagtcagataaatggtacattgtggttgtgaacttacctttttgcttctgtgtttggtgtatagtgcacccctgaagaacccaggggccacattggtatgagtcttgtacttgaagtgttttaagtcttttcctcttaggtctcatctgttgaattttgggtgttttctaacattagctcctatcattctctcccttacccactatggccacactgactactttgctattctttggacaagacaactgaggcctctggggggccttagtacttccttttttctgaagccctcttcccccatttcttttttgtttgttcattttgagacagagtctcgctttgttgcccaggctggagtgcaatggcacagtcttggcctactgcaacctccacctcctaggctcaagctattctcatgcctcagcctcccaagtagctgggattacagctgtgtgctaccacacctggctgatttttaggattttttagtagagatgggggtctcaccatattgcccaggctggtcgtgaactcttgacctcaggtgatccacctgcctcggtctcccaaagtgctagatttacagtcgtgagccaccacaccaggccttcccccacatttctaaatggagcactttctcacttagacactgctcaaatgtctagcccctgtatcctctttttctgtattcctcttactcgcattttctgtctacttacttatttagttagtagagatggggtccaggctggtcttgaactcttggcttcaagcaatcctcctgccttggcctcccaaaatgctrggattacagatgtaagtcaccgtgcctggccaatttatttcttttttaccctcattttatttttctttaaaatgcttattatgacctgaaaaattagatgtgtttttctgactttttttccagactgcaatgtaagttttatgagtgcagggaatttttttatattttgttcactgctcaataccaagtactttgcatacttggctcaatgaccttcaggtatctattagatgaatgaattgtatcctggcaaatgatgagttcattacttgatcagagaatagaacccaccacattttagaggtggaaagttccttaaagattatctcattctagtgcaacctttattttaaactgagactgaaagaggtgaagtatcttttcataagaacacacagcttttgttagacagacttgaacctgacagaccaatagtttatactattttacctggtggataataaagttatttttatttgttttgctcctctgtatgattggtggaaaaggaggacaggtttaagctatataatctgatagataatgctgttatttacaaggctggattttatattaaaattagcatcttaagctatatgacccaaggtacattttaacatttgaaaacgaaagtggtccttggctttttcctgagcctttgtattctgtttgtcatactcacatagctggagtatttccaaagaggtggtttagactggggctgtaggtctgagctgccctttagccataacttaaccatggaattctgcctcgtggatgatgccacactatttctggacatgggtgaactgcttggtagttgagttatttgactgcaaggataagttcttttgtgctacctcaaatcaggggtgtggttatgagtaacaaggggagtccaagaacaggagctataatataaccaggtatcatggaggctgtactagggtgtgtggcaagctgcagggatttgaacagtggaagttactaattatccattgtaatctcccaccattgtcatgactcagtttgtatagttttcatatttctagttgaattccagagagagggaatttgattgacccagttcattttttaacacctagctgtgacataggtcatcctaatgatagggccctagaatccttgactacttagtaaaagaagttctagggccaggtgtggtggttcatgcctgtaatctaagtacttttggaggccgaggcaggtagaacacttgagcccaggagttcaagaccagtctgggcaacatggtgaaacgccatctctgcaaaaaatacaaaaattagctgggcatggtgacatatgcctgtagtcccagctacttgggaggctgcggtgggaggatcacctgagcctggggaggtaaaggctgcagtaagccgagattgtgccacactacactccagcctgggcaaccgagtgagaccctgtcttaaaaaaaaaaaaaagtctgtttcctttagcatgtagctgtgaatgtggccactaggaagataagatggacatgacaagcttgatgatagatagcataacctccctcattgcccactgggaaaatattccatctccaaagttgctgtcactggagctaccaaaaaatgcctgtccaccctgagccttctaccccttgttctgcactaacagctgatcctgatactgcaatagcctcacctctcatagtgggacagagaatatgggcccagggaaaggagctggcatctgctgtgcaatgagcacagctgtgctaccactgttgaggcctcttgggcaaaggcaatgatggcagccagctacagatgttgtacatgagtttggccatctggctctgaaactgatttcagaagccaatgatgctggcagtggaatggaggaagctgtcattctcagcttacttgggcagcttacagtgtcagcttcagcagtctaggggcacagggtccaggtgaacagaaatagtaataggcacacagctttatacaagagtgaccaaacccttgtgcactaatgattcccacccacttttagaaaagtttgtattcctggatggctatttctgctggtgattctatacgtcctctgcactggctaggctggcttgccctctggtgctcttaaccaaggtcatgtagttgtggaagtttatgcaataccagcatggtttgtgaacctggcacaagccaggccacatactattcagtttgaacacaagccagctagctaaggagatcctgcttgaggaacaaggaagaggaatctactttgagtgggcaaaaacaggccattgtggagctgcagtgggctgcagtgtagcatttatttctttttccttcaacttgtctaaatctggctttggaaaggaaagttttcaaacttcacattttttcccttgtagcataacttgaatggaaataagtcagtgttattttaggccagattccaagtttttccaccttctgagttacgtaaactgatcaagttgggaagccaagggttttagcctgtatttaaccttttgcagttcgtcatcttttgagtaacattctgtcttcctttaagaaaaaaaaaaatcaggtcctggcttatagtgctcacactgtttggtgatttatgaaccctatattttaatattttacttgattgtgattttcatacccaggaaggattttcttgtaaaaacatggaaactgcattgtgtgatagcaagggtgggctttttgttttgttttgttctgttttgacagatggagtccatctatctttgcttttaaaagcttagcacactctcagtttacacttttataaacacttgtctcttcagcattgtattgaagatgaactataaagttagtctttgctttcaaagcatttacagtttgagggactgtacagaaagaagtcattaggaatatatagtccacaggacaaagcttgagcagccacgtaaataacagaaacatcttgttcaaggtcacctaagtacacactgtgctatgaccaggcagaggtgatgggatggggggaaatgcttgtttagttcagagaagtcataactcctcctgatgagaacttttattgaggaaaaaatagactttaggaactgaaatggaaggtggaaatttggcagactgaggcagagaggatgttttagaagaggatatagcttgggttgggacttgctgacagtagttagatagggctaaggctgtgagcaggtgagaccaacagaggatatgttaattgcagagttaggaatgggaagccagctaggagggtctggtgaaattttttgaaaactgagagcaaagacctgggttgtctttcaaaggagaatggacccacttcagtcttgagaagactggcacagaaaaaaactcatttgaaacagcattaagaactgatcagaggaatgttaaagtccagggaggcgaagaaattaagactatcaaagctcaggcagtatatgcacaaggccagactaaagcttcatctgtctgtaggagagcatcacctggattgaaacagagttccccagttgtttgctgackragggagtgtaacaggcagtggggcataagctaggtttgtggactcagatgtgggcatcagcatttactagctatatgacattgagcaagtaatttaacctttaagcctcagtttacttatctgagttaatactactcgttgggttgttaagaggattatgtgaggcagtgtgtgaaagcactaacacaatacttaggcttattaggtgttgaataatcttagcgtccttggtccttgcctgtgacttaaatgtaatgctcagtaatcataaaattacccaacgagtttgaccagttctctcccacacccccagtctggtctcagtttccttggtcaggtgcttgtttgaactgactgtgactagaactgacagattggcagacttcacaaggacctctttatatagggaatgtgtgattatgtaaacagcagattttaagtccaaatgccccaggtcactgccctggactgcaagactttgctaagaacacaggaagtagattaccaattttgaactctgaggtggttctacgctgccggcttgttttcttgtccattcccaactattcccacccctgctgccaagcaaccaacccacaaagaaagttggtagtgtcgtagaaaacacaaaacaggctagaatcaagtctcagcctcacacagtaaatattgttaaagaaatatgtttagttctgaatctaagcagagtgtttaggaatccgtgcacttaggcagtatctatctgcagagctacctctacattttaacttaggttagttgtttcccttggaatgtcttctccgtgttttcaatgttttcacctatgttgtaccattaaggtctggcccctgtgccaccacctacagaaagcctttcctgatttctctattcatgtcttctctgaaagtgatctttcttctttctgtgaagtccaacttttwaaaatatgtttacaaaaatacttcttaggatcattaatgcattgttcctaagtcagagttctctgtgaatttattctatacaatcttctagtgctagtatataaactccttaagaacaagaatttgctcatgatagtagtcccctgcagtgtgtagattacataagtgttgagtaaatcttggagatcaggtatcctcattcaagaggaaaatgaataagagatccagttcagagacctacagtgagtgctctccgctgcaggcagggattgatgagctgcttcaactcttaccacccaccactctcaatcctatactctaactaatgaactctgctcaccgttgtccaagtgagttgaccctttggcctttccatgccgtggcctgtgcaccttcctgaacttggaatgcctttactctctggaaaagtaatcagcctctgggtcagatatggcctttgctctttggtgttccctgatgtttggacaaatctgctccctttttttctccccagtgtcctgtaggasatacctccaacatagtgcttttaatgttgcttattagttattgacagtctgattttttctggatcagggttcttctttggcttgttcatctttgcaacctcagtacttagcatcatacctggcatctcctagatgtttttggtamccttgaattgaatccaaaaaaagtctcctgaggcaaaccagataagtcctctgacctgaaagccaragtcagagagaatgtttgggacagactgcctgtaccaaaaaaagtctgaactcaggcagctctggctagagcagtgccctttaggtttctctaggaaggtcactggtaataggaagcttgattttgtgagaggagagagctgcctgtctgtccaggccatggacctttccttctagggttggtctcaatccaaaaccagccattccttggtctgccattttatgaatgctgcagtggttcaggatacagctccacaagctgaatttttttttttccatttgtagttggtacttgaaacaaatacatcactaatagtattagttgattttaagaactgttgattccttaaaaaaaaaaatacacatctctttttagaatgggagaccttgtagttttttttccacaaatttttatttaaaaaaagtcaaacctacaaaaaagctctaagaataatacagtgaacacctatatagctttcttctagattcaccaattgttagcattttgccacatttttgcgtgcatgctcgctcacgcgctgtctctctattatatatatataatatattatatataaaatatattwtatatatatatatgtgtgtgtatttccccaatagccatttaagagtaagttgtagrccgggcgtggtggctcacgcctgtaatcccagcactttgggaggccgaggcggatggatcaccatgtcaagaaatcaagaccatcctggtcaacatggtgaaacctcgtctctactaaaaatacaaaaaattagctgggtgtggtggcacgtgcctgtagtcccagctaatcgggaggctgaggcaggagaatctcttgaacccaggaggtggaggttgcaatgagctgagattgtgccactgcactccagcctgggtgacagagcaagactccatctcaaaaagaaaaaaaaaagtaagttgtaggctgggcacagtggctcatgcctgtaatcccagcactttgggaggctgaggtgggtggatcacctgaggtcaggagtttgagaccagtctggccaacatggcaaaaccccgtctctactaaaaatataaaaattagccagatgtggtggaacttgcctgtaatcccagctacttgggaggctgaggcaggagtatcacttgaacccaggcggcagaggttgcagtgagccgagatcatgccactgcactgcaacctgggcaacagagtaagactctgtctcaaaaaaaaaagaattgtagactctcattcctaaatatttcagcacatatctcctgagaacaagaaatatccagattgtttcagtaatgtcctttacagcagtttgttttcttttgttttttgttttttgttttttttgagacagtctcgctctgtcacccagggtggagtgcagtggtgcagtctcggctcactgcaagctccgcctcctgggttctggccattctcctgcctcagcctcccaagtagctgggactataggcgcccgccaccacacccagctaattttttgtatttytagtagagacagggtttctccgtgttagccaggatggtctcaatctcctgacctcgtgatcctccttcctcggcctcccaaagtgctgggattacaggtgtgagccaccgtgcccggcctagcaatttggttttttktttgtttgtttgtttgtttgtttgtttttgtatttttagtagagacagggtttaaccgtgttagccaggatggtctcaatctcctgacctcgtgatctgccctcctcggcctcaccaaagtgctagggttacaggtgtgagccaccgcacccggcgtagcaatttggtttttttttttttttttttgtatttttagtagagacagggtttcactgtgttagccaggatggtctccatctcctgacctcgtgatccgcccgcctcagcctcccaaagtgctgggattacaggcgtgagccaccgcgcctggcgyaatttgttttttttttaaatccaagatccactcaagggatacaacaacttgcacttagatttttttctttaatgagtattttaatttagtttcagaaaaaaatggtgcatgacttcgatgagaaagcataaaattaagagggttttctggaaatgcaagaaaaataagtaacctttaatatgttcaatgataattttctggatcttcctcttgtgtcaatagctatatatatttcttcctcaaagcagctgctctaagaactaactagccctctttatctccctctagctgggatagactaattcccctccaccctcacctctcttctttgaataacactgcataggtgttaatggcctgggctctcaccagtgaacagaattgtcctttaagccagcaacccacaggcagtgggacccaaaccctcacccccagtccccagggcagaagccacagagctggtattgtttctactgtctcaggaagaaggaaccaaaagctgacctttggcacaaatcaaagcccaatatggaaagagaataactgcttctagtcccagagtaggcaagttgtgggcaaaaaatgggaatttttgcagccaccccatctttagaaacaaggggaaaactagaccsttttccactcttatgktctacaaggtactctactgctccaaggggatctgaaagtgcaaaaggatctaaacaaataaggagaacttttcccaggctggagataagagtgacaaacagaaagatgggtgaatgtaataatgtgtaggaatatgatgctgggaacctccgttcttcatatggctgccggccctacagaggacaacacagtaagaaccaggacagccactccagactggtatagctggggaatcttcaggccttttcctaggtctcacatcaagtgtcagaccccattccaggtatgatacatgagagggaagaygagtgcaaacttagctgtgtggatcagtgctggccccagacacagggacttcaccagctccaaataagactcaaagttcccagggagtaacagggctgacatgccaaaaagagaggcccctgccctcaaagcagtaccagtgtcatggtggcagatggccatygccatgggaagagaccaactgtagatagtgacgtggggagatacagracggtttaaacctgtgttcttattccagaacygctccatctcttgtttgcctgtggttcccaaaggaacagcatttctgatacagagctgagggctraagtgggctcggaggcaatgtcgaccaacatgtctcagcaagagtgcagccatcttgggttccacattcagttgttacatctctttaatctcctttaatttagacagttccctaggctttttgtcttttatatcattagaagagttcatgcccattgttttatagaatatcctttaatatagtttttgtgggctttgtagcaattatatctacataggccttaaattataggactaaagcacagggtgaccacttactgctattaaaacaatgtcaggccgggcacggtggctcacacctgtaatcccagcactttgggaggctggggcgggtggatcacctgaggtcaggagttcgataccagcctgaccaacatggtgaaaccccgtttttactaaaaatgcaaaaattagccaggtgtggtggtgcatgcctgtaatcccagctacttggtaggctgaggcaggagaatcacctgaaccccggaggcagaggttgcagtgagccaagatcacaccattgcactccagcctgggcaacaagagcgaaactccatcttgaaacaaaacaaaacaaaacaaaactgtcaaatggtcactgtcataaggacattttaaaggcaagttctgtattagggatatttaaaagtttatcttgccatttttagatgaggtagtataaattaatgggctctggaaactgatctggtttaattccagatttcattcctgggttttaatttgagaattcccttaacctctccaagcttcattttcctcatctgtaaaatggtaataataacaactgtatttacctcatagagttactgtgaggataaaatgagctaacatgtaaaatatttattagcaaagtgcctagaacattgtgagcatttagtacctgatagttgtggtagtagagttgttgataatttgtactaggtatcaaatattaaaaaaaaaacatgaaaaattatgtatttaagagatcaggaagctttgtttttgaaaggtagccaagaacattttggaggttgttatacttaatgtgttctcaggtattaaaagaaaaaaatcactactgggcacggtggctcacacctgtaatcccagcactttgggaggctgaggtgggcggatcatgaggtcaggagatcgagaccaccctggctaacaccgtgaaaccccgtctctactaaaaatacaaaaaaattagccgggtgtggtggcaggcacctgtagtcccagctactcgggaggctgaggcaggagaatggcttgaacctgggaggcggagcttgcagtgagccaagatcacaccactgcactccagcatgggcaacagagcgagactccttctcaaaaaaaaaaaaaaaaaaaaaaagtcagccaggcatggtggctcatgcctgtaatcccagcactttgggaggctgaggtgggtggatcatgaggtcaggagttcaagaccagcctggccaagatggtgaaaccccgtctctactaaaaatacaaaaatttgccaggtatggtggcgggcacctgtaatcccagctacttgggaggctgaggcagagaattgcttgaacctgggaggcggaggttgcagtgagctgagatcgcaccactgcactccagcctgggcgacagagcgagactctgtctcaaaaaaacaaaaagaaaaaaatattttaattaaatttacacttcacacacctggccaatgaaatggaattatcctaattaagttccttcccaaaccttggtgttcctttttctcccagaaaattgcattgatcaatttaggattgttgaaaaaaatccctcagtgttctacccttcttccccaacctgtttggcatcagtgggaaagcaaggaattttcggccatccattctacctgtaactcagggttgtgttggtgacagtgactaggaactgttcctgttccctccagagccctgtctgctttcatagactggcttggagctgagggcctctcatagcttgccacatcactgaagcccccacatactcctcaggttaccatttctgaaactggaagagttttataatcatattatctgttactgggtccgagggcaagagagagcagaggaagttgataattttttggccaagtttttttttttaatacctttcaaactaatagagaagctctgtttataggcataattggtttttactttaaaatatattaaaatcagaaaataatactacatctgacattcttgtgggggaaatggctaatcatatatgaaagcagatattcagtcactttattgtttgtttgcagtaatattcagcctgtcattcaagtaactttaattagggcttttcttcagtatctaggttacttctctttattcaccaaatgcttgcaaatgcaaaatagaaagtgcatattattattattattwtttttttttttttttactggaaggtgtgtttaataacttaaaatcttcatcattatagtgattacttcctgtggcattttccttattgaatattaacataagtacacactgtgagactctgctacagggccttgttccttatgccttggacatacagtggggggcagaggcaaagcccctactcctactctcctaagtttgaatttcctttgcctcctcaattaacccatctgatttattgggacatcactgatctcagatacaagaaaactgatactgttgtggaagaaaagcaaatcgtgacgagaaaatggctctgttatcacaggtctgcacgtttacataacagaaaaagcaagggacagaattatatttggaccaaatccaaatcactgagtgattctactaaatgatgatcgcatactacatttttttttgttttttcacatacattttaaagtgagagatattattttaaattttagagggtgagcatcaaataacattgtggtttctgtaatcagtataaattacgcaacaatcagtttaaatgggatcatttacaactgctcacatagctcttgagtttatattaacaatgtagaatttaacgcaggatagtctattcctcaaagaaacaggaataatgaacacaattaaatgtttcactttgacccagactatttttcagaacataaagtcatcaacattcatattacagcaatgctttttcttttccgcccaattagcaccaatataaatcgttcattccatctaaggccctgtattacttcagggaatataaatctaagtcccggccaggtgcagtggcttacgcctgtaatcccagcactgtgggaggctgaggctgaaggatcacaaggtcaggtgtttgagaccatcctgaccaacgtggtgaaaccccatctctactgggaatacaaaaattagtcgsgtgtggtgtcacacgcctgtagtcacagctgctcgggaggctgaggcaggagaatcacttgaatccgggaggcggaggttgcagggatccgagatcgcctcactgcactcccgcctgggcaagagaccgagactcccttctccagggacgcgtccatggctgaggcggtcggtggtggcccggcggtcccgggctctacttcctcctcccgcgccccgcagctctttccacactggcagcgctgacgtcccccgcgcccgcggccgccggggcggagaagaggaggagctgccaggcggctctgccggctgaaagtgcatattattaatttgaattctaatgtttgtaatgagaccatatgcaaaaactcaactttaattttatctattacagaaataattgaaaatgcagtaaaagaaaaatcaatactcacatgacttcctagtttatgaaacacctttttatacgttatcttacaacctacatctctgtaaggtaattgggacaaatatttggtttcttcatttgacagagaagagagccaggattcagaaatgttaatattcaagttcatggttccrccacttactgggtgatcttgaacaagtcgcttaatcactctgtgtaatttccttaaatataaagcagaattcaaaatagggcttaccacatagggtgtgtgtgaagatgaaatgagttaatgtccacaaggcacttagaacagtgtctggtgcrtagtaaatctcaacaaatgttagctattagctgttattatcacatagctactaaatgttaggacttgtacccgaatctagaccttctgtctcctagtccagaacacttcctagtaccatgtgcaatttaccttttagtaaatcattgattggatttccgcctcacattgaccttgttattcttgaagggatctttttctactttgtttactttgactttaaatttttcaagatcaaaagggaaatatgttcgaaagattcttcctgattttaaaaaatcctctgatttctgttgtcatctgggtttgcttgaccttgaagtatcagaaggtgttttagcaggtgaagatatcataaagttgttttcaagagtgattttgggtgtttccggtgaattctgttttggttggaaggcctaaagtgggaagtagagttagaagaaattgttgaactacagcccagattttggggggttggggggagttyagccatgtctcttatctacagtgctgagagaatattgccattacagaaaatggcagcttggtgacctcagagtaaagataattgttttgacacaggattatttatagtaaaagagccatcctaaagaaattggtaaactgttatggaccatttcctgggaaaggagaaattgtttatagatatttctcttgataatagtatttgtagcaggcttttacttgtgactcccagttgtttttactctatctactgccagtgtagatattttatggctgtgagatgggcctaagtgaaaatctgcrtgcttttgtgggagctgctcagctgctatagggagacaaccgccttttctttggatgcccaaggtcaatgcaaaactggatttgatgttgaagattgcagagggtgggcagtgatgtgaaggaaaaatggagtcagccaggaggccttcttgaggcaaggaataagagaaagccccaactcactgggcattccctatcaccaggcctttttgatgtgtacrtaatacaatatatacatagatggagtactctgactgcagggtgttcaatatgcttatgatctttgtggatatctgtaccagtatttaasttggtaagagaggaggtttgaaagaacctgctgagacctcctctttgtgatatttggactttttaacccaccttatctctaatattatctttagtaagtagaattaatgttctcatattaagtgaaaacactgaatttttaagattccctggcacctggtgatagttcaatactgtttgcaaaagaggatatgaagaaatgatgtatgtattgtcttttctagttttgcagtcaggttttatttttcctgactagccatcaacagaatcttctgacctatgcagcatgagaccaaagcccagaaaacagctcttggtcctaaaaccttggcagtctctctcttgcaactacatggctgcccattcaatttggtgccttttcctgtgtgttagtttctgcctgctatgctagggagtggctggtctttttttctgctatatttgcctggatgctctgtatagtagatggggagttggagaaaaggctaaaaacgaatagccattatccattgccactgtcattacatgttgcccaggactccagagagctttgcttcttagccagttgattatgaattaaacacctctgatgtgtgagaatcttctgtatgtggggattcttatccttctctgccatttacattcttctgatatgcaatgtaccagagaagaactgtgttgatgatggtttcctttgaggttagtagcagagttgggagttgaggaatgacagctgagagatttagcaaagctagcagggttgtagagaagttgaaagcttagactagttcatgacgggcctttgctctgtcatcatttatgaatgccagtgtggccacaagtgccacaggtggccccttgaatatctgttgctctctttaaagtctttgctgattctcccaagttgggcctttgctccttgtgatttcagtgacacattttgtccccacttatctccctcagctttgtagtgagtagttaattgtctaaatgtttgtttcatctacttcataagtttctttacaagaggaacctggggccgggcgtggtggctcacacctgtaatcccagcactttgggaggccgaggcagatggatcacttgaagtcaggagtgtgagaccagcctggccaacatggtgaaaccctgtctctactaaaaatacaaaaattagacggatgtggtggcgggcgcctgtaatcccagctacttgggaggctgaggcacacgaactgcttgaacccgggaggcagaagttgcagtgagccgagatcataccacagagattgtgccactgcactgagattgggtgacagagcaagactgcmtctcaaaaaaaaaaaaaaaaaaaaaaaggaacgtggtcttgcttattttagtattctcataaaccatggatatgtcccacttgtatcagttactcggtaaatcttatggaattaaactgaaaaaaactggctgtgtctatggaaatcctgcagctaatgtccatttttctagacctactgtactctgccaagagggtatctcttagagaagcagagcaccatcatcagaaatagcaggcaaaagcacaccagcttattgttggcctttttaaaaacttttttgaagctttttgtgtgtgtgtgtttgtgtgtcaacaaagctttgttaaaatatcattcacataccatacaactcaccaatgtgacatgtgcatgtcagtggttttcagcatgtttacagagttgtgcaatcatcagcacaatcaattttagaaaatttatcatcccaaaaagaaactcagtgcctattccctccagcttccccatcctaggcagccactaatctattttttgtcttgatagatttgctggttctggacatattttgtctggcttctttcacttagcataatattttcaaggtttatccctgtggcatgtggccagcctagagctttgtagaaattggaaagcaggtggtgcttgtttcctggctacttgttagttgtggctaaggccaatggtgagtccacttgccctcattaaggataaccagatgtatttagtggaaattccatagatgtgttctaaacttgcttctgtgagtaattgtaaaaattaaacaaggtaatatcaatgagcacctaacttagttcctggacaaagtccctttgtcccacttgaayttcttagattttagtaagaatttgccaaaatgaaacaacagataatttgtaattggtactttgagtttaatgtactgattcttcctctacccttttgtttttgctctccccaaggctatgcctttctgctgttccaagaggaaagctcagtacaagctttgatagatgcctgcctagaagaagatgggaaactctacctgtgtgtgtcaagccccaccatcaaggacaagccagtaagtaatacatggccagctgttgcttttccagagcacatatgctattggaatagctgacctcctctttctgataatggaaatgctggtaactaggatcytcttacccagcttggccttgctatgcagtagakttggactttcgttggtgatgggaaactaacaacaaattactcagtattcattttatacctttgggactgtgtgtaaacaaatatgtccttgtctttcacttacagctcttttaagctaattcctattcagaaattctgaatcgaggtaaataatgctcttagcggttttggcagctggtttccgtcattatttcagatcaagaacggagttatttatttttgaaaaaggtcataattgttgatgtttatgtgcctctgaatgcaaggcattgtgctgggtggtacccacagctagttaaatagagccttctgggtcaggagcttacactctaaaatggatagtttcaacagagcaggagaggagaagggcagagaacgtggagctaaaaccataatacagagtttgtggttaagagtttgtggcttctgagccagagtatgaatgagtaagtcactggataagggaggaagattgtgtccttcctctggcagaagagctatcagtggagaaggggcaagatcatgttcagagcagaataaacgaacttcatttatgtgacagaagtagggatctgtgggaagttggcaggggtagggtgaggtgagtttgtgtgtcaaggcttggtgctagatgtggcaaatagagtaaaaatatgacacagagtgggcaagagaccagagctgtatataccacagggcctgcagcggcctttgtatgactagcactggaaatgtagggcctacttagcagctaggtttattttcagaaatgtgcatggggaaatagttggattgaatatagaagtttgagtgttgactcttgtatttaaatatctgcttggctttgaataaatcatctaatccttgctgaactgtggtttcctcacctggaagatgggaagaataatcattcttccctgggttgttgagaggctcagataagaggaaaatgaatgtgaaagcatttggtagaggtcagatacttgtacaaatttaactggctaatgttgtcagtcctacataggattcaatagagcaagattagaactcagctatatggcaatatctgttgagaaggatgatgacatctttaacagggtttacaactgtttgctaaaaaatgatgttgagacttggccacctataaaggggagagtgcagcacttaaagcagaagaaagaactactaaagaatggggatattgagagtattcattggagagtaagcaaatgatgtggaaaaagaggcaaggattttagccagtataaaagtgccactgtaattttcaaatttggaggctgttgccaaattttggagtagtatgagtttggaaagtctgtacccaaagaagaaacaagtccccctccacacacacaaaaaatctgtacctggccaggtacagtagctcacgcctgtaatcccagcactttgggaggccaaggtgggtggatcacgaggtcaggagatcaagaccatcctggctaacacggtgaaaccccttctctactaaaaatacaaaaaaatagctgggggtggtggcacgtgcctgtaatcccagctacttgggaggctgaggcagtagaatcgcttgaacccaggaggcggaggttgcagtgagccgagatcgcgtcattgcattccaacctgggcgacagagtgagactgtctcaaaaaaaaaaaaaaaatctgtacccaatttggtaggatcagatatctgagaggtaaattctcaacctccagagagcctctgctactggcatgccagttggagagaagctggagtgagctgggaaggtttaaggtcacacactgtaggagaggattagaaataaatttttctacataaaaaggcagagggatagtagtacatgttgaaatagttatgtccatgcaggttaagaagctagagatgaacacgcagagtttatatactttggaagaatcgtgtcactggctctgtagggaaggagaataatatgccttgtgggacaagccttcagctggacaggatgtctcttgagcagggagtgagcagcagtaggggtcagatggaggtgttgtggtgacaatgccattactcttgagtgttttcagtagaaacacatgtattatccttggattgaaggacttttgaaaataattagtagaattaatctgttttggaaatgtttatggggaaactagctttcactgtttgtgttttggcaaattctgccttattacagttttcattttctgagctcaagtgcagcagttttattgtagcttggtgaattctgaatggcgactgccaatcacacatttctttgacccaggcatactcagaatttccagcataaacagttttagtaaaacttaggataggaaacttaaaagtccccaaacacctgcaattttaatgaactggatcctattttgggttctactcttttggctctatttttgaaaacttctcttacttggttttagctccacatctaccaccccaccaccaccccctgcctcatttatgcatatgtccctacctaggttctggtacattccacctcattgtgcatgctcccatgaggggaaaaaaagtaagaactgtgttgaacctttggaagtaaatgaggaccttggcagtagctcaaggcaaagtcaacctttggtgctcactcaccaaactttttttgagccatggtgcttccttgctcccagcttttggcttggctagcctttattttctacctttcaggatcccagtgcccttgttctgttgtttcattttttctgaccctccctggatttcttcttggaaatacaccatgttctaaaatgaccttgcagattttctaccctttatctttctttctcatcgtttcccctcaaactcctgttccctttggaacagattaatcagattgtttttctaatgcagaacctgatagtgaggtctcctttcacccatcttgtccaggatcatacttgctttttttaactcaaatgaattccaaatttgtggatttcaggttgtgttagggagatatttttcatcagtgactacttcttattaaattactcaactcagactattctgtgtataggtctggtcctgaaagattgcagaaggaactgtatttatggcctaattagttgacttcctcagttccaaagaatgggaagacaaattggcaagagcaagaggaggtattgaggagcttctagatctatgattttttttttccttctccagtaagaggagtttcatagctcaggtatcccaggcatatcagaagacagctgtgtccatgtgcaagggttccagtgaagcaggcagacattgtgcacagtggtccctctcatcaaagtgactctattttttgactatattaatagattgaacctgaaggttcaagacagcaagctaatagagcaagggacctagaaggtctagcagagataggggctgaaaaagagtaatcttgaraagaaggtggagaaggagctatttaaggttctagaacatgttggccagagatgtgggatagcaaacaccttgaaaggattatcagaggagtttcctgcttcctgctccttatgatttatttatagcacgactacaatttctctatatcctgaaatacaacagagtgattttgctataaatttaaaaaccatattaccaaactaaagtatgcttatgtggggatccattctttacgttattgctcaggtaatgtggtcatccacttaaaacttgaaaaatgaaaatcgaaaagaatggtaagaataaggaatctggaaataaaggccaatttaattcttcagtttttaattctgtcccatgtgtctgtcattctggtgtttcctcctccccctgtttgtatatgagtgggatctgtagcacttttcattcacacctctttggttacaaaagcagtccagatccttttcccagctatttaagaccttcccaatctggcttcaattttttccaactttgcttttttctgctttccttytgaaccccatattttaaccaaacagaaawatctatgctctcatcttgattcctttcttccttccttcctttttctttttttcttttttctttctttcttttttttttttttttttttttttttgagacagagtcttgctcttttgcctaggctggagtgcagtggtgcgatctcagcacactgcaacctctgccttctgagttcaagtgattcacctgccttagtctcccaggtagctgggattacaggcatgtgtcaccacacctggctaatttttgtatttttagtagagacggggtttcaccatgttggccaggctggtctcgaactcctcacctcaggtgatccacccgccttggactcccaaagtgctaggattacaagcgtgagccaccgcacctggcctcccatctcaatttctaattcctacccttaaagactccttacaaatgccatctctttcatgaatccttccctgatcaccacatcatgtatcgtgaatgttacctattatcgtagctatctccatccctatctagagccatctttttaaaatggtgtgccttccttcagaccatgtttgagtacctgccgtggtcaaggcacagtactggttactgtgaaccagaacgtactgtgagttgatataaaatcttgtgtccaaaagttaattaaatggtaatgagggaatagccaaaaaaaaaaaaaaaggttaatagtataatgcatagataaaataagtataggctgggtgcagtggctcatgcctgtaatcccagcactttgggaggctgagctgggtggatcacttgaggtcaggagttcgagaccagcctggccaacatggtaaaatcctgtctctattaaaaatacaaaaattagccggatatggtggtgggcgcctctaattccagctactcgggatgttgaggcacaagaatcgcttgaacccaggaggcagaggttgcagtgagccgacattgcgccatcgcactctagcctgggtggcagagtgagactccatctcataaataaataaaataaaaatacaaaaattagccaggcatggtggcggacgcctgtaatcccagctactggtgggctgtggcagaattgcttgaacccgggaggcagaggttgcagtgagctgakattgggctgctgcactccagcctgggagacagagcaggactcagtctcagaaaaaaaaaaaaaaaaaaaacccacaaaacaagtatataaatacacagtatctatagaacctagcacataaaaggttcccaaatatttgccaaagtaacaaagataaaacaaaagaataagatacagattatgtactttggagagttcatctatacctagaatgatgaaagaaaacttcctggatgaagtgtcatttgaattaggcttgaaggatgaggagaatgtggagttggccaagagaagggkggaagtatagggaataaaaatttcagagaaaggcaaaaacatgaacacaaaaatgggaaatggtgtgacatgaatggagaatatttaggttggttagatggagcacaaatatgtgaaagggaatagagagaaattaaattgggcaaaatagatagagactaagttatagaacaccttgattgtctcagtccttcatttgtgatgtgtttactacaggtatttcattctttgcttagtacctcttaacacataactataattttatcttggcccattcgaatctggttttgtatgtccacatcttagaattcacggctaagccatatcagcatgtgtgtcatatcccacctcggaaatctttagcatttctgatcttgatttatttatttgtttcttgaattcttggtctaaattgtggtttggggctgggcacggtggctcttgcctgtaatctcagcattttgggaggctgaggcaggaggattgcttgaggtcaggagtccgaggctgcagtgagctgtgatcacaccagtgcactccagcataggcaacagcgagacccctgtctctctaaaaaaaagaaaagaaaagaaatcatggttcggacaccttccatcataggaatttcttcaaagaaggaatttcttttccaaagtgagagacatatctcctattcattatacatttgattttttttttgccctgggtgtctgaatctgcaaattggtccagaatttcttagtgcttgaatctttggaagctgtattttcttttcagggaggtctaaaaaacgttgcatttccagccgggcgtggtgcctcacgactataatcccagcattttgggagccaaggcgggcggattatgaggtcaggagatcgagaccgtcctggctaacacggtgaaaccccgtctctactagaaatacaaaaaaattagctgggcgtggtggcaggtgcctgtagtcccagctactcaggaggctgaggcaggagaatggtgtgaacctgggaggtggggcttgcagtgagccgagatcgtgccagccactgcactccagcctgggtgacagaataagactccgtctcaaaaaaaaaaaaaaaaaaaaagttgcatttccattgtactaaatggtagctagtggacaaaatagccaacgccaccccttaagggataatgttcagtgttttccagagtgtgttctgaagaatacttgtcccatcaaagactaatctcttgagaggatcttcgacaaaaggtttcctcataatggtaataggtgtcattttttgagcacttactttgtgcattgtatatccattttgtcttttaattaaagtttccttagccaaaatcatttgagaaacattgatatattaaggttctgagaagtcttacaatatatacatttgtgtaaaattgtttaatccagcattttacattcctgctttggggatgatactcgtgcagattcctgtggaattagtattccatgaagctcattcaaagaataggcatcttcccaggaaaaacttaggtaacctgaacttttatgtgtacattcctctcaagagttttagtaatcagcatgccagtaacaacatccttgtcctagtaccatggagctgaaagttcacatttatatagacattggacaaagttgtctggctggagtacaagattgcctgagactgtgaacctgaaagttaaaatagctggatacagtgctagtttcactgctaactcatttttctcaagctttgctaactgctagttttgttagtaggtccaacaaatgtccattggtcatttcttgatgcattgcaaacaggcataaagagtggagaaaaaagagtggttagtcactcactagtaaaaattcatgttgacttgttcaggagcctatctggaagctgtgactggtggccagtagcctggaggacagggagccttgtaggcacacaacatgattgtagtagaaagagtacgtgtagactgttttataaacctggagttcagttccaagatgacttcactcttctgatccttagcttccttagctctaaagtagggataatttttagagcatatggtgtggtgctgtttaagtgtgactgtaaaatgcctagcacagtagtgcaatataagtgctcaaaagtgctttttctttcaaaagggaatcagctattatgtttatgctttctgagtgacgaagcagcatcaacagtcatgatgaacactagataattctgatcattgagtgggtctcacctagtggcatcagaaatttgcattcattaagcccaagaccttgggcatccactggtgaccaaaatataccctattttcctacccctggaaggtaactttcagtggagtgaggagagtgatctgggagctgtagaagagcagctgctggacatgttttgtgacaccagtgtcagcacctcaggaaaacatttgtttacacaccaaacgtgcacagagcactcactaatggttaggcactgtgctgggcagttgggatccacacaaatatatggtttcagccttagaggatcttagagtccaatagagggaaatagacatatgaccagtaaatgacctaaggagccacagatgctctgaaaacctgaaagttaaaatagctggatagaagtattagagggagtagttgtgacggggagagcgctcaaagggcagagtacgcagatgtttctgaggcagtcagaaaagcctttagagaggtgttgacttgagtcttctgagcataatatttaattgataatggctttattaaatcaaatatagtgcaaagatatacataaccattttcatggggcagtttatgcatgctgtatttctgcactgagtgcccttatgaaacagtataccgaattgttcgaattgttcatcagtaactgaagttcccaaaggagttgtaaagcctgtagcttccttgcatcagataataggctctgcagcctggtgatgggggcaggagtttcctttttgtacctggactgtttcctaaacctgagggtggacttggagcatccaaggaggatgtgaaagaatttcctagggttacttttggctccctgtctaggaagaatcctggctattttgatgaagattttctatttctacttggagactacttgtatctagggaatgggaggaatagtctgaatgtgagagttacagctttttgccttgaggcctgacggaggtctgactgaagcccccagagctacccaggatatagtcttactaaggctaaagactcctttctctccactacccccagaagatgcagggaaggcatctcttcctcttcagcacttgagaataatagatagcatctaaactcctgaaactggctgacctatttgttagggagctatgtggtcaaaattacgttgaaatgagatgccaatatcagtgtgctgtaaagagtctaaaccacaattattgttgtggctcttagttttggtgattaataataaaccaactccttatgccatggaagagataaagatgcctcacaaaccacaaactagtttgtttgtttatttattgagacagagtctctctctgtcacccaggctggaatgcagtggcataatctcggctcactgcaacctctgccttccaggttcaagcgattctcctgcctcagcatcctaagtagctgggatttcaggcacataccaccacgcccagctaatttttgtatttttagtagagatgggggtttcaccaagttggccaggctggtctcgaactcctgacctcaagtgatctgcctgccttggcctcccaaagtgctgggattacaggtgtgagccatcacacccggccacaaactagtttatttctgatattgctggggcaatccagtcattttgtgaagtctgtgatgcttaaaatagaattgctgacagctggggtgggtctgagttcatcaccactacaactgagctgttgcagctgtatgtcagcagacctaggtttagctgactcatcctggctattaggatgagctggggtgctgcttcttgttggggagagcagtcctgatggttctgcagtattgtttttccaatttatgtagactaaaaggattgtaggattggggagagaaaaatggagacttttttcctaaagagcttgagtttgaacggtactgaaaagaggaaaaggaaaaaagaaatcagagtatgggggaagtagctgagctctgaaccaggtcctttttgggaaaaagaacatacggctttgagggggtctttggtcagatggtttcccgagctggccacctgattgcactgttgacaccgaatggtttgccatttggaactgccttgagatgaacagatgaaaatgaaatcctatgcagtaggatgttcatgtgatgggtgttgtaacctaaagaagggaccatacagagtgagatgttaaaaatgagcttgacgatatgtataggtagatgaatatctaaatactaaattgtaactgagagaactctagctgtagggatatgtggttatgttgagaaatttgaagtcttgaggtttgtgttaaaaactgttcttggccgggcacggtggctcacgcctgtaatcccagcactttgggaagccgaggcgggtggatcacgaggttaggagatcgagaccatcctggctaacagggagaaaccccttctctactaaaaatacaaaaaattagctgggcgtggtggcgggcacctgtagtcccagctacttgggaggctgaggcaggagaatggtgtgaacccgggaggcgaagcttgcagtgagccgagatcgtgccactgcactctagcctgggctacagagcgagactctgtctcaaaacaaaacaaaaaaacaaaaaccattcttattggctgggcgtggtggctcatgcctgtaatcccagcactttgtgaggctgaggtgggcggatcacctgaggtcaggagttcgagaccagcctgaccaacatggagaaacccagtctctactaaaaatacaaaaaaattagtggggcgtggtggcgcatgccggtaatctcagctacttgagagactgaggcacgagaatcacttgaacctgggaggcagaggttgcagtgagcagagatcgtgccattgcactccagcctgggcaacaagagtgaaactctgtctcaaaaaacaaacaaacaaaaaaaaacctatgttttctccttgctgctggggggaaacaaatatgttttctccctgtggcaaggggggaaaacaaaaacaaaaaattgtgttttctcttatcctgtaattaaattagatacaacaaaaatgttttcctgagacaagggctggttctgtcgcccaggctggagtgcagtggcttaatcatagctcgctgcaacctcaaactcctgggcctaaacgatcttcccaccttagccaccacatctagctaattttgaaaaggttttcatagagacagggtctcactatgctgcccaggctggtctcgaactcttggcctcaagtagtccttcagccttggccttccaaaatgctgagattatataggcatgagccaccatgcctggccagaaatgcttcttttttttttgagacggagtttcactgcccaggctggagtgcaatggcgtgatctcagttccctgcaacctctgcctcccagattcaggcaattctcctgcctcagcctcccgagaagctgggattttaggcacctgccaccacatccagctaattttttgtattttttttttttttagtagaaatggggtttcaccatgttggctagactggtctggaactcctgacctcaggtgatccacctgccttggcctcccaaagtgctgagattacaggcatgagccaccaygcctggccaaaaatgcattttatatttaattttaactaagaggttctggtcaattgtcaatgaaattttcattttaggaaatratgttatcatatagcattctgtttaaagaaataatgcatagtagaggtcaggcacggtggctcatgcctataatcctagcactttgggaggctgaggtgggcagattgcttgggcccctaagttcaagatcagcctgggcaacatggcaaaaccctgtctctacaaaaaatacaaaaattaactgggcatggtggcgcatgcctgtactccatgtactactgtactctagcctgggtgacagactgagaccctgtctcaaaaaaaaaaaaaaagacgaaaagacccatattgcatgtcttgtttttcctagcccttgacctaatcgtatccctattaatgacctttagttttaagtaggatgaaactttagtttttatatggagctataattattttgctctttattgataaaaatttcaaactgggctaggcatggtggctcacgcctgtaatcccagcactttgggaggctgaggcgggcagatcacttgaggttaggagtctgagaccagcctggccaacatggtgaaaccctgtctctactaaaaatacaaaaattaactgggcattggggcaggcgcctgtaatcccagctactcgggagaccaaggcaggagaattgcttgaacccgggagatggaggttgcagtgagctgagattgcaccactgcactccagcctgcttgacagagccagactccatctcaaaaaaaaaaaraaaaaaagaaaaaaagaaaaatagttaaactggtttggtaacatatcttttatacagtttagccagaaaactttcagttctttgaacagctatctaatgtttcagtttagtatactcttaatcatttaaagttaaactctatagaagcgaacttttcagagcaatagcaagaaataagtgaggaaaaggcctgggatggagtgaagtttctgaaaacttcacactgaggtggttgaatcacctgattttgagaccatcccgaccaacatggagaaaccccgtctctactaaaaatacaaaattagccaggcgtggtggtgcatgccttgtaatcccagctacttgggaggctgaggcaggagaatctcttgaacctgggaggcagaggttgtggtgagccaagatcgtgcctttgcactccagcctggggcaacaagagcgaaactccgtctcaaaaaaagagtaaggtatagtagggcagaattattggaagtgtaggtattaataggtgtcatgcaaaaaatggggtctatggaaataattttagaaatgctgtgagttaaacaacattgaacagattttttttttttttttttttttttttttttttttttttttaggcagagtgtcactcttgttgcccaggatggagtgcaatggcgcgatcttggctcaccgtagcatccacttcctgggttcaagcgattctcctgcctcagcctcccaagtagctgggattacaggcatgcaccaccatgcctgactgattctgtatttttagtagatacggggtttcaccatattggtcaggctggtctcaaactcctgacctcaggtgatccacccacctcggcctcccaaagtgctgggattacaggtgtgagccactgtgcctggctgaacagatttctatagaatttcttagagcctttaattaagtacgctaatgggtgccatgaaactccaagaaggagaagataatctatagtttttccccaacactgcttatctggcagaccaaccctagggacccatgttccacagaacacactttgggaaaccttgaaaaggaatattagtgatttcactactaactgttgatattattaatgttaagttmttttagatttcttgaaggctgatgttaaagtcactatatggtataaattattatatttataccactcagcactgtgtttggtttttgtctttattcctaaaaagattttgcctttggagataagcagttatatgaaacagaagataagaatttagaagatatgtaattcagccaaaagtagtcctcaggagagcttccataggaatacgtgctttagagagaaactaaagaaaaatgatttttgtattttctctcatatgtgctaatggaacaaaacattccatcactgtaagctgtgtggtaactaaactcttcaagccaaagatcatggactgggtggggcccatggcatagatctggtccgcagataattttatttagcctgtatagtgacttttaacatttgaattagttcctattttagaatattgaagtttcacttaaaaatctgaatttctagccactcttgaaaaatggaaaaagtctgacaatacttaggcaagtggtaactacttgctggagctgagaagtagtttactccagtgtgttactgcctgcctgctaacccaaatgtggcttgacatttgcactacctgtctgaccctatggtcatttgagtttgtgtgacccctaccataaggacatggcatggcccaaaagctggtgcttcccaaaggatactgcagcccctttttaaatttttattttattttgagacagggtctcactctgtcacccaggctggagtacagtggcacgatctttgctcactgcaacctctgcctcccagattcaagtgattattctcctgcctcagcttcctgagtagctgggattaccggtgcctgccaccacgcccagctaacttttgtatttttagtagagacaggttttaccgtgttggccaagctggtgtcgaactcctgacctcaaatgatctgcccaccttggcctcccaaagtgctgggattacagaaatgagcgactgcacctggccagcaacctttttttagagtcacctttaccagaaaatgtggtcaggctgctccaggaagaagtgctggaatcatgtcaggataatttcagggaatcttcactatttctgggtggcatccttatacttgtcctcaggatgctgaggcttttactgcccctatagtgcctacttgacaacatactggaagaattgtttcactcacacaccttctttctcacacacagtcacagagttagccctatacagttgttcctaggtttgcataagggattggttctaggacccccctcagataccaaaatccatggatgctcaagtcccttacataaaatgacgtaacctatgtgcatcctcccatatactttgaattgtctctagattacttataatacctaatacaatgtaaatgctatataaatagtcgttctactatagttttaaaatttgtattattgttactgttatttttgttttaaaatatattctaggctgggcatggtggctcacgcctgtaatcccagcactttgggaggccgaggcaggtagatcacctgaggtcaagtttgagaccagcctggccaacgtggtgaaaccccatctctactaaaaaaaaaaaaaaaaaaaaaaatcagccaggtgtggtggcacactctagctactcaggaggctgaggcaggaaaattgcttgaacctgggaggtggaggtttcagtggactgagattgtgccactgcactccagcctgggcgacagagcaagactccatctcaaaaaaaaaagttttctatttgagattggctgaccctgccttgcagactcagaacccacagatacggaggaccagttttgtatatagagaggaaatttattgaattaggacagaattctaatttcatctattctcaaaaataattattaaagaaacaaagataattaaaaagtggttattttatttatactctccacaaaatatttgaattagcttataaagtatgatattacaatgaagtatatatattatatatatacgcaatatatatatacacaatgaaaaaaaaaaaatatatatatatatatataaatcaggaccagaaaatatatccaaacaaagagtaagtccagaaggatagaacatggatatcaggacctgaggtctggagaaacaggccttgtgtgagaatgggcttagatttaagagagaaaccagagtgtgagtgcaacttttcatacagatagtaccacaatattattttttgcttagtatatagagtgtgttgatattgttctatgttgattaattctgcatctatgttgattaattctgcagaggtgacagctctgagcaactgttttctggtggcagctgggaaatgtaggtttcgtgaatagggttaatcagcactgtgtcttgagccctcttcctatatttttacctaatctgcaatgccaagaataaaggaatgggttgtgtgcaatgtgatgaagtgagatcgggggttggggagtgggcagaaaaggcagtaggcagtaatgaaagctctcagcaggaaggtttgagatcttttgcagagttcttttgagcagtggtaacctacagctattgataaaaggctgtatttcctgtctcaattaattgaacatgaaagcagaccattggatactacacaagaatagttttcatttttaaaataaagtgatctatgatcaaacgcaattaacataaagtgattggaattaccttaccaggtcccgaagctgccttaactgctttattaggaatgagattagaagagagattatgtgtagaaaaagatacatctctgtgtgtgtgtgtgtgtgtgtgtgtgtgtgtgtcattagaatctttgttctcacagtgtcaggaaattattgtgtattaaatgaaaaaattagtaaaaggcagtaggtcctcatgaaggcatttaaaagtaatgctttatggtattagtgaatctgcctttgtagtaaatgtcaagggaatgataatttagtcaaacagaccaaaatttacatggaaagaactgcattttttttttttttgaaagggagtttcgctctaccgcccaggctggagtgcagtgacgtgatcttggcacactgcaagctccgcctcccaggttcacaccattctcctgcctcagcctcctgagtagctgggaccacaggcgcccgctaccacgcccggctaatttttcgtatytttagtagaaacggggtttcaccatgttagccaggatggtctcgatctcctgacctcgtgatccgcctgcctcggcctcccaaagtgctgggattataggcttgagccacagcgcccagccagaactgcattttttttcatgcaataaaggtggagcgaatgtctacatgtgaacaatattgtaaacaggtccaagttttcagggtctggggaagaaatggagattttgtgattttgtgtctcctggctaactggtgagggcaacagtgtcataaaaggcgaaaagtggccgggcacagtggctcgctcccgtaatcccagcactttgggaggccgaggtgggcggatcccttgaggtcaagagtttgagaccaccctggccaacatggcgaagccccgtctctgctaaaaatacaaaaattacccaggtgtggtggcaggtgccggtaattccaactactcaggaggctgaggcacgagaatcacttgaacccaggagacggaggttgcagtgagccgagatcatgccactgtactccagcctgggcaataaagcaacactctgtctcaaataataataataaaggcaaaaagttaggtgagggtgaaatttgtagcagtcttaaagaatgtatagactggccaggcgcggtggctcgtgcctatcatcctaacactttgggaggctgaagtgggtagatcccctcaggtcaagagtttgagaccagctggccaacatggtgaaaccttgtctctactaaaaatacaaaaattaaccgggcatgatggcgggcacctgtaatcccagctacttgggaggccaaggcaagagaattctcttgaacctggggggtggaggttgcatgagccgagattgtgccacttcactccagcctgggcaaaaaggggaaactccatctcccaaaaaaaaaaaagtgtagactgtttctaactgagcaattccagttttaaagttaattcaaaatgttttgaaagtataattgccacaggtgctacctttcaagtggaagtactcctgggtataagccaagccacataagaaattatcacatatgtttcttcgcattaagtattgatttctgagcaagggggaaatgaacaattccattaatactaaggaaatgaaaagtcaacttttttgttttctatcttagtcattcattggtggaggggagggggaatggcatgttccttgaggacagataccaggttccctttctgcacccagcccgcttctcagagcatattggctacctgcgtaactggttggttttgagaccgtgcaaaatttgccttctggtgtgggaggatgtttttgtgtttttgttttgtttaagctattctttgataatatgttttaaggttttgtatataaaaccatgtacataaaggctcatgttttaaggttaaaattctaaagaaataccttattttttgcttgtgataaaatagtacaaactatgggcactaagtcagagtcccagttaagaaaaatgaccaaatagaaatatgccataaagatttctttttctgcttttaaaaaaatttacttaaactttgaagcttgcctttatttaaccagcctcatttgtcaaaatcagataaatccaaaagaggtaattctctctcttttttttttttcctgagacagtcttgctctgtcaccaggctgcagtgcagtggcgtgatctcggctcactgcaacctctacctgctgggttcaagcgattctcatgcctcagcctcctgagtagctgggactacaggcgtgagccactacacccagctaatttttgtattttcagtagagacagggtttcaccatgttggccaggctgatctcgaactcctgaccttaagggatccacctgcctcagcctcccaaagtgctggaattacaggtgtgagccaccatgcccagccagagagtactctttgtgctttattgttatctttggtaattctatgctaacttgctgcatgttcgtctgtattaaatcatattgctgaaagatatgtttgaattttggagggtgatgagaattaaaaagtcagacatggagaatttttagaaaatactcctgatgtactttagatgaactcttaaaacaaagtggtgtactgtgacacgttgtaaacagtctctatcatgtgttaagatgaatctgattcaaaatgcagactctgtctctaaaagcctgccttaaaataaaaaaaccacaggcagaggtggtttctgatggtttcatggtatatgtcatatgtctagagtgctgagtacagtacctgtaagtagattccccaagagttctattgaaaggtacttaatgcagattacgttaactaattaactggattttgtttgggtcatgttcattgtgaaatgcacaaatcagtgggtttgtctttagtcatcttattctcatttggggttgatggaaatgaagtaaggaccaagtaaacractttttttcaggtgcaaattcgaccatggaacctaagtgacagtgactttgtaatggatggttctcagcctttggaccccagaaaaactatctttgttgggggagttccacgaccccttcgagctggtgagtggaaatagtaataccacaacaacaaaaccaacaacaacaaaatccccaatgcctttagtcttaaatattttctaggtttccagtcagctatacatagtctccaaaaagaaggctgtyatcattttcactgagctttttcaggattaaaggttttctcccaaaatgytctattttgttatggtgcaaaagtgaatttcattaaacagttatgttgacaaaatgaattctatttagtgctttcctatttaattgcttatataaaaaataataacacatttggcaatgtgcattcttatgccagtcagcattgttatgtatgacagaaatcttttttaaagcttccctgttggtttttttttttaagttcctttccagtgatgaaataattgtgctgctggatttgagcagaatcataattgactggagagtttgaagtgttgttgaactgatggcttcaatacatatttaaatccaaagacaaatccaatcagctgtacatcagcctcctaataaccactattaatgccagtggagtataacaaaatcatttctaagatctaagtttttgaagcacttaraataattaagtttatttttttaaagtaagacaaaaaaagttactgttgccactgtgaaagtacatttcttttgtgttatttatatgcacatagacttagttctacctaaaattaaaacaaaaagcagagatcattaaaatcatgttgtgaaatggaattataaaatgtaacctaacgttatttagctgtattactttcaaaacttaattctgaaagttcctcaacatttgtaacatactcatccaaatcccaactccagcctacacctaaaagataactttagacctatataaagacactcataatttcattttgaagaacttttaaacatatttgttctgattgggtcttattttcttcattcgaatggaaaactgtcaaatgaaagatagaaagcaaaacagcagagatgctccccttttatctgcagtcggagaataaagtctaagaagggctaattcaaacgtgaaaagcattatgagatgggggcaaatgcagccctttgtaaactgtgctttaaaaaaaatggtggaggtgttgtgaaatatttctgactttttctaactagtgttatatttaggagtggagagggacagaaatccttttccttattttacaaatggacaakcattgctagtattctagctattccttttgcaactaactgcaagcacaaattagtttttttgtttgtttgtttgtttgagatggagtctcgctctgttgcccaggctggagtgcagtggcatgatctcggctcactgcaacctccgcctcctgggttcaagtgattctccagcctcagtcccccaagtagttgggactacaggtgtgtgccaccacacctggctaatttttgtatttctagtagaaacagggttttgccatgttggccaggttggtcttgaactcctgacctcaggtgatccacccacctcagcctcccaaagtagttgggattacaggcgtgagccaccacgcccagccacaaattagtttttatgttctagcccctttcctttttttcctagataggaatctgaaaaaatattctgaaaaagccctatagttataaaaataacagaattggctgtaacttcttatgtctatctaagtcacagacatacaagtttatacattaaacttcaatttgtattattcactctttattcttcctgttttaatgatttggaaggataggtaagggcctatgtatcatttttcttctgtaaatcctgtgaagataccttttccaaaaggttgctgtatgatcacaccaacactgcaagaagtgaacccctgggcatgaaattatattctttaacatttggtatctgcaagatgccacaaattctaggattaaacaagaattatatttagttgtctagtaagaaatgggattttgtgttccctgactagatactatattatacctttcataatttgaagttccttttttttttgagacggagtctcactctgtcacctgggctggagtgcaatggcccgatctcagctcactgcaacctccacctcccgggttcaagagattctcctgcctcagcttcacgagtagttgggactacaggcgcacaccaccatgcctggctgttttgtatttttggtagagacagtgtttcaccatgttggccaggctggtttcaaactcctgacctcatgattcacccgcctcggcctcccaaagtgctgggattacaggtgtgagccaccgtgcccagccgaagttctcttttttttcaactaagctaaaattttttgttttaaaatgttttgtttttatagttatgtggatagtaatctaaaatcacttgaattattgatagggttcctcccatgccaacacttcccttaagcatagctagtttctaggtggcaaagtaatctatattattgtcttagaattttaccattcatcccaagacttctagtttagagggccatgttatcaagacaaaaagttaacatctgcaacttttatstataatcctagggattgggtttctttgaaacacactgagctttgggaactgatgtataccttggaatagaagacgttttttaaaggaattcattgtgactttgctagacaagctgaagttgaatacagtacagttcacttgaatgataaacatttattgagcatctactgtattactggcactgagaaaatatgtgtcatgcaaaactgaatatcccactatcatgttaaagaggtaatcatttacagacagtcaaaagatttcagaagaaaacaaatgtgtttatagaatgtgaactcagaattaactggagaccagattatattctttaacatgattttcaaatttggttttgaaatgctttagagcattttttattatttccaagggatattctagttatggaattttggaaagtctaaaactattttaagcattttatgtagactgatcctggactagatatgggtgtccctactcaacaggtgtgattttagatgtccaggtggatttttaccttattcagggccaaaaagtatcccttaatatgtcacagtgactaaaatgttatcactgaagtgttattcctttggatcttgtgagttttttttttttaatctttgatatttcctcattgtaagacaaggaccaatatcactgatagttattctgaatacaggccttatccctttaaacagaaatatacaaacacctcttaaagaaaaaaggcaacctattttaagcagtattgtcctgagtttctggttctttgataaaccttccttttaaaaactcaggttggaccagcctgggcaacatggtgaaaccctgtctctacaataaatacaaaaattagccaggcatgatggcacactcctgtagttccagctacttggggggctgaggcaggagaaccacttgagcccagggagctcggggctgcagtgagctgagattgcatcagtgcactccagcctgggtgacagtaagaccttatctcaaaaaaaaaaaaaaaaaaaattaggttggaaaaaaatcacagtcctagaaaggaaaagaaaagcaaagctgaaaatgggaaaatatcagtggaaaatttagatgagcttactcattgcctgattgtgggtttttctatgtcaaataatacacattattactgtctcttcctttcatcattcccatcggtgacaatagcaagccaacgatggtttgcctgaagtctcctggtgtttatcagatcttgttttctttctactccccacctcaccctgccctcacattaggaaagcctgtaagtagactcaccgtgccaccatgtggctaaagctcgcatattctttagagtcagtacagggtaataatgggcagtttgattctcctcctgctgccacctggaagtacaacacgttgccactctgcttcattcacgtaatgtgaatctccatacagaaatagccctgttgcatatctctgtggcattaggacctctccagaatgcatatctcttcactctgacagaaaataagtgccagacttgggggttatgatatcaccaggaaaaagtagagagtgaggtatgtggtctctgtactcttccccagttgattaacatgagtattcctctgatcccaaatttcttggttttggcatctgatgggaggactgccccagtgaccaagcttttggatccattcattcccaaccttgatcaggctggaaaaactttcagtctttctcattagaagcatataaactgttcttgacttcatgacttccttaggccctgcaaacagatcaatcttgagagagtgctcatctgaatccccacaacctactgttttctcgttcatcttttggttctatctttcctaacaattgctgtgataattccttcctttctttttttcccctaccaatattctgtggtgaatcctgaaatttctttctctgccttccccacctgccctgactgttgtgaggatggtttttctgtgggaggtaaaaatttgtgaagtaaatattcagagatatgtggcatatatctagagaacatatatcctgaatttttctaagatcatttatttcagacattttatataaacatttgatagttcacatgtattagaaaccatgtcctgatttgtgacttaggaaacaggagtatattataaccctatcctttattgttgttttatgatatggttgcaggcagaaaccatcctgtatcaagtttttcaacagtagaagctttttcaccatgtcctaagttcagtatgggttgtcccggataaactccagatttggcatactgacttgattaactgtattacctttagggataagggttttcctaatgttagtatgtgtttgtgtcctccctctgcaccaaaagcaaaccctcatccaaagctgatgtcaaactttgccatatcagtggcaggctgtgtgatattagcataaaaccaaaataacactgcaatgaattgatacttatagagcataaaaccaggccaacttaaatgttaagcagagattcacagggtgggagaggggcaagaaccctggacaaaactaaacatttgaataccactctgtcctcagcagtgtgcccagagctctcatggatgtttaattctcacaatgaccctgtgagattgtaagtggtagactgcgctttcgagatgatgaagcagagttcagatagagtaactggtctttctcaggtcgaaagaaagatactttattaagctgagatctgagatgttgtctcagtaacagtagtaacagtctacttggtaccagtgtactctgtctgatttaattcattgttcataccatctatttgaaaatattcttaacttcccaacatatctgatgcagagcagaagcttatgagcacatttcttccacttgaagtgtgtgaattgcccttgaaccaacttgacaattgtggtaaacctagaaagtcctcctcaagtttaatcttcctttctttcagaagtcaagacctctttgatatcttaaggtgccctatgcctcttgcctatctgttttgtccttatttccaaagagaagaaatatggattatagattcgcagtttagaatctgtagagacgaatgtgttattttcctctggaatcctcatttctactctatctcgtttggctctccagtatctcagactcacatgttgccttagctggctttgaaatgtattataattaaatgatataaatagggccctaaggtgaacccatgaagaaggagtcatcatgggtttcctctctggtgaactaaagaccctttcacatctttgtaaagaattgggagcaggccaagcacggtggctcacgcctgtaatcccagcactttgggaggccaaggcaggtggattacctgatgtcaggagttcaagaccagcctggccaatatggcaaaaccccatctctactaaaaatataaaaatgagttgggcgtggtgactgcactcctataatcccagctacttgggaggcggaggcaggagaatcgcttgaaccctggaggcggaggttgcagtgagccgagatcgtgtcactgcactccagcctgagcgatagagcgagattccatctcaaaaaaagaaaaagaaaaaagaaaaaagaatcaggagcaaatccaaggaaccataattgaagcttatattcagattcagagatgtagtcatcacaatccaaaggaatccatggggatgctatgctccatattgctgcagtattctagtttgcccctccagtctgtggcacagtgacgctcatcacaagagccagcatgtggattagactcattgtgttgctgctaccatggaagttgttcatgagacaacttaagttgtcttaggatcacagagcatcttgtccaaagtatggtatacccttgaaccatagctattagaccgccatcttcccaccatgaccagacagaccaatgagcactgtctggatgggaaagaaaataaaaagtagtttggaaagtctcgacttcctcgtgaactatatacctattttcacctctgtgtgaactctggattccttcgcctctatgccctgctctgctaccctcattttcctcaggttaaatgttaagaacatcctcctgggagctactttgtctctgccctctgcagaggatggtttcaaatgaggactagaaattctgtttagtacttaaatgagttcatttaagtatgcttaataaagtatgctgaatgaagactcactggttgagcaaaagaccaaatatgaacagcagttgtttgactattgtttacttcccttcaagggtggtcatagtattagactttctgtagttaaaatacagatgaggccgggcacggtggctcacacctgtaatctcagcactttgggaggccgaggcaggcggatcatgaggtcaggagatcgagaccatcctgactaacacggtgaaacccagtctctactaaaaatacaaaaaattagccaggcgtggtggcgggcgcctgtagtcccagctgctcgggaggctgaggcagaagaatggtgtgaacccaggaggcagagcttgcagtgagccaagattgcaccactgcactccagcctgggcaacagrgtgagactccgtctcaaaaataagtaaataaataaataaataataaaatacagatgagggtagagagggagatgggaaattttcatactcttctcccaaaaacctcttcttaagtcaccttggtttcttctagcttctcaacaaattgcccttcacttaagtgagacctaatcaactcaaatgtctgcagactttttggtggccaaaaaagcaactacatataagttcataaatggaaattatttatttataattggttgtcataagagcataagcagatgagggtttctgtttcctatcaaaagtacttaactgccagcaacatcagtcacgatctaatccttggaatgtgcagatgatttcaagcagatagattcacaaagtaatggaatgtttgtgcttctctggcatcaggagatcctgaagatttttttttttttttttttttgagacagagtcttgctctttcgcctgtgctggagtgcagtggcgtgatctcggctcactgcaaggtccagctcccaggttcatgccattctcttccctcagcctcccggcgtctgccaccacgcccggctaattttttgtattttagtagagacggggtttcaccgtgttagccaggatggtctccatctcctgacctcaagatccgcccaccttggcctcccaaagtgctgggattatagccgtgagccaccgtgcccggygatcctgaagattttttggagaccactgtggtgtaraaaaatctgtggttacagtaactctcctgcttagctggagtttcaagcttaccactcatgtgccttctttctaaatcaggcactttattgagtccttcctatcgtggaagacaagtgccattcaattccttgccagcattcttttcctggccattcaccaggcttagagattgttccctctcttatttcactacagaggaagccttgtcttttgaaaattagtatttaatttacagggtcctgaggttacttatttcattaaacccattcaaccaataagggaaattcattaatgactgcaattaacaattaattttgccttcagtttcttgatctctgttactgcagtaacattagcygtatgaggmgattctcaaaccatcagaggttgttgggatgaagtataaggacctctaatatttagggttatgcacacaattcctgttacattgtttgaatgaatgtgattcctggatcctgccccaagactgcagtcagcatcaacttggctttaacggacaattctcccttggctgatatggcttagtaattctgaccatagtggtataattgagataactttttgctgctctgtctttaatagcacttactcttaggcttacttattactagcttattttctcaccttctgaaaattactagttggttgtaggttgtccttcctgttaaaaataggcacttagaaaacagtcaccaataggcaatctggtatgtaaagaacttttggagaagtgtaaacatagcctctctgatgtagcaacacagtttttcttactkcctcagcagtttcatagtacagaaaccagtaatgcttggctttccttttgttcatagacatctagtggagttcttatactattcagcccttcaccctttgtacattctgcagaactcttctcctagaagagaagagttgtgctgctctccatctccccagatactgattcctgtggagatctactatgtgatgatctttgcacattggctgtggcccaggtcattgtctgtcttccctgtcttctcctttccaaatactatatataggtgttgaaacaggttcttgggtcacttcccaggggtagtgctgagtcttttggacttatattatgtgagtagcctaaaaggaatggtcatacctggagaaggtgctgtccactatcaagtaaacaattaccttcagacaatctggtatgcaggtaagtgctacatgtttttctaatggtacctttattgttttgtaactataccaatataaaggcatacttaggccaggcatggtggctcatgcctgtaatcccagcactttgggaggccaaggctggaggatcacttgaggtcaggagttcaagaccagcctggccaacatggtgaaaccccatctctactaaaaatacaaaaaattagccaagtgtggtggtgcatgcctgtaatcccagctactcgggaggctgaggcaggagaatcacttgaaccggggaggttgtagtgagctgagatcacaccactgcactccagcctgggcaacagagcgagactctgtctcagtaaacaaacaaacaaacaaacaaacaaacaaacaaaggcatatttagaagaaatgtgacaaggagtacaggccagacctctggatctgtagcaaggtacaacatgggtatgtttttactatttgtgtggcaccttagtgctctgtggtaggttgtaagtgctcagtaaatgtttattgtggctattatcattactagtattatttagaattcaatgggaaaggttagtatggagagttcacagttgggttagaatatactctaaaatctttatttttttaaattgtggagatttactttaaggctataaacaaattgtctctagttaaaacaagcagttagttaatcctttctatagcttagtcctaatatagtagtgtgacactagtaattgcttttagtcttagaggttagtaagtaggactgtttcttattaacttgttagggcagcatgaaatgccttgcctacccagggtgcattccattggactaagcaattagaaattagaacaggattactggtagttcatttcttctatactactgctaaagttctgattatataaattcttgtgtgtatgttgtaaattcctaattttttttccattttatttcaaaacacccagtgaggaccttccctacttgagttgtaagactggtgtggacattcttcatgatacttaacatgggttttccttttcttaattacattgcatgatctctaaataattcttccttctcctgggcaagagtacctcccagatatttatacacatccatgttttgttttttttttgcagttgaactggcaatgatcatggaccgtttgtayggtggtgtctgctatgctggcattgatacggacccagagctgaagtaccccaaaggtgctggccgcgtggcattctccaatcagcagagttacattgcagccatcagcgctcgttttgtgcagcttcagcacaatgacattgacaaacgggtaagcacctacttagggtgaaactgctatgggagagaaaagaagtttgttctgtagtttcctgggaagaaaggcaccttatgatcataagtgaccagctctaccttgcatggcattagtccatgaattcatctaggctgcctgaaaaagagagcactgttgatatttaaggcattaaggaatcttctgcctcacccatccccagagtgatgttacacttatgaaaataatcctgcaaaatttagcataccaaactagtgctgttcagaagatgacactgacagtatgttagcagaggtggagagctagtgacctgcttgacctacacagtgctcttaaacaacaaagaaacttagattaacatttaaacattcaggagtatgtatgagatgttgaacttctggtttgaaaattgccaaatgaccgggcgcggtggctcacacctgtaatcccagcactctgggaggccgaggcgggtggatcatgaatcaggagatcgagaccaaaccatcctggctaacacggtgaaaccccgtctctactaaaaacacaaaaaaaattagctgggagtagtggcagacacctgtagtcccagctactcaggaggctgaggcaggagaatggcgtgaacctgggaggtggagcttggagtgagccgagatcgtgctactgcactccagcctgggcgacagagcgaggctccgtctaaaaaaaaaaaaagaaaattgcaagatcatacattgtggcaatcattggagtcaaatagctgcttttcccttcagtctcctcttcaactcattctgtttctcctgcttccaccatatatgcacatgccttacctgccacactgttcattggtgttacctgcctgccctctagagacattaagagtgctacctctgatgtaaagagggggcatgaagtagagttttaggcagttggtgtacttaatagttttgcagattggcatgagtttaaattcyttgaatcccagctttgccactgtttgcaatcttaggggtatggaaggcagtaagagccaatctggaccctgtattaataaatgaaaagagcatgtaggagaatagcaccaagtcttttttttttttttttgagacggagtcttgctcagtcacccaggctggagtgcagtggcgcaatcttggctcactgcaacctccgcctcccgggttcacgccattctcctgcctcagcctcccgagtaactgggactacagacgcccgccatgatgcccggctaatttttttttttttgtatttttagtagagacggggtttcaccatgttagccaggatggtctcgatctcctgacctcgtgatccacctgcctcggcctcccaaagtgctgggattacaggcatgagccaccacgcctggccgagcaccaagtcttgaacacctgcctgtgcaactgtgcagtgactattaattcttctagtaaagaatgttcttggggcatcactggactataattaataaagtagtaaatctgttctatatgaagtttcactaaatatcctctacagtcaactttgactaattttgtgtagcaggcaagtttcttaggtaaaaattttaactggtgatggatttttcatattcaggattatattttgttaagacatgtatccgatcaaaaactacaagagccagggcttagaataaatattctatttgctacttcactgagcttcttaagagtaagtggtagtggtttgctttttaattaaaatgaataaaataatttagaattttgaaacattctttaaattcatggagattcaaaagtgtaataaagattcaactccattcctggtttttaagtacccatagcaatctgagcatgggtaccaaactgaactccatgcatttttaagtatccatagcaatctgagcatgcccttttgtaactgtaaacccccacaagactgtaagctccacaaagatgggcatgctgtctcattctctgcctgatctccagtatttacccattgctcgatttagtcattgatgcttgataaacctttgttgaattaacacatggtgctacttggagggttcttttaacttctgctgctgttgctggtagacgtgcttgtgcctgtacatttgcgagtcatataccagattccattacatcgagacctctatcgcaaccatcactggcgaacctaggcaatgaacttaacctgaagagctttgggttcttatttatatggaagtagctttcttttttctcctctaaagccagaactagtgactgtacaggaagtaggtcctggaaataataaaacctggaggaggcctccatttctccatgtttctaccttccctttgcctccattctacggacctcctggcctatttcttagtagagggagatatgcttgccccagggatttatagtagtcattgagcccctgtaagaatcataataaattcagatatatttgttttgttgcctaccgctattctcacagctactgcgaggctcaggtcctcagtatttcttcccacaagattagaactaagttaaaaaggagagaaatggctttgcttttgttagcatgattgtagaacatgctatgaaaatgtgtttggaacatcagacttctcagggctcaggaaagccattgacttttctgcttgctataattgggttaaccatatactgtttatatctcagagtagtccttggtaaacatttaaggtagcagccagttgtagtggaaagagtagggaatttggagcaagaacagattccaatacatttaaacctttgctgcttcaatcagtcactgtcaagtccragcaagttacttaaggccagaagcctcaggtcctcatctgtaactccttcctggggatggtctgaagattaaatgaaattttacttctcttaaggcaggtcgaaaggtatttaaccagcaagtattcatcttgctacaaatgtacttaatatttatttttgttaatattatatagcttgagttttaaaagttgctctgttgaagaagtagcaaaaaggtacactggttagtgaaaacagcactggtcccgagtcagatggcctgggtctagatctggtcttgttctccttggggttatatgaccttgggcgggtcacttaaattctgagcttcggtgtacagtgaaggcaatagtaatagccttgggcatcccatgagattggtgagaagcctggaagagagattattcaagaaagcagtatgtacactgtgtatgtgtatggtgggactgttgcagtgggcacaagaatgctacttccatgtgatattggaaaaggacccaacagtttcttcagtgccctggggtgagagtcatctgagtgggaatactggaagtcattgaaagtggcaaagtccctactctccctttttcccctcagggaccagctccatcttcttcgtttgccctgaccaatatggagatcttttcccctccccttcactcccctcccctctcctcccattttcttcccctcctctcccctcccttctcctcccatcctctctcctcttcttcccttttcttctctttttgtgacagggtctcaccctgtcacccaggctggagtgcagcttcaacctcctgggctcaagtgattttcccacctcaaccactccaatagctgggatcacaggtgcataccaccatgcatggctaatttttttgtatttttggtagaaataaggtttcaccatattgcccaggctgggctcaaattcctgggcttaagtgatctacctgcctcagcctcccaaagtgctggaattacaggcttgaaccactgtgctcggcccaacatcctttctttattatgagagacgcaagccaacttccatcttgagttgggctctttttcactgttcatctgtgaacattacattcccttccccmgaactgttactctgtccccttcgttttcttcttgcttagaatatagccagtagtactttattttattgcctctggcattttgagcttctgttaactacacctttcataggtacatttttaggttcattcatggttttatttttattcatctttctcctaaagcttacatttaagctttccagagagctcccatttcatataagcacttttgtatttccttaggtaatgccctttttctttttcagaaaaaatgatcatccatgattgtctacagagaatttctatcactaggcaaaccttgtttcctgaataacctctccaagtttttagtagtagtctcatatctcatagaaaggttctgaaacttgcagtgctaaaagtcaggagcacatgtccacctgtgtaaacagtcccttttccttgctattacagattccaaggtgccacagtcatttccttcctccctcccttcttccttccttcctcttccttcctttcccttccccctttcctcctcctcctttcttctctctctttcctcctcctcctctttctcccctcctcctcctctttctccttctttttcttccttcytccttcttctactttgaaacctttatttactttcccatatcaacaaacatgagtaggccaggcacagtggctcatgtgtataatccmagcattttgggaggccaaagtgggaggagcacttgagcccagaagttcgagaccaacctgggcaacatacggagaccccatctctacacacacagagtttttttaaattagccaagtatggtggcacatgcctgtgtgattccagctatagggagaggctgaggagggaggattgcttgagcccaagaggtcaaagctacaatgagctttgatcatgccactgtactccagcctgggcaacagaacaagaccttgtctcaaaaaaataataataataaatcatggattattatgtgatgattatgtagtggctaagtcttatatctcctcaggaaaatacagtactattgagtgctgtggactctatagagaacttcagtctttggtcatagcattcatctccttccttctgatgggagcccagagttggctttaaaccaataccttgactattttaagtagcatcaacctttattacctttttactcaaagcatctcctttgctgtctgcatcattataaatatagatgcagtgaatttttaaaactagagatggcatttaagggtcacttacttcctgtttgcagcccttatcccttaaggagagtgggagtgggccacctgcagagcagcaatgcctgaccatcaagtgagacaattcattaagtgttggaacaatgaaagcagtagggccatatgaggtgtgtcccctcaggttgcaactttcttgtgtacagtgtggaaggtacatgaagaagaaattaactggtatatctcctttayctcttttatatccaaccaactttttccaaaaaagatatctcttttgagagtttatatgtttattattgttgttgttgatctttggcgaagcttttatatggagtgtttcatgggagaaatacaagctttatagatttgatttcttctcaccatcttagagactttttggcttgcttgtgaatagaaaatatgtcagtaggcaacatttatattatttaatttatctttgttatcctgtagatttggtacttttatctctgctgtcatttcactcatccataatctcatggtctttaaggaagaggtgtttttgttgttgtttgtaacagctttattgagctgttttatgctattcacatagcatacaattcacccagttaaagtgtacaattacatgttttttcgtatatttacataactgtgtagccatcactatctgttttagaacacagaggtatttttttaatcatcccgtatttcatgtcttaagaaacatagaggtgttttaatgtacagcctttaagtctgcaataagatcaactgcataataacaatagcggaatggtggtaggggatacactttattctctgtaattattcagctcataatatagagaggatcctacttatttaacctgtgctcttcaaagttacaggaacaaagtagcccaggctcttgggggaaacttctgaaccctgctattactgtgattagagtccctcttgttggagtaagttgataaatctacacatcagcaacgttttgctgtggcatgtccagccacgggaggactaagagaagtggaagaggcttcttctactaggagttcctcacagagctgctatgatcttaattctgtcacttttgctcaggagtctgaatggaagtgcttggcacacagcaggcactcactaatgtgcagaatcaagtaggaggatatataggagggtaaggactggaagcagccatggaagcctggatactagacatctagagtcatctctcaactggacatctagcatatcttcccctatggctccccaattcacttttatcccatctccaagtcattttttacacagcaacgagagcgagctttttatactcataatttaatcatgtcttttcactcctttaaaccttttgattatgttccactgcccttgggataaaggtcaaagtccttaaaattgcctaaatgacccttcatgtactatgtacttctgccttaccactcacttctcccttccttatcttgagccagccacagctggccttttcccctatttctcagggtcattatacatacgttgcctggctaatacccacttttccttcaggtctcagctgaattgtgatatttttaagaatcctttcttcattggagcttatacgtccccaatagattgttgtcataatacatgtctaccattcatttgtagcattaaatgccagtataatgaaataatgctttgtttagtgtccatctactctgttagatsatacaaattcaggagggtaataactgtctttcagtgtaactacagtatacacaatgcctgacacctagtggacacacattaattatttttgaattaatgcgtgaatgagttattatagtgaatgaatgaagattgagaggtgacccaagaggccagacacagtggctcatgcctgtaatcccagaactttggaaggctgagctgggaggactgcttgaggccaggagtttgagaccagcctgggcaatgtagcgagatctcattctcttaaaaaaaaaccatttttttaattaaaaaaaaatagttaaaaagagaggtggctcagatgggaagaccttttaaaccattctttcacatatccaactgtccaccagagagcactttgcacagctttctttttctacttagttaaggacactctaaagaaatttagatttcgctgttcagaatatcaaaagtgttttttggcacttataatacacccaagttggacttaactttaggcatgacctggtccaaccctctttgttttgcacacaggagaatctaagagaggtttggaaactttctcaagatccttgacaactgagggcagagctgtcttttttggacgcccttcctgagccttgctgctcatccagggcctcgcacctataatcctaatgttttgggaggctgaggtaggaggatagcttgaggccaggagttcagcttgaggccaggtgttcaagaccagcctgggcaacataacaagaccctcatctcgccaaaaaaaaattttttttttaaattagccaggtgtggtgacacatgccagtagtcctagctacttgggaggctgaggcaggaggatctattaagcccaggagcttgaggctacagtgagctatgactgcaccactgaactccaacctgggtttcgccacgttggccaggctggtctcaaactcctaaccctaggtgatccacccaccttggcctcccaaagtgctgggattataggcatgagtcactgtgcctggcctctgaaacattttgttgtaaatgacacagatacggccaggcgcactggctcacacctgtaatctcagaactttgggaggccaaggtggaaggatcacttgaggccaggagttcaagaccagcctggacaatatagtgaggcccagtctctacaaaaaataaaaaaaattagcagtgcatagtggcacatgcctatagtcacagctacccgggagactgggatgggaggattccttgagcccaggagtttgaggctgcagtgagctacgattgtacctgcctgggtgacacagtgagaccctatctcaaaaaaaaaaaaaaaaaaaaaaaaaaagacagagattcatgccttagtttttacttctaaggaaaaaagtcattagcatcttgaaataaataaataaaggcttaccttatggctcatgtttactagttattggctgattggtaatttgtccctgtgttgacaatgtcaatgttgtatgatactcagcacataattctcagcatttcttctgcctccgcatayttgaggtgtatgttacactcgtgcgtaacagaggctccctagaactctaatagagtggggcagtcacaggcatgatcattagtatgtaagtgggggatacatcccatactcaactctgtccccacctcctagagaaccattgctgtagttgaacaaaacaaaacaaacaaacaaacaaaagtactggcttaggaattcagagatctgggtctattcctagctttttccaatcgtggtatgatcttggrcaaactgcttaacctttagaggcttgatttcattatcctgaggtaataagaacaccagcctaactacctcacactttattgcgcagataaaccatgacagttgaagaaatgctctgggaagttactaggctgaacaggcagatgttgatttgtattattgctgagcctggcctatttaaattgtgctatggcctaatcatacgtccaaaggctaattgttggctcttttttttttccttttaaagtatttattcagttccattaagtatccttgatataaggaaaatgaaatagttgaagttgatactttaaaaaaggttaacataggtgccaatctgtcaacattctggttggatgttagtcaagacatgcatgtaaagacttaagttccttttatagatgtagacaactgggtatgttttttcatttaaaggatcgaaggcttttttcatttcagtcttgaaagtggtatttttaccagtatcttttcgatactgaaaagattttgaacctgaaatgaaatacaggttaggattaaattttgcttatattcctttgaatggtgtttctataaaaaactgagtttaaagtatttaaacacaataagagccaaagatggcacctgtacacattctttctgttctagtggtatttttagaagtgatgccaaatgaactcttaagatgtaaaagctttgctaaatccasttttttaaatgtaatggaaatctaggtcatttacatatgaaagatttttgtagtatgaaaatgagatcattgaaaatgggtaattcttttatgtggctggttttgtattgtctactctgtgtggtcatgagaaaaaaattttttttttttttttgagatggagtcttactctgttgcccaggctggagtgcagtggtgcgatcttggctcactgcaacctctgctgcctgggttcaagcgattctcttgcctcagcctcccgagtagctgggattacaggcgcctgccaccgtgcccagctaatttttttttgtagttcttagtagagatggagtttcaccatcttggccaggctggttttgaactcctgacctcgtgatccacctgcctctgcctcccaaagtgctgggattacaggtgtgagccaccgctcccggacagtcatgagaaaatttttaaagtgtagaatcagttgaatatcccttagcctagcaaaaacatatgacttgatagatatgaaaaatttgtttataaaaatctggggcaactcctgctgccccccaacacaaccrktgtctagctcagcttggtcatgttgwccgctagaaatttgtaaatcagatctttacaactttaaatgcatcatgcagtagacattggttatagtttcccaatacatcccatagaaatatttttactagtagaaaggatactagactagaatcagccaatctggggttttagtcttgactgtatcacttattatatagcttgaaggaagtgtgtgtgtgtgtgtgtgtgtgtgtgtgtgtgtaaatgaaagtgtttttgaaaactgtaaagcactctgtcaatatacgatagcactgataacacattatgtcaaaccatggatgactaatatttgaactcttctggaagatgcttattaaaaacaatctaattggaatttcaggtgataaagggagttaaatatttcaggcaaaatcggggtaaagttggttgattatttgagtttttttttttttttaaacctgtcactgacttgaagcttatatatgagttttttatttttatttttatttttgttgttgctcttgttgttttgagatggaatctcattttgttgtccaggctggagtacagtggcacaatcttggctcactgcaatctccacctcctgggttcaagtgattctcccacctcagcctccggagtagctgggattacaggcacccaccaccaagcccagctaatttttgtatttttaatggagacagggtttctccatgttgaccaggctgtccttgaactcctgatcccaggtaatccaccctcctaggcctcccaaagtgctgggattacaggtgtgagccactgtgtccggccatatctgaattttttaaacagaggaagagatctcagcaggcaggtcttctctacccatattctagggaaaaagtccctacaattagttcctctgtgtttcttaaagtatgctccataaaacatgagtctcctgggattttattatctattttatttaaaaaattttgctgagtcaaatgagtttggaaatgcttgtttaaagaaaggctggtttattctatgacatattataatctttcatatactaatcttcattgtgaagacccaagaaggaggcaatatgcagtttttcacaaatttgtttcgatcatggaaaaatgtgtcatttcttggaaataatgttttagagaacccagttgagaaaaacactgtgtttgcagcttctttccttctttcatgctcaaatgcagaagcttaataagcagttgattgtttttccctttctcttagtccctttttttccaaatgtgtcccatctaccatgtattttatatctacagagggtttcggacagggcaaggaaatagcaactgcatgtccatgtagtagtggggcattgacattgtggttgatattccctttagtatttgtaattctttatcttttgattatttgagattatctgtcatatctaaaatgtctccatataagaaggaaaaatcgttgttgaaatcagtataccattgacaaagtgttcccgtgactctattttagcttcatgttgggaaccagagcgacttttagtttgccaattttggactttctaatactttttatttaaagaacattgtagctggcacagtggctcatgcctgtaatcccagcactttgggaggccaaggcgggtggatcatttgaggtcaggagttcgagaccagcctggccaacatggtgaaacctcatctctactaaaagtacaaaaattagctggacggtagtggtacgtgcctataatgctaactactcaggaggctacggcaggagaatcacttgagcctgggaagcggaggttgcagtgagccgagatcacaccattgcactccagcctgcgtgacagagtgagaccctgtctcaaaaaaggcattgtgatagctaagcacaaaatatttgctttgagtagcatgttctttagaatagtcaattttttatttaatgaccttttatccattgtaccattctttgcaagtaccttaagtacttaatatatttaatctttttttctctctctgtttagttgacacatgttgggcatttactagactaccaaagggtgtatatttttagcctacacgaagactaatatgacccatatttccattaggaaccatactaacagaaatgctgataatactgtactttgttcctgaccacagcaggaatatatacaatgactcaatagcaaaagaagtaaggatgagatgacctgttctcagactatttctactcctatccttagttgggattcatacaacccagcctttatcttgctgctcttagtggtccctgcctgacctggcttgaaagcttcctagctgtgtctatagctatgtttgacttgaccctagaggaaacaacactcagaagtgagttcaagtatcatctgaactaatcctacctgggcttattttgaagtactgggagtcccagagcccttgactagaaatagttttttaaagggagtttgggttatctaaaggaaggtaaagatctttgaatggaatagaaccttttgtccatgctctccttccacrtcctgacttctgactctcctgtcctcctctgttctttcatgtctcctcccttggacttgtgatcatttttaatatgaaaactctttacagtgatttaaatattcatctttcctgctcatagttgagtgtagaggttgtttatgagataaagaattggaaaaaagtccattgccttttttctaaatacttatctcagtagaacattcagattcaactctagaagtcaggtgttagaagtaagttagcagtcttttggtgagtgcttattcctacttgttgaaacccctcataggctaggggaaacagaggcccgtgaggttgtgttatagccagggtgctctgcatctctataccctgagggggtgataccatgatagttactcatttcacatttttaacgattttcttgccctttgttcactatatgacactagcacttggttttggactgatttatacccatacctccagccccatttccaagcagcatagcaggaaaccagactgtgccagatactgtcagcccacccctctgtgtttcatgaaaacattatcttaaggctaaacagagcagccctcatagaactctttgcactccataaacatatggcagaggcattgacacagaagccctgctatgggaaaataagtaagttcttaaactgtgggaagggcacaaaggtaattttaaaatctttcataaccctagcacttgagaatgtgaaaaatggtaagtctcatcctttgtaaggtaaaaacaaaataaaatcccaactgtttcccctctgatttttaaaaatctaccctagattgcttctaaaattaataactgtgggtttgctatatctgagacatttgttggtgtggaaaagctgttttcacattgccactttaattttatctatttttatttatttattttttcgagatggagttttgctcttgttgcccaggctggagtgcaatggtgtgatcttggctcaccgcaacctccgcctcccaggttcaagcagttctcctgcctcagcctcctgagtagctgggattacaggcacgtgccaccaygcccagctaattttgtatttttagtagagacggggtttctccgtgttggtcaggctggtcttgaactcctgacctcaggtgatccgcctgcctcggcctcccaaagtgcagggattacaggcatgcgccactgcgcccagcctgccactttaattttctttcttttttttatttctttgagacggagtttcactcttgttgcctgggctggagtgcagtggtgctatcttggctcactgcaacctccgcctcccaggttcaagagattctcctgcctcagcctcccaagtagctgggactacaggcatgcgccaccatgcctggctaattttgtatttttagtagagatggggtttctccatgttggtcaggctggtcttgaactcctgacctcaggtgatccacccacctcggcctctcaaagtgctgtgattacaggcgtgtgccactgcgcctggccaccactttaattttctaggcatctgtcatctgctttctaaacaacagcattccagctcatagttgaaaaactaaaaatttatttattatttttagtttttttattaataaaatatttttatttataaaaaaataaatttatttattatttttatttttatttattttttgagatggagtctcggctgtgtcacccaggctggagtgcagtggcgtgatctcgactcactgcaatctccacctcccaggttcaagcaattctcctgcctcagcctcccaagtagctgggattacaggcacctaccatcatgcccggctaatgtttttttgtatttttagtatagatggggtttcaccatgttggccaggctggtttctaactactgacttcaagtgatccgcccgcttcggcctcccaaagtgctagaattacaggtgtgagctatcgcgcccagccaaaatttatgtttagacattctttgtattgtctgttggtggaggccctgctttagcgaccagaaagacaccatatttagtgggaatattaatgaggttacggtggtttttaggcctggctagatgtactgtatgacacatgccaagaagattatgatcacattatgtttaaaaccttttagcacaccagataaatgggctttccaagaagctatgttgctccagatgttaggaaatggcctaagtcagccagggccctttcatggggtgcccaggttcacattaaggccagatctgaaaacagggacatttatactcaacccttaattttatttatttacttatttatttatctatctatctgtctatctatttatttttggagatgctgttcaggctagacttgaactcctgggctcaagtgcatcagcctcccaagtagctgggattacaggcacacctcaccatacccagacaacccttaattttttaaacatttttcccttaaatagttctaaaaccaagtttttagtgctgctcttttcctagccattgcatagtatattttttaaaaaggagaactttgatacattattactgatctctgcttgatttgactctaaagagtcatagtttcaggattttggctgagctgacttttttttttgagacgaggtctcactctgtcacccagtttggagtgcagtggtgcagtcttagctcacagcaactcctgccttccagactcaagtgattctcacacctcagcctcccgagtagctggaaccacaggagtgcaccaccacgcctggccaattttttgtgtttttgatagagagggggggtctcagcatgttgcccaggctggtctcgagctcctgagctcaaatgatctctgcgcctcagcctcccaatgtgctggaattataggtgtgagccactgcacctggccgagctgactttttaaaggacaggcaaaacccaggtgtgagttcaaattatgacttgaactgattctaaaagggctcatgttaaagcactgagtcccagatgtactctttaaatgaagctattgtagtttaaatgtaatttattaaacttatttgaggtgctatgttcccttagattttctcagacctcaggaatgtgtctaaaaaaaacagtgaactggggttgaaattttcctggggttgaaattttcctctatcggtcagaaataatactcattttagaaatgctctttagccaggtgtggtggctcatgcctgtaatcctagcactttgggaggccaaagcgggcagatcacttgaggccaggagttcaagaacagcctggccaacatggtgaaaccccatctctactaaaaatacaaaaattagccaggcatggtggcacatgcctgtaattccagctactcrggcggctgatgcacgagaatcacttgaatccaggagatggaggttgcagtgagccaagatcatgccactgcactccaacctgggtgacagagcgagtgaccctgtctcaaaagtaaaattaaaaattaaaaagtaaagaaattctcttctcttgattgagtcatatatttgcaaccttcttaactaatacattgattacccaatatgggggacattatctatcatggcagtgagctctggttatcttgtgtctagacttagctctgttgtgttgcctttaacaattgaaaatgttgtatcaacagcttgcttatgttatcagttgatttctcacttctctttatcattgataactactttgtatggtctgatttctcgaagtaacctagtgagttaaaaaagaaaagttcaaagaaactaaattcctcattactgaggtatacctctttaatgaatataattcattcctaagaggtatcagagtatttctgaaacacacggtatattgagctcacattaaacagtgaccacgggacagcctctagttggtggagtttctacttctgatcctggaaatgctgtggatgtctatggccatattatagatgtctctattgtgaatcatggcctcctttcagccagcatagtgtaggatctccaagtgagtcaggtccttctgacaatgtcatgtccttctaaagtgaggtgctcaaaatggaaagccagagttgaggtttcttacccagagtacagctggctattcctttcagtggtctaaatattttgcctctgttgataaagcctgacaatgcaatggccccttgtagcatttggcctaaatctctgggtagtctggagagagacagaaggtactcactcaagtccctgtgtccagtagtttaccccaacaatgtgattatgagagcctctcctttgaagccagaagaggaacccaacctcagagctaatgttttccattcaagtagcccccatactacttctcacctactctatcttctggrttctctgaaatcaccactggagccagtattctctggattgacctctgtttgctagatttctcttaagcacagaggtgctcatgtcattatctctttcctctgatatagtatggcaactctacacatctcttctgcccttcacacccatgacctcaagttcattgttttccttcttatgacctgcaacagatccttagattaggtttgttctgttgtcagcctcttcatattcctgattctttgagttaaagccttgcttgatgtgctgcttaactacatcttctttacactttgacttaccaattttttgccaatttttttctttctttctttttttgacccaatactacactttggctgtgtgctgccaatttttctgactagataccagccttagatttattcctattaaattatatcgcttcactgcttctttttccagcttgtctactttgattctgttatctgaaatccttgtttctacttgccttctagtcactcataagcatgctttacgtgccttaggataactagatatctgactgatttttttttttttggatactgagtctcgctctgtcaccaggctggagtgcagtggtgtgatcttggctcactgcaacctctgcctcctgggttcaagctattctcctgcctcagtctcccaagtagctgagactataggtgcgcgccaccacacctggctaatttttgtatttttagtagagacgggggtttcaccatgttggccaggatggtctcaatctcttgacctcatgatctgcctgccttggcctcccaaagtgctgggattacaggcgtgagccactgggcccggctggtgtctgactgatttatttggwtgttcccaccaccaaagacagactgtaacagaggccagtctttggctgtccttaatagaacttttagtacataactcaaacttagcctgaccttggccaatgcctcctttctattactacarcttttgaggtctgagaaggaattctgcacctgcgaatagtttacggtctccctagtgtctattctctgccactaagagttgtttagccattgctttatttacttcaggaggtcagttttttgagtaataacaaaatgactgcagacggaaatattttctctagcttgttagaaacaaagcaattaagcattgagatcagtttgttaaaaagtatggctttctctttgtctgtagcattctaaatatattattccctttaccaacttctctagccactcatctaaggctccatatcaatccatcttatccttagtggttacaagctcatcagtaaattacatgtattcttcagcatctttgggwatagtcatctccattaggcttatgagtaggaatctaaatgtctctccataggtagttctcatctcctttgcctgcaaggccctttgaaacagaggttcagcttaacgatctgatcagctctgcatgggactctaatatttgagctttaatggtaatatagatcagtaacgtgatctcaccagactggtatgtccaaagtatcataggttaatgatattccaggtaatcgtagtggttaacagataagccggtttttattttgttatatatttgtttgttgggaaaaatagagttaatttggataatctactaaaatattaggtaatagtatagatgggactgggatatggcaaaaaccacaaatggtttgggaatgcttttcagaaactgttttatagagcataagttattttaggaaagaactttgtattggtctacaattcatttcagttttaataaggtggctgacaaggaacaggcactccataaatactagtcatgtgggtgaatccacttgacccaaaataatcacccttcartacgagccaacctaaacacccatctccttcatgcagctacttctcttttgtttttttgtttgtttgtttttggttccttatgtccttttattctttaacaatttattttattttctatttttgttggcaattttagctgggattataggtgtgtgccaccatgcctggctaatttttttttttttttttttttgagacagggtctcactctgttgctcaggctggagtgcagtggtgtgatctcagctcactgcaacctctgcttcccaggttcaagtgattttcttgcctcactcagcctctggagtagctggaattacaggcgccaccaccacacctggctaatttttgtattttcagtagagattgggtttcaccatgttaaccagactggtctcaaactcctgacctcaagtgatccacctgcttccacttcccaaagtgttgggattacagatgtgcaccactgtgccaagccaaatttttatacatagtgggtgtagatagtagatattttgatataggtatgcaatgtgaaataagcacatcatggagaatggggtatccatcccctcaaacatttatcctttgacttacaaacaatccaattacactccttattttaatatacaattaagttattattgactatagtcaccctgttgtgatatgaaatagtaggtcttattcattctttctgatttttttgtacccattatccatctccatctcctgccccaccatagcttcccactacgtttcccagcctatccttctactctctatgtacatgagttcaattgttttgatttttagatcccacaaataagtgagaacatgtgatgtttgtctttctgtgtctagcttatttcacttaacatagtgatctccagttctatccatgttgttgcaaatggctggatcttattcttttttatggctgaatggaactccattgtgtatatgttccacatttgctttatctattcatatgttgttkttttttttttttttttttgagacagaatttcgctcttttcacccaggctggagtgcagtggcgcgatcttggctcactgcaacctccacctcccgggttcaagcgattcttctgcctcagtgtccctagtagttgggattacaggcacccgccaccacacccagctaatttttgtatttttagtagaaacagggttttaccatgttgtctaggctgatctcaaactcctgacctcaggtgatccacttgccctggcctcccaaagtgctgggattacaggtatgagccatcgtactcggcccattcatctgttgatggacacttaggttgcttccaaattttagctattgtgaacagtgctgcaacaaacataggagtgcagatatctcttcgatagactgatgtcctttcttttgggtatatacccagcagtgggattgctgaatcatatggtagctcaatttttacttttctaaggaaactccaaactgttctccgtggtggttgtactaattttcattccaaccaacagtgtacaagggttcccttttctctacatccttaccagcatttgctattgcctgtcttttggatataaaccattttaactgaggtgagatgatatctcattgtggttttgatttgcattgccctgatgatcagtgatgttgagcaccttttcatattccgtttgccatctgtatgtcttcttttgagaaatgtctgttcaaatcttttgcccatatctgattggtttattagatttttttcctatagagttgtttgagctccttacatattctggttatgaatcccttgtcagatgggtagtttgcaaatattttctcccattcagtkggttgtctctttgttgattttatcctttgctgtgcagaagttttttaacttgatgtgatcctatttgtccatttttgctttggttgtctgtttgttggggggttttgctcaagaaatttttgccaagaccaaygtcctaaagatttttcccagtgttttcctttagtagcttcatagtttgaggtcttagatttaagattttaatctattttgatttatatatatatttttagacaaggtcttcctctgtcacccaggctagagtgcggtggcatgatcttggctcactgcaacctccacctcctggattctcatgcctcagtctcccaagtagctggggttacaggtgtgcgccaccacacctggctaatttttttatatttttggtagagatggggtttcaccaygttgaccaggctggtctcaaattcctgacctcaagtgattcacccacctcggcctcccaaagtgctaggattacaggagtgagccactgcattcagctgagggtttttatcatgaagggattttgaattttatcaaatactttttctgcatcaattaaaatgataatatggtttttatcctccattctgttgatatgattgattttttttttttttttttgaggagtctcgctctgtcgccaggctggattacagtggcgcgatcttggctcactgcaacctccgcctcccgggttcaactgattctcctgcctcagactccccagtagctgggagtacaggcgcatgccactatgcccagctaatttttgtatttttagtagagacagggtttcaccatgtgggtcaggctggtctcaagttcctgaccttgtgatttctgattttatttatttgaatcttttctttttcttagtctggctaaaagtttgtcagttttgtttaacttttctattgtctttttcatttcaattgcattttatttctactctgatctttattatttcttctattaattttgggtttcgttctcccttgtgtttctagttgtttcatcattagattgtttttttgaagttttttccccgttttgatgtaggcttacactataaactttcctcttagtactgcttttgctgtatccataggttttggtatgttgtgttttcattatcatttgtttcaagaaaattttcagtttccttcttaatttcttcattgacccactggtcattcaggagcatgttgcttaatttccttgtatttgytttttctttgtttttttttttttttttttttttgacagagtttcacttttgtcacccaggctggagtgcaatggcgcaatatctcggctcactgtaacctccacctcccaggttcaagcgattctcctgccttagcttccaggtagctgggattacaggcatgtgctaccatgcctggctaattttgtatttttagtagagacggggtttcaccatgttagtcaggctggtctcaaactcctgacctcaagcgatccacctgccttggcctcccaaagtgctgggattacaggcatgagccactgtgccccactcatgtatttgtatagtttccaaaattccttttgttattaatttccagttttattccattgtggttacagaagatgcttgatattatttcaatttttttgaatgttttaagacttactttgtgacctaacatatgatctatccttgaggatgatccatgtgctgaggaaaagaacgtgtattctgtagcttttggatgaaatgttctataaatatctgttagatccctttgttcaatagtgtagattaaatctgcatctttcatcaataaagatgtttctttattgatttttggtctakaagatctagccagtgatgaaagtagggtgttaaagtctccagctattattgtatcggagcctatctttctctttagcactaatatttgccttctatatctgggtgctccagtgttgggtgtatatatataattaatttatatatatatatgtatgtatgtatgtatgtatgtatgtatgtatgtatgtatgtatttttgagatggagtcttgttctgtcgcccaggccagagtgcagtggcacgatctcagctcactgcaacctccacctctggggtttaagtgattttcctgcctcagcctcctgggtagctgggattacagttacttgccaccatgcctgctaattttttttgtattttttagtagagacagggttttgccatgttggccaggctagtctcaaactcctgacctcaggtgatccacccaccttggcctcccaaagtgcaggtattacaggcgtgagccactgtgcccggcccgaatatatatttaaaattgtgatatccttttgttgaagtgagccctttatcattatatagtgacctttgtctcttctttgagtttcctcagcacaactattttgaattctctgtctgaaaggtcacatatctctttttctccaggattggtccctggtgccttatttagtttatttggtgaggtcatgttttcctggatggtgttgatgctagtaaatgttctttggtgtctgggcattgaagaattagatattcgttgtagtcttcactgtctgggcttatttatacctgtccttcttgggaaggttttccagatatgtgaaaggacttgggtgttgtattctaagctgtttctgctttaggggtcacccatgcccagtaatgctgtggttcctgcagactcatagacgtgctgccttgatggtcttgggcaagatctgggagaattctctgcattaccaggcagagattcttgttctcttcccttactttcccaaacgaacagtctctctgttctcagccacctaaagctgggggtggagtgacacaagcacccctgtggccaccaccactctgactgtgctgtgtccgacctgaagccggcacagtactggcttttgcctaagacctgccataaccacgccctggttactgcctgtgttcgctcagggccctggggcactactatcagcaggtggcaaagccagccaggcttgtggctttccctttagggcagcgagattccccaagcctctgggcagactcagaggtgctctccgggcatcatgtacttaagtggaaaaccttagaagtctacctggtattctattgtattgtgactgagctggtactcaaaccacaattgcagtctttcccactcttccctcccctttccaaaggcagaggagtcttacttttcagccaccgccaccccaagccatgagaagtactgccaggccgttaaggccctagggctcttaagtcagctcgtggtaagtactgcctggcctgcaacccatatttcagggcactaggctcccctctggcccagggcaggtccagaaatgccattcaagagtcaagtcctagagttggggaccccaggaggctgcccagtgctctacccaactgtggccgtactggtacctgaagccagcaagtctcagaggctcacccaaggtcctgggtgtcactgctggctattcagggcccaagggctcttcagctagcaggtaatgaatgctgccaggactgggtccttccttcaaggcagcaggttcccttctggcccaaggtgtgtctagaaatgtcacctgggaggtagggcctggaaaagggacttcacaactctgactgagccctatccttctgtggctgagctggtatccaagatgcaagacgaagctcttcccactttttcttctcctctcttcaaactgaaggaagaggtctcttttggagccatgagctgtgcagcctggggttagggcaggggtgatgccaccactcccttggctgatgtctcagtagtccaygtgccccccgaatccactgtctctgggcctagttcagcactaggactcacctaagtgttgcagtccttatggcctagacggactttcaagctgatttaaagacacagagcactgtagcccacagtggcgaggtttgggggaactcaatttcccactgctggaatcagagattcccctcaggcttgggctggtttaaatgtgtggtgattcgggactattyttctgactcctcagtgcttctttcagcaatatgaagataaaaccaggtactacgagggcctacctgatttttggctcttctaaaggtatttttttctgtgtagatagttattaacttcctgttcttgtggggcatgggtcgggtggaggttgatgggtggagacttctattcttccatcttgctctgcctgtcttctgttgatttcagtccagaaatactgtttgactgttgctgtttgagaggtcgtagtagctaacttgcacatctgtgtttgtrgagcatcgtggtgtgtgtcttgtttttgggcaagcctctgctcttcagacaacacctcatgaacaggtgcaggagcagctctgcagggacagcaccctcgctcatctggaagactgccctctggaagctttcaggaaaggccyctgagagcacagtcacaatccaaaagccacgttctttgtttatttttactattattacatatatatttttgagacagggtctcactgtgtcacccaggctggagtacaatgacacaatcttggctcactgcagcttctatctcttgggctcaagggatcttcccgcctcagcctcccaagtagctgggactacaggtgcataccacaacacatggctaatttttttgttgttgttgcccaggctagtctcgaactcctgggctcaaaggatcctcctgcctcacccttccaaggtgttgggattacaggtatgagccactgcacccagcctaattttttttcaccatattaagagtcatatctattggcatttaatgttcagctcttcacaaacttgatttttctagctttctaggcaaaacgaaaatgatgggaaattgcaaacttaaaagaggtgtttggaaggtgttttagatatgatagcagaccaccagcttttgaagggggccgacagaaaaagtgaaaactctctactgcattgtattacttggcattccttatgaagaatgttcgtaatgtctcctgcttaagagggggtgggggactagtacattttagcaagattttcatcaaaaaacatcaacattcaagatatgttggcaccaaaaaggagaagtgcctggtttctggaagaataacttgaggtatatgttattccctaagaaagctggtaaataaggcatcactttgtgcctctggcctcgaggcagttatgaaaaccttcatgacacatctgaaatactgtgtagactagatccctcaaaacccttcaggcagtaaggagcattgttaccaagcttagttggaagcccaaatagacagaaggtgctgttttattaatactgcattttcaaatatcagcacaaatgtattacatgaccttacatatgtttgttaagcattttacagcttgcagtaggtatttgtatccatcattccacttggtcctaatatccctgtgtaatggaaatcttttctcatcaactgatggagcactaattaagtctttttcatggctgcatgatattccatgggaatagataacccacattttattcaagtgtttccctgtaggtagacatttactttgcttctgattttttgccattgtggacaagtcttgcaatggatatactttacataggtcctcacatctggtggctatatttccaagcattgggattacagcaggaacaatatccaactgtgggattcttgggtcaaagggtatacatatttttaatttgaataatttgctagtttgcttttcaaaaatgttgtagcaggccaggtgtggtggctcactcctgtaatcccagcactttgagaggccaaggcaggtggatcacctgaggtcaggaatttgagaccagcctggccaacayggtgaaaccccatctctactaaaaatataaaaattatatttgggtgtggtgatgggcgcctgtaatcccagctacttgggaggcggaggcaggggaatcgcttgaacctgggaggtggaggttgtgggaggtggaggttgcagtgagctgagattgcgccattgcactccagcctgggcaacaagagtgagacgccgtctcaaaaaaaaaaagatgtagcaattcatatttctatcagcaaatgatgagaaatagttatcagtcttttaaatgtttgccagtctgatgagaataaaatggcatcagtttttctcctgactacgagtaaatatgaacatctttttttttttctttaagagccagggaaacagtatgctgctcaggccaggcttgaactcctgggctcaagtgatcctctcacctcagcctcctgagtagctgggattgcagctgcttcccaccacaaccagctaatacaaatatttttatgtgaattgtctgtgaattcttatgtgaattattctctatgcatttccccattgagttgtatatctccaaagaagatatacaaatggacaacaagcacatgaaaaaaatgctaaacattgtcagtcattagaaaaatgcaaatcaaaaccacaataagatactatttcgaccaggcatggtggcttacgcctgtaatcccagtactttgggaggctgaggcaggcagatcacctgaggtcaggagtttgagaccagcctggctaacatggtgaaaccccgtttctactaaaaatacaaaaaataagtcgagtgtgccaggcatggtggctcacgcctgtaatcccagcactttgggaggccgaggcgggtggatcacgaggtcaggggatcgagaccatcctggctaacacagtgaaaccccgtctctactaaaaatacaaaaaattagccaggcgtggtggcgggtgcctgtagtcccagctactcaggaggctaaggcaggagaatggcgtgaacctgggaggcggagcttgcagtgagccgagatcgtgccactgcactccagcctgggcgacagagcaagactccatctcaaaaaaaaaaaaaaagaaaaagaaaaaaattagccragcgtggtggcgcactcctgtaatcccagctactcgcgaggctgaggcaggagaatcacttgaacctgggaggcagagtttgcagtgagccgagatcgcaccactgcactccagcctggcgacagagtgagactccatctcaaaaaataataattaaaaaaaaaaatgataaagttaatgatgtttcttttctaaagttttaggaaaggaaagtgggtgagaacgtggtaacttttttctttttttggttttcagtcatgcagctttgcttcgtttagatttaaaaaggttccctaaagggctatgatgaaaagttgtcgtctattgaagtttccagtgttggggggagattaagtcaacagagaaagttccaaaaataaaaaagccccaattattatagtagcttcttaacacctcagctgtgagtcccttttcctctccagtccatggtatgcaatgttggggtgttagtctcagggagctgtgtcattacgacactgaggtgcacagcctcacagcagcatctcccttcagctcctcccatattcattgtgcctcttgccctcgggcctggcttcagctacagcatctcccaaggatgtgcctgcctcctcctgcttatggcctttgtcctggctgcttcctctccctgcaatgttcttctttgcctgcattgtcagatgctgcccggctttcaggattcagctcatgcgctttgacgtgcacagcccctcttaatcctccccagcaccctttgatgtaaacactgttatacccatttacagattacacaaatgtgtgtgtgtaatgtgtttatgtgtgtgtaaacatacccattttacagatacagtgatagagcaaacagaggcacagagattttaagaatttgtctaatatcacgcaagatgtaaatcaaggagcttattccaaagcccatgctctcaacyaccatccagtatcagcagagttgaaagcagcgtctgattgagacatacgttgaagctatagtgtaaactctcaaaagcaagacatgtaaggaagctttgctaaatcatttttctctgtctttcctctttgggtccaggttgaagtaaagccatatgtgctggatgatcagatgtgtgatgagtgccagggcacacgctgtggtgggaagtttgccccgttcttctgtgccaacgtcacctgtctgcagtattactgtgaatactgctgggcgagcatacattcccgagccgggcgggagttccacaaaccgctggtgaaggagggaggcgaccgccctcgtcacgtcccgttccgctggagctgagccacgggccgacccagccacaagtactggagtagataacaaggagggaaaagagagggcactgcctcagggcttacagtgttctggaaatctgtgcattcgttctcgatttttaaagaagaattgggtctttttattattattattattatttacagtcatattactgaactcagtgtccagtataatgcagaattgcagagtgtagaatggtactgatttgcactttgattcacacctttgtctgcttggtaccttaattttttatacctgatttgtcactcgtgacagtatgtagactgccattctcatcagcggccgtcaggctactgtctgtgattcttttgtttgttgttgtggtgttgttctgattgttttgaactggagcatgcacttattttcagaaacttagagagttgcccctaggacaagacttaccaaaggtaatactcgtgagtaggtggcagatgtagcaaaaacttcacaacaattcagcaatcattagctcgggtcacttagagtaaggataacccttcatgaaaataagcctttagttgctctctattttgacttgtaaggatacctcataagctggatcttttatttttccttcatgtttgatttttgttttgccgaggattttggttagatcttttagtattatgtaaatttatgctgcaatagcttttgctgctattaaaatggtattattaataccataatactctattcaggctaggatatcaattaaacacaaaaacccaacaacacacttttgtgattttagggatagagtcagctgccgaacggagatcagaatagacttcagaaagcttcggtggaaggtcactatttctgactgcatgtttacttaatcaggttgctgcatgcaataaattttatatccaatgtctagtataaaacgttcccacaatgcacaaattaagaatctatataagctataaaaatactcattttttaaaaaaagtttttttcattcaaagaattggtaattgaccggaggaaggcatgcctcaataaatggaatgctctgaatgggaagagcccataacagaatgacctatattacaaccgayataaaacctaggtgtaggatattcttcaagcaaatttgtggatggtagatgaagtactttgcggtgctctgttatatattgtgaaatttattttatatagtaaagtgattatgtctaactgtgatcaaacttaactgtttaaagcctctgtcagacattaatgaacttgacagttcataactgatatattataaactaacacatgagctcttagttacaatctcttagtgcttgcaccattttacatagcttcagaccttgtccagaaaaccaaagagctcatcttagcttacaaacactaagaatatatacaggatatagagataagttgtcagattgacaaactaggcacatttttaagaaagttgtgtaatggtgatgctaaagaaatgtctgtacaaaataagatggcctgggcagagttggttgtctgagtgagaaactaactacttaattccctggatttatcctgttaagcttgagtagaatgaaggcctgctagcactagcgtggtctagaatgaaggcctgctagcactagcgtggacatttttctagcattcacccttgggctgcagatagtaatatataaacacacacaatgattgcaagactatgtaaatctttttttaatcttcttcctatgttttggaattctggggacaatctgactggatatgacactgcagaatagatttaagtcgctgtgttttctgtgctgtgatgtccttgtactgtcttaagttagtgttgcttgtttttgttttgttctcccatgtttagttgcaattactggctctcaagctatagtttgttttcaaaaaggaaaaacaaaatagttttttactggattaaaaatgcttattttagaatcctcccctttttgaggctttttggtaataattgcttttttccagcccaggtgtggttttgtttgtttttttctatgtttgtgggttttttttcatctgtacaagaaattttgttatgcactactactttttgtattctagacagttttcaaaagttggcagatttttttttttgtttttaaggaaaaaggcatgctttctgactgacatgatcttttgcaatacctcaattttgaaatataggaaagaaaatgatattttctaagtaagtttattcagaaaaatatatattaatttaattctgcaagaaaatgatttaacagatgggtaactttatttttttcatgcttatttgtgttttttgaaaatgaagaagttagagctttataactataatattaaagatcatatctaacctacagaaatctacctaattatgtgaaagaagcaaaactttttgaagaagcacccctctttcatgtattaaaataacactgagatttttttaaaagctggaagattgtacagcataaagctaaagtgaaggcaaaaaacattgtcctgaagaataggttacaaaaaataaactccatttggtgctgaaagttgtgaatagatggtggaaactactttcccttaatttgtatatttctaatcaagtgttgattgtgcgcgactgaccaggattgtgaaagagttcttctgtttgtatttttttaaagagaacttttttagtttattaaattataacatgttcccttttgttttgtaaataaatgtgcccccaagttgttaatgttatattaaaagagagggtccttcaaaaaaattattttttaaaacacagaggtgttctgacctgcaacttgactgggaagcccctgggtaacacaggtcctgctgtggcctttccttggtgtgacacttgaactagtcgattttttgaaggctataacctaacctcgactatttgttgttatgtgcaatactgtttgtactgtttgtataaaaaatagaaaaaaaaaagaaaagaaaaaaggcataaatctttattgcagatttattttcattgcaaactttagacattgtgattcactgaaatcatttttctactgtcaaatatgtaccttttcttcatgctggtattttttcaatagtaatgtagcctttgtactgagacaaattttcattgttatttttagaaagattttttgctaagaaaaaaattaaacatatttacatatttttcattttatttcgtattttctttaaggagtgctttctcaatcattaatagagttgtttctgggagggactttcatatctggtcaatgtcataatattattttgtatttttattggaataaattaattttatgatgctaattctttaaaagtttatttttttcattttcagttatttttgaagctaaaacctttgtaatattgttactaaagtgtctagttttttgaaatgcaaagctttatgtattaacttgctgatgtggtttacaatagtgtgacaacgatgaaaatgcttggttatgtaaagtgattggaaatgtaatggataattgggtaataaaatgacagaatgagcagaacatgtgagattttgagaagccttttcctttatcacagtggtttagtgtaagactagggatgtcacagtgcagttctctagggatgtcacggtggatttatacaacaccaggtgcagccaaacctgtggccctgagaatgaagtcacccaaccgaagtaccactgggtttaaaatctggctaagtcaacagaatgtttcattgctttttcccctctaactcgtcattatgtcgtgtgtgtgtgtgtgtgtgtgtgtgtgtgagagagagagagagagagagagagaaactgccaccaactgctgtccttgtgtgagacagtgcctttctcccaggccgaatcttttatgtgcactgacagtggtgatatcggagtcatacaggaagttgctaagaggacacggctttcgtggtgtactgcagacctcacctgcagggtctcactcatgctgcctccctgtaaggctcagttggtggcactgaggaagcacactcggatgtcaccactgtctgtggaccctgactatgtgtcgggttgcatcttcctccacacccatgcctgcttcctgttctggtgccccttgcctttcattgtggcaactgcgtgcatgatctgtctgcctttctgctgctgcttttccaacaccctcctcacctggaagctgggcagttaaggcacagtcattaatgtgtcattgcaatagcacctacagtcaaagcaaaaactacaactgcaaaactggtgttgcgtaaacagaacagccaatgacttgatccagatagatgatatgtttctactagtggttgatggcctctttcagctccatcgctatggaggcgaggttcatcaataactcagagaaacttgtgtccagagttggtcttgggtatgctctatgtattcagttttgtaaataatatatagattagatcaagttgtgatgtaaaattttaactcaaattgggtactactggttggaattttacattaactacaaataaatgattaggaacagaagaaaagtggaaaattcttgcttagtggtataaagattatgcttagatttctgcctatatcttgtgttttatagcttgttagtgaggcatgggctaatgcagaatgtactgcatttatgcaattagcaaataactgctagttttcattttatctattatattagcaacaaaaatggcatttaactgggtaaagctcctacctaaatatttgagtattgtgacatctctacttgcaaggtttgagtgaaagattagtcacagattagtgaaaaaaatgtatctttttgttaaaactggcttatttgaatggattgttgcttttcactagcttgtatggtatgtcagctaacatttgttttttttttttcttttataataaccaaacttctctatctcagctgcaatagtgttccatcttaccacagagtgttttataattaatgctgttgactttataccccaaaatgggtcaagaagtggctacatgattaggggatgtttaaatttgtatgacgacaaagttaattgcaacaagtagaaaacttgggtgctaacacaggataacttctgctctttttctttcctggatatagttctgttggggtataaagtattaggtatttgtattttttgctgtcaaaataatggacttaacttttagagtgttcacagctaggatctctgtatttgtttttcaactaacaactaattttaaatgtattgtatcttttattacctgttctcttagattgttttttgctagtaacccttactcagcttctgcctttggggcttggactaatattgcttgtatggaactacagtactgtgactaaacatggagctcaatgcagctactgcttacaactgcttaaactttgtagtttggacttcatttttttctgtaataacaacttattaaatctagttgtatgaagtactgacacttgtcatccgttgcatttgctgaggaataacttggagtatatggttcacatctgggaacattggtgcattccaatttgcttaactcttttttttgacaaatccctttaaagcagactaagtacagcagaattcaccctttctctgacacaagtaacactcgtttatgaaaaacatgcaagtatatttgcaacaaagtatttgttgacacatgtgaacacacctttttagaggtgcagttgggtttttatgccagacttgctacatgaaaccaattctcaaaatcgcaaccaaaacagtggaaaggtaggtgtgccacttcgctttatctttcacacctggctctccgatttttcagaaaatgcgtcttttaaaaatccctatcgattttgggtgtgctagaagccatgtactgactaatccatttagaaaacggatcacaagtggctgcaccagcgaatcccctgcggggccttcagaacaagcagggaccagcgtccccccagcccggtccccgagacagattcacttgggttaggctggggtctggccacaggtatttttcaactccccggcgatcacccccatgataggaaaccgctgtgtcggtgcctcaggcccatgcagcgccttcctacggcggtcgaggccaggcgcgcccagtacgcctggaagaggacggggccgctggagagccgctctgcagagcgacgtggagcggctgggggcgtcgggtcttgtctcaggctccctcccaggccgccccacccatagtctcccgcccgcaccctttcggtccccgctccaggtcccacgttctgcccctcccgcacccaggggccctggcctgggcggtggcgcatttcctcctggccgcagccctgcaggtaagctcacccgggccggtgacccgcgcccctccgtgccaccgggcctgaagggcagctcagggcccaccctgggggagtcgctcctggctctgcgcgaggctcagctttgcacgttgctctattcagcaccagctttcacctggcagggagcaggtgccccctattcacctagggaaaccaggaggctcagcccttgtgccgctgggatcggatggaacgtttggagctctctggtccctttggtccccctcccctggcccaaatggagagaaaaatgtgtttgagccccttttaagtctgcttttattagaaataataacatacattaaggccacaattggaatcctactttcagacggccggtctgactaggagcacacatttgtcccttgatttaaaaaaaaaagaaaaaaggttccgatgtcctaactgttggtgtgaagacggactaggtaagtaaatagtgccattatgactactagtgtttatttctagcggggaaaatcagtcggtagtcctggcgttccctgtgcctgaagtctgcagcagccccgcttgctaattgcatggctgtgcgcaacaggccccatgaggtggccagaggttatgtctaaggtcccggctttaccaaaaagaaaactcatcaccagcagcgcggatggacattaagctttaacactgggccgtggtgatgtttcactagacctttggcacatgtatgtgaagcgatattcacataagcactctcacgctggagtcaaattttaaatatatgattttaaaaatattttaacgagaactgttctataaagggtattgattaacggggtgaggaaagcccaaattggtgggtcctactgccattcaaaggattgtcaggaggaaaaactctttcctctaccagctaagtttgattggaggtctgctaattaactaaaaattaacaaaagacgaagttgatccatacgcacatggaagtgcacaaaagtggcttcttcctccataattagagataggggtttatataaccaacaataagggaaagagggggagctctctcatagaaaagggcatctatgggaagatcaagtggtttctttaggaaatacaaatgagttttaggagatacgaaagtttctggcgatgtttgtttatgcagttgccaatggtctccatcccttttctgcccactaaagctccctgggaggggatttacggcagcttctctctcagaagtttctgcctttattcagataaaggaagctctgaaaaagctcacttttgcatctgttgaatctcaaatgtctttagtttaaaataatctttggccggtgctgtggctcatgcctgtaatcccagcactttggaaggccgagatgggtggatcacttgaggacgggagttcaagaccagcctgaccaacatggtgaaaccccgtctctactaaaaatacaaaattagctgggcgtggtggcaggcgcctgtaatcccagctacttgggaggctgagacaggagaattgcttgaacccggaaggcgaaggttgcagtgagccaagatggcgccattgcactacagcctgggcaacaagagctaaactccgtcttcatcatcatcatcatcatcatcatcatcatcatcatcttcatcttcatatcaagtctggggttccaagtgggtccccacaagctggagtgctgctggtcactgaaacgtaactgaaatttatctatattcagtcccattacatagtagtatgaagggaataaaattgaggtttgggcattgtttgtatttagataaagaggactttgctgtaactgcaaaagcactcatctcaacatttaattctggccctcacgggtcagcccaagtcatgtcattttcttctttgctgttactggtcaaacctttgggtaagctggtttgggctcagctgttaagtttgtttgtttgttttttgagatgaagtctcactctgttgcccaggctggaggctggagtgcagtggcatgaccttgagtcactccaacctctgcctccagggttcaagcgattctcctgcctcagcctcccaagtagctgggactacaggcacccaccgccatgcccagttagtttttgtatttttagtagagacagggtttcaccatgttggccaggctggccttgaactcctgacctcaggtaatccacccacctcggcctcccaaagtgctgggattacaggtgtgagccaccgcacctggtctcaactgttaagcttaagggaaacattcaacttgtcaccttcagtgcaggcctaaaccaaatgactccctttgtaagtggaagaaaaactcccttggcaagtcttagaccctaaggtgatgagttgtgcacctggtctctttttaaacagacagggtcattttgctcaatttcattacttatcattaaaaccaaagtgcagccaggcatggtggctcacgcctgtaatcccagcactttgggaggcagaggtgggcagatcacctaaggtcaggagttcgagaccagcctgaccaacatggtgaaaccccctctctactaaaaatacaaaaaaattagctgggtgtggtggcgcatgcctgtgatcctagctactcgggaggctgaggcacaagaattgtttgaacccgggaggcagaggttgcagtgagccaagatcccgccactgcactccagcctggacaggagcaaaactctgtctctaaataaataaataaaccaaagtgcaattccagtacatcccccactagaatgactaacatttaaaagacacaaaatgccacgtggtagggaggatctagataagtactggtaaaagtggaaggtgatatgtttagtccattttctgctgctgtaacagaataccagagactgggtaatttataaagaaaattgtttctcgccgttctggaggtcaaaaaatccaagagcatggccttctttctgtgtcataacgtggcagaagggcaactgagcactcgagacagggagaggtaccagcggccagacttgctttgtaacaacccattatcatgataactaagccactctctagataacaacactaatccctttatgagggctctgccctcacaacctcatcacctcttaggtcccatctcccaacactgttgcattggggattaagtttccaacacatgaacttctgtgggcacacattcaaaccacagcatggtacagccattttggaaaacatttataaaaactgaatttgtctatatcctgtgacccactttttcac

SEQ ID NO: 97315 - DNA, 12836 bp, Homo sapiens
tttggcctcctcctggcctctgtggggcggctctcacattacctccagaaaggctgcaggctctcacccaggtaggcgcactctttgcttcagtaatccattagtcttctctagtcctttaggtggtcgctgattcattacagcaacacgtcacagtcagtcataagaaaaaaaagccacaggcgcctggggtgaaagtttcctctcctttcccggagctttctcacggtgtttccctggcatattggccaggtccccctttctgcagcatctgagctctggtggtgctgaccagatcacacttggcgtaggaccctctggtccatgttaaggggaactagtttttcctgggaagtaagccacaatgggtaggtttatgtcccattgccacctttatccagaaccagtactcagagttggtggtagggtgtgtgactgaagtataaatggaatgtatatcttttgtagctagaagaaggaaatctttctgcagtttcatgttaaatatattatgtagcaaacagtctttgtgattcctgccatgtgcaggcaagtgtccctgtaggaaccgtggttacaaaaacagggacgtaaagtgagtttttggtgggagatgatgcgtaaaccatctgaattctacagggacacctatagtgacaggagtggaagcagctcccctgactctgaaatcaccgaactgaagtttccatcaataaatcatgactgatcttgtagcgtaagtggtactttaaagttttagtttttaaaaacatggtgataacacactgcgattgcaagaatatcatggaagtttagggctgaaaatttttatctgccaggaatgaaagtggtgaggtcttgaatataatccagaggttgagagagaaaagaaagtagtgaggtcattgtgggtatcaaatgggcagcccttcctccaagttgcagtgcacctcccagtcctgccctggggatgacagcttggggagcatggtcactgggcagttgtctcaatactgattactacattctggtgccagtctgaccagttctggggcggggaaggggagggtctgaattcttagaccctattgtttgatgtagctgtaaattttggagatcttgaaggaagggacagatacaacaatgtggcacttgtcatttctgcagagcctcaggttttcatcaggaagtactttaaaactgacactgcttagagaacttttttttgttgattgctgcttattctggaattccttcaaagttggaacaattgccaaatagacgtcgaatgtttgtctattaagtgacagggtttgtaggttcataaagtgcaataactgtgggcactgccacgaaatgtaaatgtcctttgagataactgtgtggactgtgttggcagaagtacgcattctgctggtgaggtatcaaatgagggagtgtcagtcatctggggtctggaataagaaccaggggtatgggtgtgtggttccaccgctcctgccctaaggcctgggcagggggacctccctgaatcctgcacaccgtgtgttcatcaccagtgggcctctggtgctgggtcagtgccggtctgacctgctgatcccagctgtttcccctcctgccttggttggttgaccccctgtcctggcatagcctaagtaggtggtgggtaggcatgagaagttagtatcaggaggagggcctgtgtgctaggtaagcgtttaacacggatggactcattaatcccctgaccagggagtttgctataggctgtttcacagtcttaaggagctgatacaacaagaactgttaccagtgaaggaggtagatatttggtcagttacatggaatttctgactgcctcgcaagtggagaattgcccgttagtgacactgttacgaggtgctgtggagaaagaatgcttgcattgggtggttgtagaagtcgatgtgtgaggtcttgaaaaggtctgattctgtaggaattataaatttagcgtctaattattcccagtaggctccttctactgctctgccatgaaaaacaggcttagtttcccatggcagctgactagaaattctaacttttctactttaatgtacatcatataattcccacttttttttttcttttaaacagggatgattcttcaagagacccttcaaacttgggtagagtttacagctctgactttacactcggctttggagactttctttaaattatgtttttattaagattattttattatgcggaaaggtatttgggaaacttgtcacttgcatgtcccatcacgtgtactggctcctctgtggtgtctgcctgttgcgtgacactctccttgcagttcttgagttgcggcagaacatcgcgatgggaaccgatggtgggtggggctgcagagtgccccatcggtcaccttgtttctcaactacctcgcatcattgcagatgctagcgcgttgcctgtcgctttcccttggatacctagaccgttataaagtgtgccacatggacttaccgagcatggagagaggattttagctaggatttgaacacttggtgctgggaacctcagggtattgcttgccactaagccatgaaaccagagacaaaatctctatactgccctgagttggggggaattctcagtgccaactgtggctggtcctcattcaaagggacggtcagtttggtgtcaacatgaaacaccaagatgtctgtctctgaagcgtgattttaaaatccccatgcctgtggctgcgcttcctatttctagggctgggaaacactccttgcatcaaggggtcacttacagaacaaagaatcttttgggggaaacttcctctaaaaccctctcatatatagacagctttgactggagggtccatttttcttccaggatggtgttactgcagttgaaagggcaatatgaagttactttcttaatgtgacctagcaataggcatagctacgtggcactatattctggccagactcgatgtgtactctaacttaagaaataaatcagtaaggcagaacaagagacatgctttgcttctcattctctttatgtcattggccagatgggaagcgtctgagcacgttgctggcttgcttgtgtgcagtcagctgaattgtcagtgccgggtgctcctgcaggtgagcagccttgactcagcagacaacctgagagtttgtttaaaaactaagaaatgaggctttctttttaataggaaccagaatttttcataaagcttcaaatacaggttctcagcatgtagagcgagatgaaaaggtgcatgggtgctattatggtgctatttatgactgagaaaggggagggataagcatgatttaggaaggtggtcctttcctctgccaggcactggacgtgggtaccccatatacacagccagtgagcagtgggccagactgtcttcaccagcagaactgcttgttatggtactttgaacgtggctgattgagcataattctaacctcttctcccacctggtggtaccaggagattgtcttcattttaaattttatttatttatttatttatttttttgagtcagggtctcactctgttgcccaggctggagtgcagtggcacaagcacggcttgctgcagacctcctgggctcataagatcctcccacctcagccttccaagtagctgggactacaggttcacatcaccacgcccagctaattaaattttttttttttttaatagacagggtctcgctgtgttggccaggctggtcttgaacgcctggcctcaggcgatcctcccatagtgcagggattataggcatgagccattgcacctggtcaatagtcttttttttgagatggagtctcacactgttgcctgggctggagtacagtggcgtgatcttggctcactgccacctccacctcgcaggttcaagtgattctgtttgcctcaccttcccaagtagctgggattacaggtgcctgccaccacgcccatctaattgttttgtatttttagtagagatggggtttcactatgttggctaggctggccgtgatctgctcatctcagcgtcccaaagtgctgggattacaggcgtgagccaccacgtctggcccgttttttttcaaacattccccaaactgagggtctgacacgcccgttgttgacatcatggtcccccacaatggctgggtgtgtgggtggtgtgaaaaagcctcccagtaattaagttcctgcccctatgtttaagatcactttggctgatcacttgtcaagtgctggccacataatgtaaggtttctgaaaaaagagatcccagatggctctccagagcttgcaaagctcgagcagccccgccacgctggctgtggcagacaggatagggctgaagctggatttacaggagggcaacctgtgcccagtgtttactgacccgtccccggaggcttctccctcatggggaggaaagctggtcacattcctcgttcctttcttaatgtgacctaacaataggcacagctatgtgtaacttcccttcagtaacttccttcagtccagggaacttcccttcagtccaggggatctgggcagttcttagcagtctggagcagctgggctgaagcctgacttcacccttcctttgtagaaatctgctcttttcccccgaaaaacatttccgaggattgtggtgcctggactagcatttagcatggtacctggaccgtggaaggtgctcagaaatgccactcctccttcttgagtaacacatttgtgtagttttcaaacagtcttggtgaccttggggcagctcggggggtgagcagcaggagtttggtaacctgccaccatataggtgtctgtgatcacattggtccctaaccagcatgaatggcagccgaggcaggggttgtgtgctctttgctaagtgggaaaaccaggtctcagagcagttgtgatcacccagaaaatgtcacctggctggtgagtggaggggctgggggttccaaagttctcatctgtgtctgctgtggatgtggccagggtcttcaagttttaggggatcaactgaagtgtgttctgtggaacactagtcctgtgaaatgccctgttcaacaaggtttggtgattttctggtggctcagaccccaaatttaggagtatccttaattgtctcaccagcaggtatttattgggtgtctaccatatgccagccatacccaaacccctgtcccccagagcagttattcagtgggggaagcaccaaatataagctacagagtgtggtagttcatagatggagaccaagggtggaagtgagcaggggagtggcagtgctgggaggtggtgtctttaaaatagggtgggtgggaaattaagcatggacttgaaggtgaagaggaaaggaaataggccgctatgtagcgcagaggccccgaggcaggagtgcaaatgaaacaagttggtgggcgtggctgaagtggcttacataaggggcggaagacattgaggttgggtgggctaggtggtggagaaccatgtaggccatcaagtttgggctttgctcttgaagaatttggagggctatgggtgcaggtgcggcatgagtgtgatcagactctggctttgcagcctctggctcagctggtggagacagcaggagaaacggccagaggcaggaagcagctggaggagtctggttttttttgtttgttttaagctaacggtcttactggaccagaggggtcttggaaaggaactgagacccttagtgtgaggtgctgctctgtgccacagctggcgtagacacagggcactggcccgatggtgacaaaatgcccctggccattgtcactgtcttatagatgaagaaactgaagcacagaggcatagcactttgccccacggtccctggtctttaagacagagctggactggagtctgaggggctgggctccctgcccttgcaggtctgtcctctgcctcctggacagaggtgggctgggcctgggactcatgaccctgcagcatctgaccggctgacccagtgtcctagaaagaaccattcttgtcccaggtgcatgtaatttattaatggagctttgacagtcacaagttccagcaagtcaggggtgggggctgcagggtggcctcttgccctgtaaccacagtcatcaaatatgcctcgccatctttgaggggctttcctgagatgacagattcctttctggcactgtgtagccaactggagtcacagacctcagcctgggccaaatgagcattttagggagaaggacaatcccttatagcttagccctaggggagctctgggcagggttttacacattstttctgaaagtaaggtcatttggggacagggctgagagcagtttcttggctacacagatgggtctgtcagggttgaagccacatgggtgcctgctcatgtgccatgttgaaggagtccctgtccgcctctcagcagcccgcatgggctttactggttggccttacactcaaacaggaaatccctgggtctcaggtggagagtgccgtgccgtcctgcctgctccccagggccctcacaggacacagcaggtgcaggacacaggcccgtgctgctgcagctgctgctggagctgctccttctccatcatcagcgccttcatcttctcttccagcttgcccagctccaccagccacctctgaggggacatgggaaaagcatgtggccaagcccgcctggtctcgggcctgtccgtcctccacctggggccaaactgagggaggaaggcaaagcccaggagcctgagagctttctcagctaggggaaaagtcaggcccctcggcctgctgccaccttcaaccgtgtcagcctgagggaagctgccggctgccagccatggaagggagcctcctccgtgctgggcaggccatgtgcctcctcactgttggtcccttgtcctccattctctgtttccctcttgaaaaagctcttccttgggactgtgtcttgccccctctgccgctttagggcctcccctaaaatgcagtgtatagtctttggggttttctggtgacatctcaacattccagtctctctgctccctcactcaagatcgagtgtgttaactgcccaagtagagggtgaggggtttcaggcacccctgaagggaggatactgcataggatttttttttttttgagatggagtctcggtctgtcgcccaggctggagtgcagtggcgcgatctcggctcactgcaacctccgcttcccagattcgatcgattctcctgcctcaccctctcgagtatttggaactacaggcgcccgccaccatgcccagctaatttttgtatttttagtagagacgagggttcaccatgttggccaggctggtctcgaactcctgaccttgtgatctgttcgcctcatcctcccaaagtgctgggattacaggcgtgagccactgcgcctggccactgcatagatttttaaaaggagagagcttgggcctcttccttcccaccagccacctacccgcggagtatgggatgtggtgtgattgtattccaaccccttgggttcaacggggtgatgcaggacccagggaaccatggtggcttgccctgggctgctcagtgggtggctgaaggggtctggggtcagctccgctccaccccacccactggcctcagcttccgtacctgcctgcaccactcctggatggcgctggcagacagcgggccctggatgctcccgtcgcgccgcagaaacacctccccctggtctgtctggtagagttgcggctggctctgggccttgggggtgtgcacggtcaggcggatcaccttggtaggggcaacagcagctctggaggcgccgcccctcacggtcggcagcccccatcctgccaggctgctcagcattgctcactgattccttagggcaggccagcagggctggcacaggggccatccccagcctcttctcctgtggcccccagtcccgtccctgccccagcactgcctggcaggagtgcaggccatcgtcttactgagtgatgacagatgacaggcccagaggccctcctgtcctgcaggctcaccttgagggggacgctggtctccgaggtactgatcacagggatgaaggtgagagtgtaggcatcgggaaagatctgaggcttgaagccctgcaggatggagtccaccagcaggcgtgcgcggtcctcgtcacggtggctgcagcggatgccctgcaccaggccgctgtcctctactcccacgagcaggctgccgccctcgctgttgaggaaggcgcacacgtagcgccgcacgtggtgcttgaaggccaggctgaggtactcgccgctaccccgcttgaactccatattgcgggtctcgctgcccaggaaggcaccctggaagagctggtccttgcccacgatctgctggtgcacaatggcactgtcggagcacacgccgctgggccggccctggcagctctgcagctgctgggcctggggcctatcaggcagcgtgtgtgtaggccaggtgggcagcgggacaccagagcctggactggggccagggctcaggccactgtcctcctcctcctcctccttctcctagggtggtagtcaagaatgaatgtatgggtccagccaggaaatgggagccctgaccctgagaaggactgcaagaacccccagtcaggcccctgctgcagcctgactcttacggacatcctgatgcccctcaccaggccgaggggcccagttctgcccaccctcctgcagccgaggcaggaaaccctgctggatcgagggttccagtcagcgctcctttccctgccaagctgggcccttcccaggtgagctgtgggatgcctggtggggaagaagagatttctgcttctcagggctgggtgctgggacatgtgtgggcccattttttcttacttgggttgcagacaggcccctgaggcccagaaccagatcattccagcaggtatctcagcaccctgtgacagagctgcagtaccctgaatggagagggactcccaggtaccccacccacttcctgatttcaaacctttgcccactacttgctgggctattgacaagtccgccctaatccccactttcttctgcgcctcctgaatctcctttcatggtttgggctctgctcgagggcttggtgtgagcctcctcggggccacttcctagtctgggcctccccagcgagcccctccctgacctccctgcttccaggctcaccctttcatgtcaaccctcctgtttttttttttttttttttttttttgagacagagtctcgccctgtcacccaggctggatggagtgcagtggcgtgatctcggctcactgcaagctccgccttccgggttcaagccattctcctgcctcagcctcccgagtagctgggattacaggggcccgccaccacgcccggctaatttttttgtatttttagtagagacggggtttcaccatggtctcgatctcctgacctcgtgatctgcccgcctcagcctcccaaagtgctgggattacaagcgtgagccaccgcgcccagccaaccctccttagtgacgctaacttcaaggcagattgttactcctcacaattctttcatgagcgtgggttggggtgaggagactgaggcacctccctaccagccctgcagctccccagagaagatgaatttatcagtcttagaaacaggataaacttcatacaaatgtgaaattgagttgaaatgtaagccacagagccttttagttctgcaacagtttaaacaccatcattttcacaccaaaagaaaccaaaatcacctgtctcatggagtgacctatcctaacgtcccatgtcccacccaataaagccagcagttcagccttgccttggatgatagccttggtgacctggcccctaccctaccttctggcccaacttccttccttagcaccccctgcagcctttagtgggagctccagggacaccaaatggtttgcccttctgcagacatgacactccctctaagcccccaggttcctctgcatattctgtgtcccttgcctggaatgtcctcccttgcaagtgcctgtccaactccctaagtcccggcctggatttcacttcccctgttaatctgtccccagagagcagggcaaaccttcctgtcttctctcacagctctgagcgcagccaccttgcagctcggtgggtggctgtccagctctggccacagatgcagggcttcctgggggcctggctgggcctctcatccctgccttactcttggcacagagggggtgttcatgtttgtcaattgaacaaatgagttgggccaaggagaaaatcggggcccctgtgtcttctagggtctcccaggcccagaggctggaatgtaaaaggacctaaggagaggaggtcccctcgtggcctttcttcacacaaacgtcgggcttgagcttgaggcaaactgtttttcccagagaaagctggcagtaccagccgcaagccatggtcatttgagtggcagcccccaagtttgcagatttgtccctgcttccccagagacacccctccatccccactctgcaggccactcccactcagaggctctcccttggggtgaggctttggagcttgcttgggaaaagtcccacttacctctctgtggctgaagggcccttgggcctcactcaatagcaggtccttcccacgggctgccagctccttgaggattaggtgctcctccagggccgtctgcaggcgccaggggagggaggccagggtgtccctgtggacagtcacctgcaccagtgcataggccttccgcggccgcctcaccacttcaatgtgctcccgcgccaccggcatctccagccgctccagggtgtctcgcagcaggcaggcaagcaccggcactgagaactgggggttcagatggcccacatagagagtgtgcgccgagggagcctcctcgaggtcagagtactccgtcagggactgctctgcgggtagctccggcagggactcctcaccccaggactccatgaagggctctgacacctgtgtttgcactgatctcttcatgggggtcatgggaaggctctccctgggaaggggttccaggattcctcactgctggctgcttctcccagggtctgtgttctcagtgtggcttaagggctcccagaggactcagggagtgtcccggctcctgggaggtacacagattggcagagactgggcagggccagagagagggagggcagagggcaagcaggaaagggcctgccacccacctgaggcctaggatgagaaagcagagtcacgtggactgagcaagacacagggcctgtgggaagacgggatctgcccaaaaagtggcagaagggaccagaactcaggtctctgagagctccaccatttcagtggccccaggggtcctgtcttccctccccaacccacaggctaggggcctcctaggtaccctcagggtttcctgcctaccagttcactcctgcctccaggcaacagagaaaacctttacacagggcctcctggagaggaggccttaacccaggactctgaggactggctggtggccccattgcagcttctctgcctgctctaaaaccccatgtgaggccatcgggggctctgaaactaggcagcgctggggcagaggcttttagagcagaggatctcacgctttttggcacactgatgaaagctatggcctctcagaaaaatggcctttgcatataaacataacttaaggtggctcctagaccctaagaactagtctagactgagtcctccatttttggtccagagagcagaggtcaacagggcagaacgagggttagagttggggccctagtgcccccgccccaagtccagggagcctctgtcctgagctgtgcacatatgtgcacacaccagcccctctactgctccccacacacccagcctgcatcttctcaaatggaatccttgaggcagttggcctgggggcattcaggtcaaacaggaagaggaggagaggagaggcctatgaccttcatgtcctggtggctcccgcgggagcatgggaggtgcctgccctgagctcccatagcctcccgacccctggccggtagctctcagggaacttggaggcttggcacagggacggccagaaccagggttataggaagtgggcggggcctgcacagctacctctgtgatctcatgaggttcaacaatgccttcttggccagccacaggcaggctgggtgcgggaaatcaaacaggaaaactcagctccctgtgggtcccaccacacactggaagcagacccagcggcccacccaccatgcagcttggctgtgggacacacttccccacttagtgatgtctcttcaggccccagttcccatgcaggtcacctcttgccacctctttcagcgctgctgcctaaagcctccacctccctctttagtcagtcaccaatcccaggctctactgagtactgacagggcccagctgctcccaagatggagcaggaggcacatggtaggctccagggctccccctgacgccaggcccttctctgtgctggagacagaggctgctgtccagaagagccctgaaaaataggtcaggcgtagctatctatctctttgggaagatgaggttgttacctgctgttggagaaaccaagacgtgggtgacacacagtctttatcagcacaggactgaccagtgctcatcattctgcagaaggctggcagcgcttgcccacactgctt

SEQ ID NO: 97316 - DNA, 12576 bp, Homo sapiens
ctagaaattctaacttttctactttaatgtacatcatataattcccacttttttttttcttttaaacagggatgattcttcaagagacccttcaaacttgggtagagtttacagctctgactttacactcggctttggagactttctttaaattatgtttttattaagattattttattatgcggaaaggtatttgggaaacttgtcacttgcatgtcccatcacgtgtactggctcctctgtggtgtctgcctgttgcgtgacactctccttgcagttcttgagttgcggcagaacatcgcgatgggaaccgatggtgggtggggctgcagagtgccccatcggtcaccttgtttctcaactacctcgcatcattgcagatgctagcgcgttgcctgtcgctttcccttggatacctagaccgttataaagtgtgccacatggacttaccgagcatggagagaggattttagctaggatttgaacacttggtgctgggaacctcagggtattgcttgccactaagccatgaaaccagagacaaaatctctatactgccctgagttggggggaattctcagtgccaactgtggctggtcctcattcaaagggacggtcagtttggtgtcaacatgaaacaccaagatgtctgtctctgaagcgtgattttaaaatccccatgcctgtggctgcgcttcctatttctagggctgggaaacactccttgcatcaaggggtcacttacagaacaaagaatcttttgggggaaacttcctctaaaaccctctcatatatagacagctttgactggagggtccatttttcttccaggatggtgttactgcagttgaaagggcaatatgaagttactttcttaatgtgacctagcaataggcatagctacgtggcactatattctggccagactcgatgtgtactctaacttaagaaataaatcagtaaggcagaacaagagacatgctttgcttctcattctctttatgtcattggccagatgggaagcgtctgagcacgttgctggcttgcttgtgtgcagtcagctgaattgtcagtgccgggtgctcctgcaggtgagcagccttgactcagcagacaacctgagagtttgtttaaaaactaagaaatgaggctttctttttaataggaaccagaatttttcataaagcttcaaatacaggttctcagcatgtagagcgagatgaaaaggtgcatgggtgctattatggtgctatttatgactgagaaaggggagggataagcatgatttaggaaggtggtcctttcctctgccaggcactggacgtgggtaccccatatacacagccagtgagcagtgggccagactgtcttcaccagcagaactgcttgttatggtactttgaacgtggctgattgagcataattctaacctcttctcccacctggtggtaccaggagattgtcttcattttaaattttatttatttatttatttatttttttgagtcagggtctcactctgttgcccaggctggagtgcagtggcacaagcacggcttgctgcagacctcctgggctcataagatcctcccacctcagccttccaagtagctgggactacaggttcacatcaccacgcccagctaattaaattttttttttttttaatagacagggtctcgctgtgttggccaggctggtcttgaacgcctggcctcaggcgatcctcccatagtgcagggattataggcatgagccattgcacctggtcaatagtcttttttttgagatggagtctcacactgttgcctgggctggagtacagtggcgtgatcttggctcactgccacctccacctcgcaggttcaagtgattctgtttgcctcaccttcccaagtagctgggattacaggtgcctgccaccacgcccatctaattgttttgtatttttagtagagatggggtttcactatgttggctaggctggccgtgatctgctcatctcagcgtcccaaagtgctgggattacaggcgtgagccaccacgtctggcccgttttttttcaaacattccccaaactgagggtctgacacgcccgttgttgacatcatggtcccccacaatggctgggtgtgtgggtggtgtgaaaaagcctcccagtaattaagttcctgcccctatgtttaagatcactttggctgatcacttgtcaagtgctggccacataatgtaaggtttctgaaaaaagagatcccagatggctctccagagcttgcaaagctcgagcagccccgccacgctggctgtggcagacaggatagggctgaagctggatttacaggagggcaacctgtgcccagtgtttactgacccgtccccggaggcttctccctcatggggaggaaagctggtcacattcctcgttcctttcttaatgtgacctaacaataggcacagctatgtgtaacttcccttcagtaacttccttcagtccagggaacttcccttcagtccaggggatctgggcagttcttagcagtctggagcagctgggctgaagcctgacttcacccttcctttgtagaaatctgctcttttcccccgaaaaacatttccgaggattgtggtgcctggactagcatttagcatggtacctggaccgtggaaggtgctcagaaatgccactcctccttcttgagtaacacatttgtgtagttttcaaacagtcttggtgaccttggggcagctcggggggtgagcagcaggagtttggtaacctgccaccatataggtgtctgtgatcacattggtccctaaccagcatgaatggcagccgaggcaggggttgtgtgctctttgctaagtgggaaaaccaggtctcagagcagttgtgatcacccagaaaatgtcacctggctggtgagtggaggggctgggggttccaaagttctcatctgtgtctgctgtggatgtggccagggtcttcaagttttaggggatcaactgaagtgtgttctgtggaacactagtcctgtgaaatgccctgttcaacaaggtttggtgattttctggtggctcagaccccaaatttaggagtatccttaattgtctcaccagcaggtatttattgggtgtctaccatatgccagccatacccaaacccctgtcccccagagcagttattcagtgggggaagcaccaaatataagctacagagtgtggtagttcatagatggagaccaagggtggaagtgagcaggggagtggcagtgctgggaggtggtgtctttaaaatagggtgggtgggaaattaagcatggacttgaaggtgaagaggaaaggaaataggccgctatgtagcgcagaggccccgaggcaggagtgcaaatgaaacaagttggtgggcgtggctgaagtggcttacataaggggcggaagacattgaggttgggtgggctaggtggtggagaaccatgtaggccatcaagtttgggctttgctcttgaagaatttggagggctatgggtgcaggtgcggcatgagtgtgatcagactctggctttgcagcctctggctcagctggtggagacagcaggagaaacggccagaggcaggaagcagctggaggagtctggttttttttgtttgttttaagctaacggtcttactggaccagaggggtcttggaaaggaactgagacccttagtgtgaggtgctgctctgtgccacagctggcgtagacacagggcactggcccgatggtgacaaaatgcccctggccattgtcactgtcttatagatgaagaaactgaagcacagaggcatagcactttgccccacggtccctggtctttaagacagagctggactggagtctgaggggctgggctccctgcccttgcaggtctgtcctctgcctcctggacagaggtgggctgggcctgggactcatgaccctgcagcatctgaccggctgacccagtgtcctagaaagaaccattcttgtcccaggtgcatgtaatttattaatggagctttgacagtcacaagttccagcaagtcaggggtgggggctgcagggtggcctcttgccctgtaaccacagtcatcaaatatgcctcgccatctttgaggggctttcctgagatgacagattcctttctggcactgtgtagccaactggagtcacagacctcagcctgggccaaatgagcattttagggagaaggacaatcccttatagcttagccctaggggagctctgggcagggttttacacattctttctgaaagtaaggtcatttggggacagggctgagagcagtttcttggctacacagatgggtctgtcagggttgaagccacatgggtgcctgctcatgtgccatgttgaaggagtccctgtccgcctctcagcagcccgcatgggctttactggttggccttacactcaaacaggaaatccctgggtctcaggtggagagtgccgtgccgtcctgcctgctccccagggccctcacaggacacagcaggtgcaggacacaggcccgtgctgctgcagctgctgctggagctgctccttctccatcatcagcgccttcatcttctcttccagcttgcccagctccaccagccacctctgaggggacatgggaaaagcatgtggccaagcccgcctggtctcgggcctgtccgtcctccacctggggccaaactgagggaggaaggcaaagcccaggagcctgagagctttctcagctaggggaaaagtcaggcccctcggcctgctgccaccttcaaccgtgtcagcctgagggaagctgccggctgccagccatggaagggagcctcctccgtgctgggcaggccatgtgcctcctcactgttggtcccttgtcctccattctctgtttccctcttgaaaaagctcttccttgggactgtgtcttgccccctctgccgctttagggcctcccctaaaatgcagtgtatagtctttggggttttctggtgacatctcaacattccagtctctctgctccctcactcaagatcgagtgtgttaactgcccaagtagagggtgaggggtttcaggcacccctgaagggaggatactgcataggatttttttttttttgagatggagtctcggtctgtcgcccaggctggagtgcagtggcgcgatctcggctcactgcaacctccgcttcccagattcgatcgattctcctgcctcaccctctcgagtatttggaactacaggcgcccgccaccatgcccagctaatttttgtatttttagtagagacgagggttcaccatgttggccaggctggtctcgaactcctgaccttgtgatctgttcgcctcatcctcccaaagtgctgggattacaggcgtgagccactgcgcctggccactgcatagatttttaaaaggagagagcttgggcctcttccttcccaccagccacctacccgcggagtatgggatgtggtgtgattgtattccaaccccttgggttcaacggggtgatgcaggacccagggaaccatggtggcttgccctgggctgctcagtgggtggctgaaggggtctggggtcagctccgctccaccccacccactggcctcagcttccgtacctgcctgcaccactcctggatggcgctggcagacagcgggccctggatgctcccgtcgcgccgcagaaacacctccccctggtctgtctggtagagttgcggctggctctgggccttgggggtgtgcacggtcaggcggatcaccttggtaggggcaacagcagctctggaggcgccgcccctcacggtcggcagcccccatcctgccaggctgctcagcattgctcactgattccttagggcaggccagcagggctggcacaggggccatccccagcctcttctcctgtggcccccagtcccgtccctgccccagcactgcctggcaggagtgcaggccatcgtcttactgagtgatgacagatgacaggcccagaggccctcctgtcctgcaggctcaccttgagggggacgctggtctccgaggtactgatcacagggatgaaggtgagagtgtaggcatcgggaaagatctgaggcttgaagccctgcaggatggagtccaccagcaggcgtgcgcggtcctcgtcacggtggctgcagcggatgccctgcaccaggccgctgtcctctactcccacgagcaggctgccgccctcgctgttgaggaaggcgcacacgtagcgccgcacgtggtgcttgaaggccaggctgaggtactcgccgctaccccgcttgaactccatattgcgggtctcgctgcccaggaaggcaccctggaagagctggtccttgcccacgatctgctggtgcacaatggcactgtcggagcacacgccgctgggccggccctggcagctctgcagctgctgggcctggggcctatcaggcagcgtgtgtgtaggccaggtgggcagcgggacaccagagcctgkactggggccagggctcaggccactgtcctcctcctcctcctccttctcctagggtggtagtcaagaatgaatgtatgggtccagccaggaaatgggagccctgaccctgagaaggactgcaagaacccccagtcaggcccctgctgcagcctgactcttacggacatcctgatgcccctcaccaggccgaggggcccagttctgcccaccctcctgcagccgaggcaggaaaccctgctggatcgagggttccagtcagcgctcctttccctgccaagctgggcccttcccaggtgagctgtgggatgcctggtggggaagaagagatttctgcttctcagggctgggtgctgggacatgtgtgggcccattttttcttacttgggttgcagacaggcccctgaggcccagaaccagatcattccagcaggtatctcagcaccctgtgacagagctgcagtaccctgaatggagagggactcccaggtaccccacccacttcctgatttcaaacctttgcccactacttgctgggctattgacaagtccgccctaatccccactttcttctgcgcctcctgaatctcctttcatggtttgggctctgctcgagggcttggtgtgagcctcctcggggccacttcctagtctgggcctccccagcgagcccctccctgacctccctgcttccaggctcaccctttcatgtcaaccctcctgtttttttttttttttttttttttttgagacagagtctcgccctgtcacccaggctggatggagtgcagtggcgtgatctcggctcactgcaagctccgccttccgggttcaagccattctcctgcctcagcctcccgagtagctgggattacaggggcccgccaccacgcccggctaatttttttgtatttttagtagagacggggtttcaccatggtctcgatctcctgacctcgtgatctgcccgcctcagcctcccaaagtgctgggattacaagcgtgagccaccgcgcccagccaaccctccttagtgacgctaacttcaaggcagattgttactcctcacaattctttcatgagcgtgggttggggtgaggagactgaggcacctccctaccagccctgcagctccccagagaagatgaatttatcagtcttagaaacaggataaacttcatacaaatgtgaaattgagttgaaatgtaagccacagagccttttagttctgcaacagtttaaacaccatcattttcacaccaaaagaaaccaaaatcacctgtctcatggagtgacctatcctaacgtcccatgtcccacccaataaagccagcagttcagccttgccttggatgatagccttggtgacctggcccctaccctaccttctggcccaacttccttccttagcaccccctgcagcctttagtgggagctccagggacaccaaatggtttgcccttctgcagacatgacactccctctaagcccccaggttcctctgcatattctgtgtcccttgcctggaatgtcctcccttgcaagtgcctgtccaactccctaagtcccggcctggatttcacttcccctgttaatctgtccccagagagcagggcaaaccttcctgtcttctctcacagctctgagcgcagccaccttgcagctcggtgggtggctgtccagctctggccacagatgcagggcttcctgggggcctggctgggcctctcatccctgccttactcttggcacagagggggtgttcatgtttgtcaattgaacaaatgagttgggccaaggagaaaatcggggcccctgtgtcttctagggtctcccaggcccagaggctggaatgtaaaaggacctaaggagaggaggtcccctcgtggcctttcttcacacaaacgtcgggcttgagcttgaggcaaactgtttttcccagagaaagctggcagtaccagccgcaagccatggtcatttgagtggcagcccccaagtttgcagatttgtccctgcttccccagagacacccctccatccccactctgcaggccactcccactcagaggctctcccttggggtgaggctttggagcttgcttgggaaaagtcccacttacctctctgtggctgaagggcccttgggcctcactcaatagcaggtccttcccacgggctgccagctccttgaggattaggtgctcctccagggccgtctgcaggcgccaggggagggaggccagggtgtccctgtggacagtcacctgcaccagtgcataggccttccgcggccgcctcaccacttcaatgtgctcccgcgccaccggcatctccagccgctccagggtgtctcgcagcaggcaggcaagcaccggcactgagaactgggggttcagatggcccacatagagagtgtgcgccgagggagcctcctcgaggtcagagtactccgtcagggactgctctgcgggtagctccggcagggactcctcaccccaggactccatgaagggctctgacacctgtgtttgcactgatctcttcatgggggtcatgggaaggctctccctgggaaggggttccaggattcctcactgctggctgcttctcccagggtctgtgttctcagtgtggcttaagggctcccagaggactcagggagtgtcccggctcctgggaggtacacagattggcagagactgggcagggccagagagagggagggcagagggcaagcaggaaagggcctgccacccacctgaggcctaggatgagaaagcagagtcacgtggactgagcaagacacagggcctgtgggaagacgggatctgcccaaaaagtggcagaagggaccagaactcaggtctctgagagctccaccatttcagtggccccaggggtcctgtcttccctccccaacccacaggctaggggcctcctaggtaccctcagggtttcctgcctaccagttcactcctgcctccaggcaacagagaaaacctttacacagggcctcctggagaggaggccttaacccaggactctgaggactggctggtggccccattgcagcttctctgcctgctctaaaaccccatgtgaggccatcgggggctctgaaactaggcagcgctggggcagaggcttttagagcagaggatctcacgctttttggcacactgatgaaagctatggcctctcagaaaaatggcctttgcatataaacataacttaaggtggctcctagaccctaagaactagtctagactgagtcctccatttttggtccagagagcagaggtcaacagggcagaacgagggttagagttggggccctagtgcccccgccccaagtccagggagcctctgtcctgagctgtgcacatatgtgcacacaccagcccctctactgctccccacacacccagcctgcatcttctcaaatggaatccttgaggcagttggcctgggggcattcaggtcaaacaggaagaggaggagaggagaggcctatgaccttcatgtcctggtggctcccgcgggagcatgggaggtgcctgccctgagctcccatagcctcccgacccctggccggtagctctcagggaacttggaggcttggcacagggacggccagaaccagggttataggaagtgggcggggcctgcacagctacctctgtgatctcatgaggttcaacaatgccttcttggccagccacaggcaggctgggtgcgggaaatcaaacaggaaaactcagctccctgtgggtcccaccacacactggaagcagacccagcggcccacccaccatgcagcttggctgtgggacacacttccccacttagtgatgtctcttcaggccccagttcccatgcaggtcacctcttgccacctctttcagcgctgctgcctaaagcctccacctccctctttagtcagtcaccaatcccaggctctactgagtactgacagggcccagctgctcccaagatggagcaggaggcacatggtaggctccagggctccccctgacgccaggcccttctctgtgctggagacagaggctgctgtccagaagagccctgaaaaataggtcaggcgtagctatctatctctttgggaagatgaggttgttacctgctgttggagaaaccaagacgtgggtgacacacagtctttatcagcacaggactgaccagtgctcatcattctgcagaaggctggcagcgcttgcccacactgcttctggaagccccaattgggggcagtaaggatggtgccacagttagatgcttcaactaagaaagctgtttgacagcgtagagaagctgccttccttgaaagcagcctttctgaagatgttaccaaatgtttgtttcctagggggtgaggcagtagtttgggtagagcactcaagaaaagaggctatggtgtgcggggaagagaggggcgcaggcctcaactggtggcagtgcgaggctctggggagagtgcattcggtgccctctccttgcccgcccgggcagcagccaggttgggctcggctttgtgtccacagctcttagggttagagaatgacggctccaagctccccctgcctcaccccctctccctcaagcctttcttgcctctgtcatccatgaggtgccctcacagcaactgaggctatagctgttttgagatggccaactcaagtcgtgttgaactgtgcagaaatagctgtccgggagaagcaccttgacagacgaaacacctgaacatgaccagaggcgttctccctacttacctagaggccttgctattgggtggctgttctgcatgaaatttcccaaattgacttgagtgcagcaactttccccactcttcctggcagtctctttaagccactgcatcacatatttctctggcgcctttaacagccttctgtgagctgaatcagttctacttctttttggagatgggggtaaaaattgtctttcatggtaagcactaaacacatttatgaaccatcttttaaatacataaatataagataacaaggttatttacggtgtctctggctctctagtattaggtaatagtattagaaagtataggtgctctgcaggcagcttggagtggtgggttcccagtggggggataagcagccccgttaaccctcttgctggatgtctgtgacctcactgacaaacctcatcttgaactgaaggaaaaaaccctagaatttaagcctctttatgaatgtgaggtggggcccaaagatgaggggcagagagctgagccgctgtggatggcctcttttcatgttatctggacagtgtccactgggtggcccacatggccacaatccctgaacccacagcaggcatgccatcccctcttccccacagctcccacttcacaatctgctgtttgcccaggaaggccagtcaaggggcagagggatagggaagaggaatgagcccagccaggtgcaggagagaacaaggatgatcaagaagagcgaactctggggagcagagttacaaacatagctttccaggtcctgggacccacatcactccagcctcccttggtctcaagccctcccctagcgtgctgcctccagcctgtagatccccacctggctctgacagggcccagccccagttactgcagagtatctctgacttgagtggctccagcctagtgtctgtgccctgggtactgtgggctgccagcctctgtgagcacctgcagtggctttggcactgtaggcacagagccgcagttctgatgcttggctgtgactgcctctgggctgaaggctggaagctgtggctctgccctgacggaatgtggtggcaagaccatgtccagtgactcagggtacttaggtaaagaggctgcaaaaagctgagggctgctgaggggagaagtgttgggaccctcttctcaaggtttcccacactttttgttttggtggtaaagaaggagggatgattcaccttcaggctcttgccaacgagggagtgtggcaccagtgtgagggccggaacagtgtccatttggccca

SEQ ID NO: 97317 - DNA, 28054 bp, Homo sapiens
  misc_feature (1)...(28054): n = A,T,C or G
acaggcacatgccaccacgcccagctattttgtatttttagtaaagacggagtttcaccatgttggccaggatggtctcgatctcttgaccttgtgatccatccgctttggcctcccaaagtgctaggattacaggtgtgagccaccgtgcccggcctaggttttttaaaaatgtaacttgagggggccaggtgtagtgactcaggcctgtaatcccaacactttgggaggccgtggaggggaggatcgattgagcccaggagttcgagaccagcatgagcaacatagtgcgaccacatctctacaaaaaataaattagcagggtgtggtggtgtgtacctgtggtctcagctactcaggaggctgaggcaggaggatcgcttgagcctaggaggttgaggctacagtgagccatgactgtgccactgcactccagcctgggcaacagagagagaccctgtctcaaaaagaaaaaagtaatttgggctgggcgcagtggctcacgcctgtaatcccagcactttgggaggcccaggcgggcggatcacgaggtcaggagatcaagaccatcctggttaacacagtgaaaccccgtttctactaaaaaatacagaaaattagccgggcgtggtggcaggcacctgttgtcccagctactcgggaggctgaggcagcagaatggcgtgaacccgggaggcggagcttgcagtgagtggagatcccgctactgcattccagcccgggcgacagagtgagactccctctcaaaacaaaaaaaaaaaaaagaaagaaaaaagtaatttgagcgaaggcactttgctcttaaaatcctgcagctttactctttgatctgaggataaaatcctaagtgttttaaggccatctctttcatttcccacaactccacagtttgtctcccttagggctttttttttttttttcagacagagtctctctcagtcgcccaggctggagtgcagtggcacaaccttggctcactgcaacctctgcctcccggattcacatgattctcctccctcagcctcccaagtagctgggattataggcacctgccaccacatccggctaattttctatttttagtagagacggggttttaccatgttggtcaggctggtctcaaactcctgacctcaggtgatctgctctccttggcctcccaaagtgctggaattacaggcaattacaggcggcagccaccacgcctggcacttagggcctttatagatgctgttctccctgacttcatttagggacccccctcctttctttttattttactttttttttttttttttgagacagagtttcactcctgttgcccaggctggagtgcaatggcgcaatctcgctcaccgcaacctccacctccccggttcaagtgattctccagcctcagcctctggagtagctaggattacaggcatgcactaccacgcctatctaatgtgatttcttagtagagatgcggtttctccatgtccgtcagtctggtatcgaactcctgacctcaggtgatctgcctgcctcagcctcccaaagtgctgtgattacaggcgtgagccaccgcgacacgctccgcctcctttcttagtacaaatgtagcttgatagtaatagctattaacattcatccaaggctgggcacatggtggcttacacctgtaatcccaacactttgggagactgaggtgggggcggattgcctgagctcaggagttcgcaaccaggctgggcaacattgtgaaaacctgtctctactaaaatacaaaaaattagcccagtgtggcgatgtatgcctgtagtcccagctactagggaggctgaggcaggagaatcgcttgaacctgagaggcagaggttgcagtgagctgagatcgcaccactgcattccagcctgggcgacaaagtgagacatctcaaaaaaaaaaattaatccaaacaatttatgtgtatttatatgtattcatttattctcacaataacccttttaattgttaataaggtttattagtatagttcagatgagaaatttgagggtcagagatgtgaactagcttgcccaaagtaatataggtaataagctcccccaatagacaataagcttcaggaggtcagagcttgtgtgggttttgctcatctgtgcctagtattcatttgtttatttaacaaatatttaggccaggtgcagtggtttatgcctgtaatcccaacactttaagaagccaaagtggatcgcttgaggtcaggagtttgaggctgcagtgagctatgatcaggccactgcactccagcctgggcaacacagtgagactttgttgcttaaaaaaaaatacatgcagtggctcatgcctgtaatcccagcactttgggaggccaaggtgggcggatcacgaggtcaggagatcaagaccatcctggctagcacagtgaaaccccatctttactaaaaaatagaaaaaattagccgggcgtggtagtgggcacctgtggtcccagctactcgggaggctgaggcaggagaatggcgtgaacccgggaggcagagcttgcagtgagccaagatcgcgccactgcactccagcctgggcaacagagcgagacccagtctcaaaaaaaacaaaaaaacaaaaaaaaaaatacacaggctgggtgtgtggctcacgcctgtaatcccagcacttggggaagccgagacgaatacatcacctgaggtcagcagtcggagaccagcctgggcaacatggtgaaatcccatctctactgaaaatacaaaaagtagctgggcatagtggtgggtgcctgtaattccagctacttgggaggctgaggcaggagaatcacttgaatccgggaggtggcggttgcagtgagccgacatcacgccactgcactccagcctgggtgacagagcaagtctctgtctcaaaaaaaaaaaaaaaaaaaaaaggctgggcgtggtggctcacccctgtaatcccagcactttgggaggccgaggcgggcagatcacaaggtcaagagattgagaccatcctggccaacatggtgaaaccccatctctactaaaaatacaaaaattagccaggtgtggtggcacgcacctgtagtcccagctactcgggaggctgaggcaggagaattgcttgaatccgggaggcggaagttgcagtgagcctagatcgcagtactgcactccagcctgccaatagagcgagagttggtttcaaaaaaaaaaatagccaggtgtggtggcgcatgcctgcaatcccagctacttgggaggctgaggcatgagaattgcttgaacctgggaggcagaggttgcagtgagccgagactgcaccactgcactaccagctcggtgacagaggaagatttcataccccccccccccaaaaaaacaagaaaacacacacacacacacacacacacacacacannnnnnnnnnnnnnnnnnnncacacacacacacacacacacacacacacacacacaaacatatattgaatatttatttatctatttattttttagtaacagagtctcactctgttgctcagcctggagtgcagcgacatgatcatagctcactacagccttcaactcctggcctcaagcgatcctcctacctcagactcccaagtagctgagaccacaggcatgtgtccccacacccagccaattaaaagaaaatttttttttgtagagatagggtctcactctgttgcccaggctggtttcaaatgtctgggctcaagcgatcctcctgcctcagcctcccaaagcactgagagtataggtgtgagccaccggcctggccagttactgaacatttagtacgtgctatgttaagcactattctagattcctgttctcatgaagcttatataccaatgtggaaaagatagatactaaacaggtaaacagatatagaacaacataattttgggtaggaataacaggcttgaagacaagaagacaagttggtgtgatagtgattaacaatgttgacggctactttagaccacaggaggtctaggaagactttcctgaggagggaatctatagaaggagcactcccataaatgttcctttttttttgagacggagtctcgctctgtcacccaggctggagtgcagtagcatgatctcagcttactgcaaccgctgcctcctgggttccagcgattctcctgcctcagccttccaagtagctgggactataggcacgtgccatcatgcccggctaattttgtatttttagtagagatggggtttcaccatgttggccaggctggtctcgaactcctgacctcaggtgatccgctcacctcagcctgccaaagtgctgggattacaggtgtgagccatcgtgcccagccaatgtttcttgatttaatatagttattagaatataaactccatgagagagggagtgacttctggtccaccatggtatctccagcccctgtattgacattggcatagagtaggctcagattaaccatttatttgaattaattaatatataaatacacatatttctttagtcatttacttaaatcagtgcttttgaagggggatgtctgtgtcttttggcaatttctgtttttggttttcacagtgatggcaaaggtggttcctggcacttatggaagaagggatgctatatatcttgtaatgcgtgtggacagtcccatataacatagtcctataaagtgatatgacttttttttttttgagacggagtttcgctcttgttgcccaggctagagtgcaatggcatgatctcagctcaccacaacctctgcctgccgggttcaagcgattcttctgctttagccgcctgagtagctgggattacaggcatgcacccccatgtctggctactttttgtatttttaggagagacgggggtttcttcatgttggtcatgctggtctcgaactctcgacctcagtgatccgcccgcctcggcctcccaaagtgctgggattacaggcgtgagccaccacgcctggcctgtgatacgactttcaaatgacctgccagactctcatgcagatgaaaagtctttttataattatccaagcctagaagaaactttaaacataggaacagaaagtatttctgtgcccttaaacacaaactaaatgtccgggaatgccaccagcatgtcaatagaggggatgcttgtgtttggtttcattgaagctttaccaaaatgtgctcatcttttcagaaaatcccatcacccatggatactgcttgcatttctagttcctgacgattctacctctaggtcaacggtatcctgaaaacttctcaaatctttattgtatttggacccagacatttacctattggaccacctattattttattttaacttattttatgtcaccttcatttcacaatttggcataccatttaatttttttttttttgagagggagtctcactctgttgcccaggctggatggagtgcagtggcacgatcttggctcaccgcgacctccgcctcccgggttcaagctattctcctgctcagcctcccgagtagctaggactacaggcgcatgccaccacgcccggctaatgttttgtatttttagtagagacggggtttcaccgcgttacgcaggatggtctcgatctcctgacctccatgatccatccgcctcggcctcccaaagtgctgggattacaggcgtgagccactgcacccagccccataccatttaattttaaacctcatgcgtgtgtgcaggttaaatggctcctaggttccattcccgggtgatgggtgggagggtgttaagatttatttgttatagaaaggggccctggggtctccgcagccgcgagctgggcggtcctcccggcgccaggggtcgctgtagcgccgcgcgccgcgccgggtcgctctcgcgtggccgccccgcctcgcgccccgggccgagtgggcgggcacgactgcgcccagtcgcgaggcgcccttcgaccagacacgcgggcgggcgggtataaatggagcggtggctccctcggccgcctctctccgccccgggtcgctgccgcctccgccgctttcgggcttcgcagcctgaggaaaaaaagagaaaaagataaaaaaaatctgaaaacgcttcaaaatcctgaaaaaaaaaaaggaaaagaaaaaacgaatcctcggagaacccgcggggaagtcactttcgtacgcttccggcctgccccgcgcccgccgccgcagcgcttggcgtccgtcggtctccgtccgtcggtccgggggtgagccgcccgcccggcccgccgtgccctccccccgctcgggccccgagccccgcgccccgcgcctgccccggcgcaccacgtgtccgtgctgcccttcgccgcccgcccggggctcgccgagtcggcgcccacaaagatttggtttccctctgccccggcggttgtaatcttaaaccgccggagcccgaggcctatatttatagagaaacgcgtgtccccgaggccgccgtgggcagcgtccggtcgcctcttaaaggatttttacccttcggaaggggattccccgtttaatttttttcctactttgattttttgaaatttggagcttcgcaccaggaccgcggagaagtgcaaagtcgcggggagggccgtattgtgcggagagccttttgtctgcggtgctgcggccgtgggagccggcccccgcctcccgtttccgtcccgtctccaagcccgccgactccagctcgtcctcgccgcgccggtgccacctgtgagccgcggcgcgggcccgggctccgaaggcgcccctttgtcctgcggcgggcccgataagaagtcctcctggcggggctcggggtggtggggggcggggagatgaacgctgcggccagcagctaccccatggcctccctgtacgtgggcgacctgcattcggacgtcaccgaggccatgctgtacgaaaagttcagccccgcggggcctgtgctgtccatccgggtctgccgcgatatgatcacccgccgctccctgggctatgcctacgtcaacttccagcagccggccgacggtgagtagaagctgtgcccacacgtgcgtgggagcccggaggaccccgggagtcgtcttctggcagggccctcctgccgaggagggcggcatcacgacagcatgttgccaccgaagctgggagcagggtgcggagattgagaacgcggacctggcatcagatgactcgagtttcaatcttgtttctaccacttgctaactgggtgaccttgggctacttattagtgttgctggtagtggggttggaaaccaaggagactgtaaaacaggattagagtgaagccactggcattccactgcgtgtggtccttgtcagtggggctgggctgttagagatccttgcttgtgcccctcacaggctggccaaaaaggcgggacgtttgaaacacaattccccgcgaaagttttacattgtaaagctcctgcccgctccgccacctttactaaccttgactacctgatgttgtgctgataaaggatcagtcagggcaggcaggaagcagggggaaggtttctgtgcgttaaactttcgcagagacttaggttagtgccacaaaagctgcgtgtgccaggccacctccttggtctgtgtgtttgccactggagtggagaagtgctttactctggacaaatggtatccaggctctgtgctgtagagtgtcgtggaggtagtttagggaagcgtcacttgaaaatctggtgtcatttgtcacctcagctgtaacagtgctttgcactagtcagagcccttttatttcatctaatctgaagaaaatgggactcctgagaaggagaaggaatgcaaaaagttggaagccaagttaggactcccagcacagtgctctgccacctcagattgtggccttagcgtggagcatggagagaggtatgctgcaggcgtggcaggagggaggccagaggaaacctgatcagaggctgcacgtgactccagattaaaagggaacaactgcagagatcattactgggagaaacaagccattctatggcaaagcatctccaggtccctagttttggggtcccccctttgttttctgtctgaggcccagagttactacctgcccaggttgcggctgagaccagagaattggacatgttgagagggactaggtattgctactgtcaatccagtgtgctccaagctgagttctgtccatggccataggagcgcaaaggtagctgagtgtggtctttttaagggataatgtaccacattagctgttgtctgccttactgayttttgaacaaaagtcgtgtcacttagagatagcagaagctattggtcagtgtgtctgccaacacatacttctgcaggacttctccctgctataaataagtgcagccagatttgtcagactaagccggcttgccttgtgcagtgctgtctggaaatagacgaggagctgttgttgaagtgggctcctttactgctaattaatgaaatagtttgcgatcccagctatctatctctgatagccatcacaagcaaagtcctctttccctggactgttcctgacttggatcggtcttgtcatctccccttttcccaactaccccccacacagatgaggcccaccttctgaagggggtggggaaagttgttggaaataatgagtgaaaataaattctcccggctaatgaaacagttgagcttgtggagcggcagagttggggaattttgtcccccctttaagtgagatgttgtcctgaggcaaggagcaggttccactgctctgaccctgtctaaatcccctcatggaggaggttctgggtgatgtcaccgttaggagatgccatcatagccttaaggaaaagtggccaccagatctgggcatccttgttgcgattagtgatgagaagtgttttggctggcaggtggtgttattttttagcttttggttctttttgttgttgtttgttttgagacactgtttcactcttgctgcccaggctggagtgcaatggcgcgatctcagctcactgcaacctctgactcctgggtccaaacaattttcctgcctcagtctcctgagtagctgggattacaggcacccgccaccatgcccagctaattgtgtatttttagtagagatggggttttcaccatgttggtcaggctggtctcgaactcctgacctcaggtaatccacccgccttggcctcccaaagtgctgggattacaggagtgagccaccatacccagcccagcctttggttctttaaattgtctctggtgtacacacggacttggttgggaagctaaggaagcattccaaggtgttggatggggaagttggttgagcacccagggtagctgaagtcctagaattctacagaacttccattaaggcttcaaaaggtgggtgcagggcctgccatctgcgcactgtctacttaggcagaaggtatggtggttttatccttgtgatagtacagagaacttttccatgtgtgatcagttgtgtccattttgatgactgatgcttttttgtttaagtcaatttctgttctcagaaattgaaaataaactggactgaattctgaattcagggatagcacctttttttttttttccagatcatttgctttacaggttttgtcacttgtctccataggtggattgcagactaaatgacttgataactttgatgcaatacctcactgaaaaataaatcagataatctagtattagtttcgtaattactagctagctgcacagcttagttaccctaaacataagtttgttcattttgtaaaatgtataatttcagctgtcccacctgagtcatggtgggtggtagtctgcaaagtctcttstaagtggtaaagcttagtcaaatgtraggtattatcactggatcttggtgtcattaaggccatttagattatctttacttgtggcccctttatccaacaagggcacagacccagaagggtgtttagacttctgtcatgaagtagagtcattagctggaacttatgcttcccttactaacagtgcaggctggaggaatctgatgcccttttattttaatagagttgccttttatcaagagtgattaccttgaaaagtcctggagtaatctgttcttaggctgttggcctgtgggagctgacgttttctctccttattgaaatgtgtttctctcttacagctgagcgggctttggrcaccatgaactttgatgtgattaagggaaagccaatccgcatcatgtggtctcagagggatccctctttgagaaaatctggtgtgggaaacgtcttcatcaagaacctggacaaatctatagataacaaggcactttatgatactttttctgcttttggaaacatactgtcctgcaaggtaaacattgattaaatgattttagcagaataattaattgattcttgaaaacaagataaataccaaacagagaactatcttggaattggggaacaagatatgggaattttcaaaatgctggacatggaatcctaaaagttcccataggtaatctcagggccayacccagcgtaaccagcacacgctttcatacccttgttctttactcagcctgaaatatccttcctattctttagctttggaaagcccacgtttttcttttgggatgggggaaagtagaggaccagagaagtgtctctagtcttgaggaaacttaatcactttagaagcataaattcactctattccttctacgtatctgttctatgctgagcactttaaaacttaaacggtggtggtgtatatgtttaatgccatactacactgaaaatctgttgtggccttggaaaatgttttgttttctgcatcaccgtggtttgcacccagatctcttaaaatgtgttgttgtgttttaaagagacagagtcttgctctgtctgtcacccagggtggagtgcagtggtctagtaatagctcattgtagcttcgacctcctgggctcaagccatcctcccacctcagcctcccaagtagctggaactacaggcacgtgccaccacactcatttaatttttttcttttttgtagagacagggtctccattgtccaacgatctggctccaacgatcctcctgctttggcctcccaaagcattgggattacaggcatgagccacagcacccaattttaagtattttttgtttgtttgtttttgataaaaataaaacatttggaatagaagcatcttagtagggctacctttgtaaatggaacacttactaggcacctggtgctgtgctaggtgttagaaaaattatactggtgtacttgaccaccattggccatggatgggctagagtctcctcaggcacaagataccctgaggttctcatgtctcaggagctggccagttctgctaaagtggtccgccttgtctttgacaggtggtgtgtgatgagaacggctctaagggttatgcctttgtccacttcgagacccaagaggctgccgacaaggccatygagaagatgaatggcatgctcctcaatgaccgcaaagtgtgagtgtcccagtccggagcaacaaccatcgcatgagccagccgtggccccacctcgstattaactggcacacacaaggcggctactggttctcggcccaagtgtggcctgctcctacctctccactccagggctggtgagtctccctgcctgagccgtggcagcccttttgactcgccaaggtgggcttcctgcccaagccatggcctgcctgccgcctctcccttaaaggcatstgtctgtgggttttgtgagcatcaacaactggggctggctggaaagcagctctaagctcactctgagtcggggtcttggccagcggcagagtggagagggccctggactgaccaggagctgtatactagcagtgtgaccttggctttcctgtgattcaggtctgtccatgggtccctcgctagtggttgatgccaaattgtccccgcggttctccattttctaacttatgactcagtgacctaatacaaggctggctccacagtaatacttggtgacaatgaaaaaatcccatccctttgcagaaaaacttcataacagaccttgttgctttgatgtggttgttactgtagaatgcagagagggggaacttaccaaagccatatggggagaagragagacaataagtcttggctattacaagccaaaataatttttgtcctttgtgtcattcagtatgccagaggatgggttatctttataatgtctgtgtgtgcagtggttgatctacagatatcactaaaaagaaatacaaaaatgtcagtgcatggataaattttcttttaagtataacagaccaaaataaataaatttaaaaagcaaagggtgccccttcactccaacaatctcatatctaggattaaccactgttaacagtttggtttgtatccttccagaccttttctatgcatttacatagttgcacagaaatgaacattttaaaaacatggccatcaggtttmttcatgaaggcagtgtgatgtggtaggaatagccctggtctaagccaggagccctggggctggtcctcacaggatagtcctgcctttttctctttctgctggggacttggggtatctctgagcctccttggtggtggatggggatctcgtgttttaacctctcctgtcagtctttaacctgtattcctttgggtccctggacatcatgttttattcctctgggtaattactgttcttcatgrtttcattttagatttgtgggcagattcaagtctcgcaaagagcgggaagctgagcttggagccaaagccaaggaattcaccaatgtttatatcaaaaactttggggaagaggtggatgatgagagtctgaaagagctattcagtcagtttggtaagttggggttccttgtctcctttcacagtctaccagacccatctgttttttcttaagagatgagggcactgctccagagatttgcttcaagtgagtttccagagggaagccttctgttcctgagctgtgctcaagatggtgttactaatagttctgtcctttggtaataggtaagaccctaagtgtcaaggtgatgagagatcccaatgggaaatccaaaggctttggctttgtgagttacgaaaaacacgaggatgccaataaggtgagtataccacaaagattgggaaaagcttttaagaggttgccccagagtatgggtagggtcttgctagcacctacctagagcygggacggtctgagtatctggtagtagatgtaccattactatactctgggatcatcttcctgggttccgcatgttaacttcatgtaggtgtttacaaagcacttggcacatacctgtcacctcagctatcagttgttgaaagaataggacagacgtttgttatgctgcaaaggtgagagaactaaagcccagtgagtgctgatttgataacagcacggcagctacttgtgggcaaagcattgtgccagaccctcaatatttatcacttaaatacccacaaaagcacctgcagaatttactggcagccggaatattatatcgccctaggctcatgtcagcacacttgtgtttatacacctgtactatttctatattatctggatcaataacccatttaaatattaacctcactttacagatgaggaagtttggatttgtgtgacagacttcagaggtggagtgaatttagtttttagtcctatagtagaaagaatattttttgggacttagacctccagaataagaccccatcgctgcaactttattttaaagacatatttttcctctctaggctgtggaagagatgaatggaaaagaaataagtggtaaaatcatatttgtaggccgtgcacaaaagaaagtagaacggcaggcagagttaaaacggaaatttgaacagttgaaacaggagagaattagtcgatatcaggtaaggtggtcttggcccagcctagcaatgggatttgctgtgaaatatttgcagaacacccctatgtttagcgggctttctttttgaggacttggagtgtgttcttcttcccattttacctaaaaagatgaggtttaaaaggatatatacctactacatatgactgattattatagaaccagaaacaagagatgggtttattcatcaagaagctctctattttggaagcctcagcctgttgcttttagccatgtaggttccttttacttaaatgagactcctttgtttggcatggcttcaagaagacccctgctggggtgggtgagtggtcaccagaacagctgtggggagaggtgacaaaaggtgagtgcactgatgatcctgtcagtttcagggcagtagtttcacaactttggacttgcatcagattcatcagcagagcttgttaaaacagatagctgggctccagccccagagtttttcttattcattgggtttggggtctggcctaagaatttcatttctttctttttttttttyttttcttgagacagtctcgctctgtcgcccaggttggagtgcagtggcacaatctcggctcactgcaaactccgcctcccgggttcgcaccattctcctgccttagcctcctgagtagctgggactacaggcacccgccaccatgcctggctaattttttgtatttttagtagagacggggtttcactgtgttagccaggatggtctcgatctcctgaccttgtgattcgcccgcctcggcctcccaaagtgctgggattacaggcgtgagccaccgcgtccggccgagaatttcatttctaacaagttcccaaagatgctggtgctcctggtctggggccacccttggggaaccactttcttagggaatatttgtgatatagaagtgtagttaacagtgatctttttccttcagggggtgaatctctacattaagaacttggatgacactattgatgatgagaaattaaggaaagaattttctccttttggatcaattaccagtgctaaggtattatactgcgatctggggattgaaagcagtggtattccattataggcttattggcatttgtcccattgaaggaatagcatttaaattatgttcatttctgaaagtagctactacgtttttctagcaaaatttctggatgcattctggagaatgacatttcattaggttaacattacactgtttcccaagcactggagtctggagaggaatttgacccagcccctccttgccaactcagagcacctgaatctttcccattccttgctgcctcgtgccggtgtggggacagatggtgctacagaatgagcagaggaaatccagacaggttgttttccatttgtcttggggcctgtctctacagctctgccacattttctccttgagaatgaaggtattttgaagattttggaggtgggcttgggaacttctaccctggtcttaaaaagagaggaaaggggagtggaaggtttttctatgtttcgtagtgtgcatcatttgcttgattttctttgataatcatatcaactaagttagcagggtaagtaggaacctcattttaaagataaggaattttagtccttgaacaagagaatgctgactacatggggatggtgtactgcttgtccttggcactttgggagcaggatggaaactggtgccatctgaacattttgagttatggccggatgcagacgccggtcttgctaaacaggtgtaccagatgccacaaaatcctttwgttgatgagaagggaagccacgtgggctggtaagggcttagtggccctgccctggctcttagtggactttgctcccaacctgggaatgtggaaagcaatgttatcagttgtagtagggagttggccagaggccaactgtgggtttgcccagttcttaccctttcgtttttgctatgaccccccccttgactggccctcatcagtgtaaggagtgatcttctatccttgcttatctgcctagtagtcaagttggcatttgttaagagagcagaagagccataccttgaattgtccccattttcattatgatggtgtggcatttttattcacataccttactggcccatctcattggtagagagttatggagtgatgcacttctttacttccctatcctccacttcaggaggctctctgggccattaactaagacataaaacartgacagtcacaccagagaagacagtgaataaccttgtctattaggaagaatgccatttgtgaatgatgaacttaatgtgggaaaagactgcctgaaccagtagacctgtggttttgtagctgtttggagtatttcttggaaattgagcctcaggaaggcaagtgagactagaatctaggctgcctatctctgagctggtcatctcattgaattaatggtggcagtcattggttacctgaacattttaggactcctgtccacacgtggtattccaaaagtgttatcctgacgttggtaagagcttgttagagtttgtccaccgaggtcttgaagcatatgagatatgaaaataaattgctcagtactactctcaagatgttttgtggttacccggagtagctatccaccaggtatcaggaaacatctttgagttcctggttttattattagccatatcatagtgtttcagaactttagcatcacctggggactcaaagaaaacacctagataccttagaggttgtgacttagttggtctggggtaaatcctgtgccagaaccctgacctagactcagtgactgcagcagaacccaggctttctggttcttctgaatagttccctccccacccagggacatccttttttttcctatttgtaggtttgttttgttttttttgttggtttggttggttggtgtttttgttttgttttgttttgttttgttttgttttgttttggagatggagtctcgctctgtcgcccaggctggagtgcagtggcgcgatctcggctcactgcaatctctgtctcccgggttgaagcggttctcctgcctcagcctcctgagtagctaggattacaggtgtgtgccaccacgcccagctgatttttgtatttttagtagagacggggttgcaccatgttggtcaggatggtcttgaattcctgacctcrtgatccacccacctcggcctcccaaagtgctgggattacaggcatgagccactgcgcctggccctttgtttttttgagatgaggtctcactacattgctcaagctggtctcaacctcctgagctcaagcagccctcccacctcagccttccaaagtgctgggattacaggcacaagccatcacacccagccagggacaccttatttcttaagtagctggtctcattttgtaggtaatgctggaggatggaagaagcaaagggtttggcttcgtctgcttctcatctcctgaagaagcaaccaaagcagtcactgagatgaatggacgcattgtgggctccaagccactatatgttgccctggcccagaggaaggaagagagaaaggctcacctgaccaaccagtwtatgcaacgagtggctggaatgagagcacttcctgccaatgccatcttaaatcarttccagcctgcagcgggtggctactttgtgccagcagtcccacaggtgggtgtgctgtttggtcacagctcttgggaacctgccggctggcagtattctgcagtggttggggagagggatttttcgttattagagttctagaatgtcacaataaggacccttcaagtaaaaatgaaggacttacccatggtcacaaacacacacccacagtggcagtggtagcataaaacagtccccattagctgacccctcagctcttgaatagaaagaacatttaaataattagcttaggtcctggttagtgagatgagatgagatacttctctaggatgggttcagtccttaagggggtgtttgggtattcttctgtcttacaggctcagggaaggcctccatattatacacctaaccagttagcacagatgaggcctaatccacgctggcagcaaggtgggagacctcaaggtaggtggtggggaacagtaattgacagcccaggatatacctgtcctggtctcccctgcctttccttcttccccactctgaggcacagcctaggttctggtccacatcacttctcaatgatgtgcaatttttctcttcaccaggcttccaaggaatgccaagtgctatacgccagtctgggcctcgtccaactcttcgccatctggctccaactggtaatgctccggcctctcgtggcctccctactaccactcagagagtcggtgagcaaactggcctttagaagtgtggcctggggaggagggagtcaggatgactaggctctgtcctgggttggtcagtttgttgggctcgaatttatcgagtcctggttctgtaatcttagctgtgtgcttaggtggccacttcaggagcagagaaacagtatgagttctaggtgtgtcagttgcttttaacattctttgctcatcggtgacctatgtgaaaaaggttagttgtagaagtttgctagctggatgaccacagaggcagcttgttcttttgggtggggtgaggaatacaaggaaacagtgtatacagaatatgtcttgtattccaagatgtggaaagagttgtatgttatcctttggctcatcctcgaaagtagtagtggccccctgtgcaatgtgttgcgtaaacgtgctttgaaatttctccttccgtgggacgtggccagttggacatctgccgccaacactgatgtgcatttgctggtctgttgtagggtctgagtgcccggaccgcttggctatggactttggtggggctggtgccgcccagcaagggctgactgacagctgccagtctggaggtggtattggatgcacacagaagggggaaagatgggatttgacgggtctttgcccagactgatgggctttaattgtatttgttctttccctaaggcgttcccacagctgtgcagaacttagcgccacgcgctgctgttgctgctgctgctccccgggctgttgccccctacaaatacgcctccagtgtccgcagccctcatcctgccatacagcctctgcaggtgaggttcaccagacagaatgcttaaaaggatttcccccatttccacttgatgtaaaagaagctgtgcttttgattccttcaacaggtattaaatgcctgctctgtgttatgacgctatgttctgattcactgtccctgcccttcaggggctcactagtgggaaagaaggggcttaaaagtgctctgcctgatgccagttcactcagaaatgcctcagagcgggcagccagtgcttcctcttctgtttgtacgaaataatgtgctcattcagctgtttgagcctccaggtcacttccgcatccaatgacctattggatccttggctgctctgcaagatgattggtacattaatgcaggaaataacttcaacttacagatcggatgttcagcttcaaagatgtaaagtgtgtgtaggaggtgaaggggttgaacctagagcttagattttctaagctgtaacttgctgtctctagacctgtgctctagatgcaactagtttgtttcagagcctaatagcaatttgctgtggaggtgtcaccctaagccttcaggcccataagctgcttaggagattactctttaactgtcctgtctcatactctctaagttggggatttcctagaacttgatgctatgtaaaataccttttctttgcaaggctttgactagcattgacgttgcatgttgaccgtttttaagcatttgatacaaaaacatttggtagaattaaggtgatgtggaatgtaattataaatgtgttgatatttactccctttgatccaatctgcactgagatttaccctaaaggaaaactaattttcaggaaaaggttatatacaagtgtttacccttatttatatcaaggcttttcattcttgagtaactttgggtgtattaaggaaatgtcagaaaatgcttgcctagcactataggtttgttttattatttacgtttcacttcgctttctgatagcatgccattttcattgtaattggttgtgtttatgtccataccactctgttcctcaacacacccctcaatccttcaaggactgaaattagttcctttagagcaaggacagccacctcctctcctctttcacatagtcagatgttcagatattgaacaggcactcaaccaccatcaggtgttgtcctttcctcagtgctaacccactgcctttcctggttcccaggcaccccagcctgcggtccatgtgcaggggcaggagccactgactgcctccatgctggctgcagcacccccccaggaacagaagcagatgctgggtgagtgacccacttgcttgcagaagaagagggtcccagagcctgatgccagctaggacaccagtgtccattgtttactgggatttgatttgtttttttattaactatcctccccataggagaacgcttgttcccactcatccaaacaatgcattcaaatctggctgggaagatcacgggaatgctgctggagatagacaactctgagctgctgcacatgttagagtcccccgagtctctccgctccaaggtgagctggggctcagaccctgcagcttcagttctcagcttgggaagactgggggcaaacttggatgcccaggtgcagcagaaagtgggatctgctgcccccaggacccctctcgtcatgccttgactgtgactggaggctgcagtgggtatttgggaaagtagttagcaccagaagcctagggatcatctgtacagttggctttggtccaccactaggtctgggcactggggaggggtggagtagctctcctagattcactgaccacctgaagatttctygcaggtggatgaagctgtagcagttctacaggctcatcatgccaagaaagaagctgcccagaaggtgggcgctgttgctrctgctacctcttagacaaggaaaaaccgtatgtgtggctattttcatttttgttcctatgagcattgttcctatgagcattgtctttgtggtttgacctgaggttgtatatatgctcactgcttagctctgggaatacaataagtacagttagttacacggagtgtgttgcaggtgacttcttatcatgaggactgtggactttgtctgcaggagcttgartgaataataaaactagtactggttgatggttgtaggtgtctccagatagggaaagaagagacagtaaaataagctaaggaaaaagcacatggtaaggaccagagctggtgtgttgggagggttgacttggcatagtcatgaccctcttgtcaagggcctcaggagccttgtcatctagtggtaaagaccagagatgctgctaaatgttgtacagtacacaggaggacagacccaacagaatgtccaaagtgtcaatagcactgaggttgagaaactctcttctagaataccttcctttatccactatatgtkaatgaatctaaattatttgattatgcatttatttgtgttggtgcttttctttacaggattcaaaagccaaataaccccttatggaattcaactcaaggtttgaagacttcctagcttgtcctatggacctcaacaccaaggattacaaattgcaaatttaataggtcattttgtatcaaaaggtcaattatgaagcacctagaatttttcaattatacgaatatgttctttgggttctgctgtggcccagacagtgttaactttttttttattgtgggttttgattttttcccccagaaattggttttatttgatgtacccaagtcttacgtttcccaataaagaaaaaaaatctccataaaactgcctctgtctctgaccacagttttactctatgaattccggttttcactggaagtaactttaggatgtgaattggttccagtgatagtttattctttcttgacttgaagctgacaaagattagcaagatacacagaactgttaaatatgatcctgtcccacactgttctgttacagtatgattgttacattagccccatttaacttagagggaacagagatctgatgtggtcagagcagaccatgggtctggcccaggaaaatctggggcagagtggggttggcgcacaccccaaggacatacggtgagatctgcagatcccagttggttagttgagccccgtccttcccttcctgaactcggttggggtgtgtcctgtcccctcttatttcctgcagtcagtttatgctgcattcgagtcagcggatccagttccccagattctgcaaccaagttttcccctagcagggaaaatgggaggtctgtgactatagcaaatggtgctgaagtcttcagtgcttgtggtttctttgatgttcaaagtgacagtaaaatgacatcctaaaggccaagatcacatccctttgcagcctactttccctgcggctccagccttgcctgctttccctcctggagcttgcttggtgcttccttagtgccccatccaggcagtccttagaatgctcatccctcttggcaggctcctttagatctggtgtcacctcggctgggcacagtggctaacgcctgtaatcccagcactttgggatgccgaggcgggcggatcacaaggtcaggagatcgagaccatcctggctaacacggtgaaaccccgtctctactaaaaatacaaaaaaaattagccgggcgtggtggcgggcacctgtagttacaacttcttgggaggctgaggcaggagaatggcgtgaacctgggaggcggagctagcagtgagccgagatcgcgccactgcactccagcctgggcgacagagcgagactccgtctcaaaaaaaaaaaaaaaaaaatctggtgtcaccttaacagatctaaaggagatgtccttgtttccggacggccccttctttccttaatctggtgccggatggggtggggcacggtgcgggcttccggcggaagcgctggaagcaagatggcggccgccgagagggttcacaaagggtagggtggtgtggagcaaggcagggtcctcgcaggcagtgccaagattgagctgggggtgggcagagtgggcggggtgcggacccatggccctacgcatcctgggccaggtctcttgtggtgcttcacgctctcgacctgtgagtggtgcctgctagagctgcccagatcccttttccctaccccttctgaccctggacccagagtggtggttgcgatctgctaccgtgacgtcagccctcattcgttcgttccacaaactccacagctctggtccattagaggaaggaggtcccagaatagctgggaaattacgagaacagcctcactgcacgagttggtgaatgctgtgatggcgattgtatgatggacggtgatgttgaaaccagactggggaatgaccgccccatccggagaggtgagggtaaactttcgggatgctctgagtccagagatgggtttgaaagatgcaaagttaaccaagcagccaaggtgggagccaggctgttgcctgaatggagacaagcagcgagagtcaaaacccagagtctggccatacttagtatatgctatactaagaaatgtggatttttctccgttggccattggactgcttttgaagaataccaaccagaagagtaatataatcgtatttgtattttcttgggataacggaggagagaaaaagaaggcgatcccattcaggaaattgtcaccataaaccagggcaaaaaatgtaggtcagaagagggatagggagaggagtgtatctcacaagtggttttgttatacccagaagagtattgggacccctcccttcctctcctccctgtgctcatgttaacaaggtgttggagcaactgcaccaaaagtgtggagacattgattcagaatgctcttggtatctgcaaagggggtgaaggacagttctttgtgctacttttattccttttggaaacatcacagatattctgattctgctgtattatgaaacaggtgacactgaaaagtccctcttaagattcctgatgccaggaaaataggaaaaaattttaagtcatgagcattctgtgtatggctggtatataatgaatttcagggggatgtctctctaggtcagcatggtggtgatcttggagatggaataggaaggttctgaggacagcagagctaggatgatggtgtggctatgggttgaaatttacaaaaattaacaatctggctgggcgcggtggctcacacctgtaatcgcagcactttgggaggccgaggcgggcggatcacgaagtcaggagatcgagaccatcctggctaacacagtgaaaccccgtctctactaaaaatgcaaaaaattagccgggcgtagtggcgggcgcctgtagtcccagctacttgggaggctgaggcaggagaatggagtgaacccgggaggcggagcttgcagtgagctgagatcgcgccactgcactccaacctgagtgacagagccagactccgtctcaaaaaaaaaaaaaaaaaaaaaaaaaaaaaaatctgttggatttgaggttagactttaagttggaaccatttgggggctttgatttctcatcatttaatataaaaagtgtatagtaaaaaggccaggcgcggtggctcacgcctgcaatcccagcactttgggaggcagaggcgggcggatcacgaggtcaggagatcgagaccatcctggctaagacggtgaaaccccatctctactaaaaatccaaaaaattagccgggcgtggtggcaggctcctatagtcccagctaatcgggaggctgaggcaggagaatggcgtgaacccgggaggcggagcttgcagtgagccgagatcgcgccactgcactccagcctgggtgannnnnnnnnnnnnnnnnnnnnnnnnnnnnnnnnnnnnnnnnnnnnnnnnnnnnnnnnnnnnnnnnnnnnnnnnnnnnnnnnnnnnnnnnnnnnnnnnnnnnnnnnnnnnnnnnnnnnnnnnnnnnnnnnnnnnnnnnnnnnnnnnnnnnnnnnnnnnnnnnnnnnnnnnnnnnnnnnnnnnnnnnnnnnnnnnnnnnnnnnnnnnnnnnnnnnnnnnnnnnnnnnnnnnnnnnnnnnnnnnnnnnnnnnnnnnnnnnnnnnnnnnnnnnnnnnnnnnnnnnnnnnnnnnnnnnnnnnnnnnnnnnnnnnnncccttcctggcggctgtgctgttaaatagcagcagtgtagcagggtaagctcagcctcagcagtgaagccttggcctctgcttacctggttaagtttttcttcaattggtatcacaattacagtgcaagtttctatttgatcttttgtttttattttctaggttaggaattttagacccagttctgctactgactttctgtgtggacacaaactcactgagccttcagttcttcaaatcattttttttttcttttttttttttttttttgagatggagtctcactctgtcacccaggctggagtgcagtggagcgatcttggctcactgcaacctctgccttctgggttcaagcgattctcctgcctcagcctcccaagtagctgggactacaggtgcctgccaccacccccaactaatttttttgtatttttagtagagacggggtttcactatgttggccaggctggtcttgaactcctgacctcgtgatccgcctgccttggcctcccaaagtgctgggattacagatgtaagctgctgtgccagctttttttttttttttagagacggggtcttgctctgtcatccaggctggattgcagtgtcattgatcatagctcaagcggtcttcctgcctcagcctcccaaagtgctgtgattacaggtgtgagccactgcacctggcctcttcatatcttacaacggtaagactagcgggttcaggagcccttctatccctgagttttttttgtttttgtttttgtttttttttatggagacagagtctgtctgtgtcacccaggctggagtgcagtggcgcgatctcggctcactgcaacctccgcctcctgggttcaagcagttctcctacctcagcctcccgaatagctgggactacaggcacacaccgccatgcccagctaattttttgtattttagtagagacggggtttcaccatgttgcccaggctggtctcaaactcctgagctcaggcagtccgcctgcctcaaagtgctaggattacaggtgtgagccaccgcacccagcctatccctgagttttataaagtagtaattcctactactcttggtctctcccagctaaaataagtttttcctgggaacgaagactatgatgctcccttctttagtagtcacctgacccaatggtaagatcaatgctctatacacaattaaagcttttttggaattaataattgttagaccaacaactttttctatttctgtaagttttataaacaaaggtcatcaaagtgcttggaaagcaacttcaggttttacgttctatagtggtacaactgaattttatcttattttaattagttaattaatttatttatttttgagatggagtcttgctttgtcacccaggctggagtgcaatggcgtgatcttggctcactgcagcctctgcctcctgggttcaagcgattgtcctgcctcaggagctgggactacaggcgcctgccaccatgcccaactagtttttttttgtatttttagtagagatggggtttcactatgttggccaggctggtcttgaactcctggcctcgtgatccgcctgccttggactctcaaagtgctgggattacaggcataaaccactgcgcctgacctatattttttttttagagatggggtctcgctctgctacccaggctggattgcagtgtcattgatcatagctcaagtggtcttcttgcctcagcctcccaaagtgctgtgattactggtgtgagccactgcacctggcctcttcatatcttacaacagtaagactaatgcattcaggagcccttctatccctgattttttttttttttttaatggagacggagtctctttctgttgcctaagctggagtgcagtggcgcgatctcggctcactgcaacctctgcctcctgggttcaagcagttctcctacctcagcctcccgaatagctgggactacaggcacacactgccacgcccagctaattttttgtattttagtagagatgaggtttcaccatgttgcccgggctggtctcaaactcctgagctcaggcagtccaccctcctcaaagtgctaggattacaggtgtgagccactgtgcccagcctatccctgagttttatgaagtagtaattcctactactcttggtctctcccagctaaaataagtttttcctgggaacaaagactatgatgctcccttctttagtagtctcctgacccagcggtaaggtgaatgctctatacacagttaaagcctgataggaattaatgattgttaaacaactttttctatttctgtaagttttataaacaaaggtcatcaaaatgcttggaaagcaacttcaggtttacattctatagtggtacaactgtattttattttaattagttaattaattaattatttttgagatggagtcttgctttgtcacccaggctggagtgcagaggtgcaatcgaggctcactgcagcctccacctcctggattcaagcgagtctcctgcctcagcgtttcaagtagctaggactacaggcgtgtgccactgcacccagctaatttttgtatttttagtagagacaaggttttaccatgttggcca

SEQ ID NO: 97318 - DNA, 415117 bp, Homo sapiens
  misc_feature (1)...(415117): n = A,T,C or G
ctggagtgcagtggcatgatctcagctcactgcaacctccgcctcccgggttcaagcgattctcctgcctcagcctactgagtagctgggattacaggtgtgtgccaccacacccagctaatttttgtatttttagtagagacggggtttcaccatgttgaccaggctggtctcgaacccctgaactcaggtgatctgcccatctctgccacccaaagtgctgggattacaggtctgagacaccgcacccggcctactctctgcctctatgagctcaatatttttaggttccacatgtaagtgagattaggcagtatttatctttctgtgcctggcttatttcacttaacagtgtcctccaggttaatccatgttgtcacaaatgacaggatttctttctttctttctttctttcttttttttttttttgagacagtgtcttgctcttgcccaggctggagtacagtggcttgatcacaactcactgtagcactgtagcttcaaaatctcctgggctcaagtgatcctcttgtcttagcctccagagtagttaggactacaggtgggagccactatgcccagctaatttatttttattttttatttttttgtacagttggggtctccccatgttgcccaggctggtctcaaactcctggcctcaagcaattctcccaccttggcctcccaaagtgttgggattacaggtgtgagccaccacacccagccaggattttcttctttttaaaggctgaatagtattctattgtcccatagggactttagaatcaggctgtagaattctctggtgctgaggcctctgcaggcttctgtggagaagatatcccacagagggacctgcacttaggcaggttacaactgtggtctcctgatctttctccggaagccccagaggtacctgtggtctaaggaaaagaacccttggctgagtcataggacctagattctttgccttcgcttcagacagtagagagcagtggttaaagcatgagatttggagacaggcttggatgagaaccccagctccaacactagtttgctttgtggacttcagcaagtcatttaacctcttgaagtctctgtttccttatttgtaaaatgagaataataaaggtaactactgtacagggtttttgggaagacttaatgagataatatacacaaaacgcccaggacattgcctagcacttagtaggagttttgtaaatggtggttgcttgcccttaatatgaaacagtgcctgcaaacacagaaccttagcaagtttcagtgagtggaaaacatcccttcccatctctatcgtccctgctccagttgacagcctcattacctttggctgggactagtacagtagcctcctagcgtaaccatccacacccatctggtacctgtccttgggttacttttgctgttactttgacacctttcttggctgcttataataattaaatttaggtcaaatttcttttccttccttccttccttccttccttccttccttcctctctttcttgatggaattttcactcttgttgcccaggctggagtgcaatggcacaatctcggctcatcacaacatccgcctcccgggttcaagtgattctcctgcctcagcctcctgactagctgggattacaggcatgcgccacaacgcctggctaatttttttgtatttttagtagagacagggtttctccatgttggtcaggctgatctcgaactcccgacctcaggtgatccgccagcctcggccttccaaagtgctgggattacaggcgtgagccaccacgcccagccaatttaagccaaattccttagctcaagggcctttgtaaattgctccaacacatttttttttctcccaatcgttatggtgaaaaagaacagaatgtgaatctgaagacaggggtccagtcctgggaccatccgctttctccctacatgactttgagtatatcatctcagttctacatctatacattagagatcattatgctgcctcatgggatgcatccatctttcctgctgaactgtgagcccatggtcaacaggcagggatgaaatgcatcttgctcacactgtatcttcagtaccctgcatggggcctgacaccgggtagatgttcagcacgtatttgttgaatgaatgaatgaatgaatgaatgaatgaacagggttgtgaggactggatttggcatgatccaggtaaagcgccttgcacagtcaccaggagacacgcccatatggtagctgttgctacgcaggttactaagtggaatgactttagacacattacttctctggaaacattcacgtatctgtcctaggagaggatagaagggactcctgcctcgttttgtgcatcattaggtcgtgtgtgcagaaggagctcaataaatgcttcctcggtggataaagcatctcccaaggctccacttggggctagcgctgtctaaagagactgagttccctcattggggcctggttcttttctgctctttaccctgcggggaagatgaggccttctttgggtccctccttcattcagttccagaagcccagcagataggtgggcctataggacccgcaggatctgcaggacgctctccgagagctggagcaagagcgccaagggcggggacggaatgtgggtttaagggaaacgggcgaaagaggggtgggcatggaaaagggtggtttgagaaccaggggccaggcagaaggacagcccggcagcctgagagagcgactggggggcggtgaggagctccaagggggcgggtcggctgagctggcccagggtcagctagcggccgcggggccggggcggagaggtcgcagagcagagggcggagaatttgggggtgtggttggcctgcgggggacaccggaggccactagggaggagttgcagaggggagggaccgagggagggcctgggggcggccagaggacgcggggtcagtgaggagggggcgccgggcgacggactggcaggggcgcgcggggcgggcggaagcgcaggggtggggtgcagggcggggggagcgcgcatcggggggcggggggcggcgtcggcgctgggagtgggggagcgggttgggcggctgcgccggctctgcttcagccgctgccgctagggcgcggggggcggggggctcggcgccgcgagctcggccattgtgggagccgctcccctcggctccgccacgctcccctcgactgcgctccagcctggggcgcgcccggccgccgccgccttcgctgccgccacgggcccgtcttcttcctccttcggctcccagggtaaggcgcggggcgcggggttggatgcaggcgccctgcccgctgcgcgggatgcgcagcggcggctggggagcggtgattgatcgcccccggcggccgcgccccagctcccggcagccggcggccgcggacaggcggcttgacaggcgcgggcacagcggcagtgcgggcctcgcacctgcagcccccgcggccggcgccggggagcggcgaagactcggagctggggtttcccctctgcgggcgctgccagggtggaagggaggcgtgttccccgggaaaatgggacacggagccctgcaggggccgggcgccggaccttagggagcgggcagggctgggcggggaaggtcgcttcccggccccagggctcggccgctggccccagcgccctgtcggtcctcggtcgcgcgtccccgctctttgtcagccacgcttggcgggcgcgcggacccacccgcgccgccccaggctcgcgggcgcgcccctcctccgccgtggggaaacgggtgggggccaggtggggagggtcgcagggggtgagagcacctggtgaggtgcctgtcgccgaccggcctgcggcctagggggtgggctggggcttgggcgggcactcctgtgagtctcggggattgatggaatgacccaggtggccgagggtcgggcgggagcccggaggtcaaacaagtgtttgtgaggggccggagattgacggggtagagcccagaagggacgctttctccgggaggaggccttgggagagccggcctttgtagtgaaatgggcgtcttggagaggaatgggcggttctgggatgaagcaggtggtctgagaggaggggcatttttcctgcccccgagctgagggtagggatggaagcttggcctgagtttcccagaggttgaggctgtcacttcagcacctgccctggcactagaaggtaatgggaggaggggtaagtgctaagataaagggcaaagctgtgccaggacctgggtcctttcctttctgcttcctgtggctagatcccttctagatgttctttgggaagagggctcacacgctgctggcacaaggggtgccctggcagggaggctctgctgcccgaggctgcctacaggcctcctacaccatttttatgtttcttttgttatctctttgaattctgtgcctatggtggggatctgccaatgacccaggaggctgtctctgccccttgctgcctctaggctcagattcgagaatcctggaggagctgtggccacagacccattgtgtccagccatgtaggctacctcgctgtctctacacagccctgtgagccggtattccctataagggaaaatcaacagctcttgccctccctggaccctacagccaaagtcaaagctgggtacccaggttggctttgcggcctgtaggaaggctggtagctgaaggcacataccatttgtgctctgatggagcccttggggtggtgggccatgtgtagcagatggttctgggaagtgagcttgacctggctgagggaaggctgcccagtctggctggtggagcccagctggccttagagcaattgtattttcactcaactctctccactagctaaactgaccagaaaaaatgggctttctgtcccatccccccaccccatcctcatgctgtgccacgtattcccacaacagcccttggaataagcaaatgaacatttaatctaatgcctgctgggtgccatgcatggcatcaaccagtactacatttgcatttgacaatgttcttaaaacatcctctgaggtggaatattacccccattttgcagatgaagaaactgagtctcagagaggtgaagtgacttgcccaagatcacagcaattgtaagtggccaaaccagaatatatacccaggtctgtcttacttcaagtctggtacattttctaatatatctgctggagacagagtgggagaaaccagagaatttctgcctattctagcccatggtttgcttcttgcctgctattgagatcatgctttagctttttgaaaatacttcccatctgttgccccactttatccttatagcattcctgggaggtaagtagaacaggaatataataatagatactgtgtattgagtgcttactgggcagtgggcactattaagcactttacatgcaggattaagcactttacatgcagaacccaaccctatagggctaggttctaactgtcgtcatccccattttgtagatgagggtgctgaggctcagagagattaaatggcttctccagggtcacacagctagtaaatggagtagaatttaaacccacagcattctgtcatgggatctgtgagcttaatcctccaaatgtgccaaatagcaataataatagttcctaggaataggagctaacttttacatgatgctttaagatttatagacatcatcacatataatatcccccaaacctcatgaattagttttgggatgtattgtcttcatcccattttccaggtgaagaaactgaggtacagataggcaggactagaacctctgcttcccaagtcccagtgttccttatgggaccccttttgtctgctcacattcacccctttctccttcagatcacttctccctgggctcccaggccctcctgcagcagcccccgcctgggccatgtcttcctcagatgaagagacgctcagtgagcggtcatgtcggagtgagyggtcwtgtcggagtgagcgatcttacaggagcgagcggtcrgggagcctgtctccctgtcccccaggggacaccttgccctggaacctgccactgcatgagcagaaaaagcggaaaagccaggattcggtgctggaccctgcagagcgtgctgtggtcagagtcgctggtaagagaggtcccccagcaggctggacgctgtgggtgtgagggaggaatgggccagggcacagcagctgtgtggggagccgaggggtcctcaccagggyctctgacaaagcagccatcatctgatttgttattattattcttggaaagacgttgaaataacattaacgaaaaactcaaaagaggaaaatctgccaccccttgctcacgtgagacctgttttcatttctgcaccttcttccctgtctttgtccccattcagttatattttctatgcagttgccttcatggcttaggtaccattctgcatctgactcttttcagttaatcttatattaaaaagattttccatattgcactttagactttatggttaccatttctaaaagctgtctatttcatgactttctaaatcctactcttttttcactttttggctatattagacaatgctgctgagaacatggttaagaatgatttgacttctgttatttccttrtaatgaaatccttggagagtacagttttacttgtatcgccttccaaaagtgttctacatgctgacctttcacacgacgtgaaggctggggctacctcctgtggtgggatgtgcccagctctttgccaagcagcagcacagtgctgtagttatgagtgtaagctttggaatcagagagggtagggtgctggatcgtggccctgccactgaccaactgtgtgactctgggcaagtcccttattctttctcagtgtcactttccttgtcttaagaatgcccactgtgcagggatgccttgaaggttagatgaaataatgtgtggaaagcccttagcacagtttttggctcaataaaggagatgcttccactgaaggcatccacagctgcctccctgaagtgtgctcagcatctcagcagggtgttggtgttacagtacggataggaagatagagcagtgcctgcagctaattcagtgacatcacccgctttcaagccgtcaccaaggcctgtactgctaccttctttgtgtccctcaaataatacagccaccccctccactgtgtcatctctcacctggaccttccaatgagcatttaatagctcttcctctcttagtcttgccaccatcctccacrtgactaatagagtatttttttctaaaatacaaacctcaagaacacatattctattttatgaaatgaagtgctgcctgtacaacacttcattaaaaatacaataaaaaataaaataaaatacaaacctaattctattactcggctgcttaaaaaccacctttggcccctcattgcctgtggaatcaaggcttcagcataaagacccatcaaaattacttacctcttcagcttcacctgccaccacctctacccccaatcaccctgccacagtacactgtaactggacccccagagggatgcatcttgcaggatgaaaccaccacactttaattttcttctctgcaagatgctggtaaaccctcctcctcttttaagtgcygcctcctctgtccttaatgcccccagtggtatccaaagcttcctcctccgctctcacagtcatacttttctctcctccatgttcccttgttcaatgtagcagttaacccacagggtgcccatcactcccttagaagagtgagcaatttgggatgtgtcttatgttttgagcccccgagggctgcacggggccttgtacatgctagagatcaattggtattgaatgactgaatgaatgctgaatgagtgttttgaggatattatgtgatgtgacagactgtgatccagaaacaggcactgagctataacggaaagttagagaaaggcttatgtgggctcaggtaatcaggaaaggactttagagggaatgagctccaagtgaggagacarcagtggggcctggaaggcaggagggagagttggagctctttctagtgggcaacgaggagtccttggaggaagtccttctcaaaacctttgggcctgcagcatcagccagtaacagaattttagagctgtccctagggtgcaggaaggggtttacttgtccccagtcttgaagggccataactcagggccctgatgactcataaacctctttctcctgaagagagagtgggctgtctcattcttccttctttatgccctctgcctccatccttcatcactcatgcatacttagatcgttttgtgatgatttccacttccagtcttctctgaggaggcccacgggatgatttgcttgctgcttcagatttggagtctagaatagaagtggagtggactcaaggaggcttaattttacacaggcaaggctcctaaggaccctgctgggtcaactgagcaaagggatggtgggtgctgcgctgtgctgtgtttctggcatagatgctgatctcctttgcatcctgacactgctgaatgcctcttttgaggagggggctgggccagtgaggctgaaaatggggagactgccatggttaaaaataacttgtgcactgcagttgggcgtgtttctttagcaggagaggagagaggcagcagagacgaggcgggactgcgactttagggtcttgctgaaatcttcatgtgattttagaatgctgtgggggctccaccagagtaatggaaaaggcagccttagctctgcagggactccttcacaggaggtgcaggggggcatgtctgggagaccctggatgctctgaagctctctgaagcagaactttaattgtgggaggaaatgaagtcagtcttacgctggaagccagctgtggcctgtgcaattttctcctccccctggatcttgcttatgaagccaagtgggggtgtctgaatcactctcaccaaatagagatcttccctttccctggcccactccgtgtcctgagctggtcttagggcctcgcccttgcttgagaggcctgatggggcaagcctggtggtcacacatgtcagagtagagagggatgtcggggctgagaaacctgctgatttcagtctacaaagccaaacaggttttagggtgctgaaccttgttcttcttcccatcttcctgttctcatcctttccctacatttgtttctccttcttctttgccagccatattctcaactccctaagcccagccacattcaaatgtaacaagagtcactaatgaaagtgtcttgtttcggtttatcagctttatggtttacacagagatttcaaaataactctgttaggcaggacatatgttagcatccgaggctcagagggtttaggggacttgcctatagttacacaggactggtaaacacagatcttctaactccaagtacattgctatttctttttttttttgagacagagtctcactttgccacccaggctggagtgcagtggcgcaatctcaactcactgcaaccttcacctcccgggttcaagcaattcttctgcctcagcctcccgagtagcagggattacaggcgtgtgccaccatgcccagctaatttttgtatgtttagtagagatggggtttctttttttttttggagatggagtctcgctgtcgcccaggctggagtgcagtggtgcaatctctgctggatctcagctcactgcaggctccgccccctggtttcacgccattctcctgcctcagcctcctgagcagctgggactacaggcgcctgccaccttgcccggctaattttttgtatttttagtagagacggggtttcaccatgttagccaggatggtctccatctcctgacctcgtgatccgcccgcctcagcctcccaaagtcctgggattatagrtgtgagccaccgcgcctggcccgagatggggtttcaccatgttggtcaggctggtcttgaactcctgacctcaggtgatccgcttgccttggcctyccaaaatgctgggattacaggcgtgagccaccgcacccggccctgtacattgttatttctatttccttaggcaatacctggcaaccagcccagtctgaatcttctgtagttgacaatctaaatctccacactcacctgagagacttggtcacttccgggaaaggcctcaggatcctggtctatagaaccaggaaaggggagagacaaagatcttggaaaatttgcctcttcccctctggctctctgtctttagtgaagagcagtagaaatatccttacttaatggtggggagcaacaaggaagtggggcgctagggagcttactgtagcaaggagtacaaccccaaagggtagaaacaaagagaggaagaaatgatgtatcccttgggacctgtggggagtatattgagaacagggtgcaagacagggtgtcacatggctgtacactgcacaacccttgggggtgcgattcacatcacatttgttgtcattgcagacgtgtacatttattattacaagtttcctgcagatggcagtaacatgttttgaagaagggctcatgtttgggctagggcacggtagggtgcaggaagattccaccatctacccatcaatcaggtattcattcatctaacatcacataatcaggaccctccctgtccttggcattgatattcaaagatgactgaagatgtggtcccttctgcatggaactcagtctagtggagaggayagaagggagaaaaggccgggtgtagtggctcacacctgtaatctcagcatttcgggaggccgaggcaggagaatcattagagctaaggagttcaagaccagcctatgagaccctgtctctattttttttttaagtagttagaagggaaaaaataattatatccccgtatgtgttgtgaaaaaggggagtgcagtgactcagagctaaggattggatccctctctggttgttcatttattcattccttcaactaaaaaaggggttaagctatgtgccagtagaaagcatctatgggattcattcctaggagtatcagcaaatgctgctgaaataatcattcccaacatctgctccattgtggccttctagtcagacgacaattgtctctctgcacagcccttgtttcagttggctttatattcacgttcattgttcccaggttcatttccctcaccagctctggaggtctctgtagtcaggagtcccatcttaccctttttgccctgggacagagagccatgagagcactacctggtcagaagctggagcttactcctctgggcccatgtgtctctcctccaagttgggagctctgagaagacatctcacaggcacctctctgcttcattcattcattcaataaaaaaaatggattaagctcctgccatgtgccaggcactgcggagataactgaatctggagttacaagacttaggcaaatgacctcacttcttggatcctcagtttccttatctataaaagggagatggtgataaagggtgtaaaagggaaatgaacgagaatcagaatgtgctggaaaaacacaggttcacatggcccgttactgcacttaacagtgtcattccttgtaacctccctggcagccagatgaggcagtggagactcaggaggccagcagtttcccaggccagcaaagaaggagcccaagcctcttatttctgtccccttcttttgttctttaggcctttgtcagggagcagatggaagtggcttattctggccaagccgtgagtgggaagaagggaatgcagggatgggaaatggaaccctaaagacaatctcattgggaatccttactcctcagctgccaaacttccttgccctgaggctcttcgagttttgtatccaggaaggctcctcctccttcccagcttctctacttcttcctggcagtgtcctcagagtctctggccctgtcctggagcttggtttcagtagcagcagagaagagcagaggagagtgccctgaaagtggggcagaatgaattgtagctacacaccaccagctcagctccagctctttgaaagtaaatctgggtcacattagctgtgggctggaacatgaccacgtgggcagaattctgtgcaggcagcagaaaagacagccaatctgtcctttctctgaggtgcagggcccctgtgggaccccagttggtgagggaaggtggtttctggattgcaaggtgtaatgccatcttaatgccatcatgcttttctaatgacatcctaggtgacatagagaaaggtatggaatggcagtttggctcatgcctttctgtttgttatgggagaagcctaggctgaaggtaggaatgcagaggaaggactggttactttggggactgtggaaggccatcatttctcagtctcatgggctcaggggttagatgccaccagagtagctgacactgcagcaggatctagggctgcacttgttctttatttcagcagtcctccccttgaggaaaggtctgtgaacagatccatcatcactaaagtgttatatggagcctggctggcctcctttttctggttgctgtggctagggcctgccatgatttggcccggccactgcttgttgccacatgtcagttacaagcctgccagcctctttctctgtcttggctttcctgtaggagcagaataggtgtcccttgctggaatctctgcctggatctgggatactgctacagggaaggtctgaagcccctataacttgaagggtgatgattatgagctgaagcttctgtcttaagctgtgccccacccctaccccagaagataycaggcttttgccttgtggtcaggggaggattctgcctggggcctcagtggatgtctctgggatgccctcccccactcattcacacatttcttcatgtgctcactcttccattcattcacgcaaagggctggctttgggagtcagctggagccctagtttcattgctcacttgctaattgggtgaccctgggacgttagtcacttcattgagcctcagtttcttacagttaaaatgggggagcaagagcactacctcagagacttgcacagtagattaaataaggtagttgggagtaggatgcttggcccagtacctgctatatattcagcccttgataattttttttttgagacagagtctcgctctgtcaccaggctggagtgcagtggcacgatctcggcttactgcagcctccacctcccaaattcaagcgattctcctgcctcagcctctggagtagctgggactacaggtgtgcgccaccatgcccagctgatttttgtatttttagtagagacccatggtgggtttcaccttgttggccaggatggtctcaatctcttgacctcgtgatccacctgctttggcctcccaaagtgctgggattacagccactgcacccggctgcccttgatacatattagctcttttcatgaatatcattcattcactcatacacttgttcatagattcatgaatgtgctgatttatccccttgcttattcactgattacacacttgcttatttaacaaatatccctagggctactttgctctaggctcagactgcacttcagagcccagctcctgcctatgaagaccgttagaatgcagcatgaactgagctacrttgcaagtccaaagagttttgaggaagttctggaagggaaggcacttctactcctgcccctccctggcttagagcaatgatagyatttcttctggggctgggaaaagaaataggaattagccaggacaacctgaagagacagggcacttcccggtggtttgcatctattcttgctctcctttctttggctttcgtaggaaggaaagaaggaaaatgaagagagaacagctggtgagaattaggaactaaagaatctagacggtggtttggggagtgaactctggactcagtttaggagcaccttagagctggtgccagctgggttcctccggtgaataatagctggtaaagtcactgtgtagagtcctagatgggtgccaggcattttacatacatcatttaatcctcatagaaccctgggaagtagttgctattctcaacagaaatgttaagtaacttgtctgaggttatacactgagcaaataatggagctgggattcagcattacttaatgtgcatggcgccccctggccctcaacatgtacaatatgccctttgcagttattcaagtgctgagtttctggtcagcctaactccaaagccctggcacttttcaggatatttcaaacatagtaaagtagtgagaatagtacagtgaacccccatcacccagaaacaagaatgatcaattaattcatggccaattttatttcattcatacaccgctgtcagtggaaaaaacacagttcctgttttttcttttttcttttctttcttttttttttgagatggagtctctctctgttgcccaggctagagtgctgtggtgccatctcagctcactgcaacctccgcctcccgggttcaagcaattctctgcctcagccccccgagtaactgggattacaggtgcctgacaccatgcccagctaatttttttgtattttttagtagagacggggtttcaccatcttggccaggctggccttgaactcctgacctcatgatccacccgcctgggcctccgaaagtgctgggattacaggtgtgagccaccgcgcctggcaagttcctgtttttccattctcttactcaacaatcaacacaagaagacttytgtgacgccaagatatgtggggacttctccccgccagcaagttaaacaatagttctgcagtggacaccagcggggtgtcctccagttcaattacaacactgtctacctggaaatagcatcagatctcacagtttgagggttcagtccccaagacattcccctactccacttctttttttttttttttttttttttttttgagatgatgtcttgctcttgttgcccaggctggagtgcaatggctcaatctctgctcattgcaaccaccgcctcctgggttcaagggattctcctgcctcagccttctgagtagctggaataacatgtgcgcgccaccacgcctggctaattttttttttttttttttttttgagacggagtcttgccctgtcaccaggctggagtgcagtggtgcgatctcggctcactgcaacttctgcctgccgggttcaagtgattctcctgcttcagcctcccgagtagctgggactacasgcacacgccatcacacccagctaatttttgtatttttagtagacacggggtttcatcatgttggccaggatggtcttaatctcttgaccttgtgatctgcccaccttggcctcccaaagtgctgggattacaggtgtgagccatcacgcccggccaagggattcttttcttttttttgagacggagtcttgcrcttttgcctaggctggagtgcagtggtgtgaacttggctcactgcaacctctgcctcccgggttctcctgtctcagcctcctgagtagctgggattacaggcgtgcgccaccacacctggctaatttttgtatttgtagtagaaatggggtttcaccgcgttggccaggctggtctcgaactcctgacctcaggtgatccaccgcctcggcctcccaaagtgctgggattacaggcgtgagccacggtgcccagccccaccccactccacttctaatgccaatcacaagactcagattttttttacctgtgcttctgactgactggctataatggggtgctggctgggtgcagtgactcatacctgtaatcccagcattttgagaggccaaggtgggaggctcgcttgaagccaggagttcgagaccagcctggataatatagtgagaccccgtctccacaaaaaataaagcaaaattagccaggcaggagaatcgcttgaacgcgggaggtggaggttgtggtgaactgagctcacgccattgcacttcagcctgggcaacaagagtgaaattttgtctccaaaaaaaaaaaaagaaaagaaaaaagaaagaaatcgggccgcgcatggtggctcacgcctgtaatcccagcactttgggaggcccaggcgggcagatcacctgaggtcaggagttcgataccagcctcaacacggagaaaccctgtctctactaaaaatacaaaattagccgggcgtggtggtgcatgcctgtaatcccagctactcgggaggctgaggcaggagaattgcttgaacctgggaggcggaagttgcggtgagctgagatcgcgccattgcactccagtctgggcaaccagagcgaaactctgtctcaaaaaaaaaaaagaaaaaaagaaattagccaggcgtggtggtatgcgcctgtaataccagctactcaggatgctgaggtgggaggattgcttgagcccgggaggtcaaggctgcagggagctgagattgtgtactgcactctaccctgggctacagagtgagaccggatctcaaaacaaacaaaacaaaaaccacaaaacacacagaggatacaggtgaagagatgcagagggcaagggcgaggtatggaagaaggaatgtggtgcttccatgccctcccttgtatgccacccttcaggaatcttcacgagttgttatcctggaagctccctgaatcttaggcctttcatggagacttccttgggtaggcatgattgacaaccatgcagamatgtgattgggcaaaaagggtatgtctaacactaacagtgtggaaacccagcaaagcctggctgttcagattctgcttgaattttctatgtagtattccttcccccagggtatggggcaagactcctgaaataggggtctcatgattatagtcagaaatgtgggggaaggcggctgggtgcggtggctcacgcctgtaatcccagcactttgggaggccgaggcgggcggatcatgaggtcaacagatcgagaccatcctggccaacatggtgaaaccctgtctctattaaaaatacaaaaaaattagctaggcatggtggtgcgcgcctgtagtcccagctactcagtaggctgaggcaggagaatcatttgaacccaggaggaggaggttgcagtgagctgagatcgcgccactgcactccagcctggtgacagagtgagactctgtctcaaaaaaaaaaaaaaaaaaaaaaagaaatgttggggaaggctgagagtggtggctcacacatataatcccagcactttgggaggccgaggaaggtggatcacttgacaccagaagttcaagaccagcctgagcaacatagtgagaccaccatctccacaaaaaaaaaaattaggtgtggtggtgcatgcctgtagtcctagctacttgggggctgagaaaggaggatcccttgagcccaggaggtcatggctgcagtgagctatgattgtaccactacactccagcgtaggcaacagagtgagatggctgtctcaaaaaaaaaaatggctgggtgcaatggctcatgcctgtaatcccaacactttgggaggccaaggcaggagaatcacttgagtctgggatatcaagacctgcctgggcaacatagtgagaccttgtctctagagaaaatcaaaaaataatccaggcgtagtggcacatacctgtggacccaaccactcaggaggctgaggtgggaggatcatttgagccagggagatggaggctgcagtgacccatgatcgcaccactgcagctgtgatcatcatcatccagcctgggtgacacartgagaccctgtctcaaaaaaaaaaaaaaaaaattgcaggaaagattgagtcttgctttgggaggaaaaagaaacaggtgaaaggagggcaggagggcagaaagattctgttttctaagacttgacttgcttctgaggtctacagtgcctcaacattatagcagaaaactatgacaagggctatagaagttatgagccaggaactgtgaacgaaaaaacccatatattgcaaccccacttctccctccccagttatgtataagaaagttccggtagctgggtgcagtggctcatgcctgtaatcctagctactcggagggctgaggcaggagaatcacttgaaccgggaggcagaggtcgtagtgagtcgagactgcgccactgcactccagccttggtgacagagcaagactctatctcaaaaaaaaaaaaaaaaatcagaaagttcccgtaatcacatacttctaccttcctccgtttttgtttttgagacagagttttgctctgttgcccaggctgcagtgcagtggcacaattgtagctcactgcaacttcaaactcctttacttccctcactttttaaccattatattatactacctttcctctagtagtaaatataccagtttatctgcttcagagtccatgtctgaggactggaaccactgccacctgacctactgcccagagtcttcatgagggattcctttttttttttttttttttgagacggactcttgctctgtcacccacgctggagtgcagtggtgtgatctcggctcactgcaayctctgcctcccaggttcaagtaattctcctgccytggcctcctgagtagctgggattacaggtgcccaccaccacgcccggctaatttttgtatttttagtagagacggagtttcaccatgttggccaggctggtcttgaactcctgacctcaggtgatccacccgcctcagcttcccaaagtgctgggattacaggtgtgagccaccgcgcctggcctcttcatgagggattctaacacccagatgttcaggctccaggggcagtgtgtccctcctagcgttgcttggctgatcctctggtccttccagcttgaggttcaggctctatccccagaacacacagagctaggctagagcatatctggttctgttctgccagtataattaaactaaatatccaaaaaatgaatttcaaggattcaatcttgacagactgaagtcgagttgcaataggattcaggtccttaacatcatggcgggaggatagcacagtggctcatgtctctaaccccagaactttaggaggccaaggtgggtggatcacttgagctcaggggttcaacatcggcctgggttacatggcgaaaccccatctctacaaaaaatacaaaaattagctgggcatggtggtgtacacctgtagtacaagctatctgggggactgaggctagaggatcacttgagcctgggaggttgaggcagcagtgagccatgttcatgccactgtactgtagcctgggtgacaaagtgaaaccctgtctcaaaaaaaaaraaawtcatcaagggaatgagttccatttttgttataggggcctgtgccccaggactgccctgatgctggtgaactgcttcacgtgactctgatctcaactgagagcattggccaccactctcaagggcctctcccggcctcagtgatttgtgctctttccaggctgcctgttagtgcccctttagaggtttctaccttgagatggtgttggatggggagctgtggcttcaagtgaagagaagtttcatagattaaaaaaagccacacctcacagtttggggaacctcccaattccccaaagagtatagactgcctcagaggatccacacagggtaagaccctgtcctgcctcagagcaggaagagagattgggtatggttcagcagggctcacattagcctgattccttcaagagtgaagataaaaacagttttactgacaaagaagctgggagacagcagaggggccaataccttttataactactattgttaggttctgaatgccagccttggcgctcagcatcttacatgctgtatttgacctaatcctcaaaacaactttaggaggcagatgtgctacagcagaggaagcagaagcccagagagtttggtaacttgctcaaggtctcccagccagtaaggggccaagcttggaatggtgctagctctgcctagggcaacccactgcctcccccattacaaggaacagtagtttaataacagctaacatctgtgtagcacttcaaggttcacggagtgccttaacatccattatctctactgtgccttgggaagccggtgcggtgaggccttccacgcccctttgggatagctgcctgtcaggggtccagcctctgctcatttcttccaggaagcactggagattatttggagttggctctgacgagccacgggagaggcctagggagaggctgaggtggagcgacttggccagttgctatggtaacccagatggctgagtaaccattttgagggttgctatggtgatgggctgctggtggcagggatcttgtcttcctgggtggctggcaccctccaggcctcttaaattgagatgttgcactttctgaacagaagagggcagcatgagagcaggcaaaggcttcttaccccagagcggatttgggaacttgaggcaaagcttagaaaaggtttctaggagctgggcagaaagggagctttggctggtgcccaagaggctggtggagcttcacttctgagactagaactaggtaattttcttccaagagctggtcaaaggataatgcttggggctgccccttcagtgcctggcatcagctactattggggaatataaaagttacagcagacagctacccttgcaaggaggaatggagagaatatgtgcatgtgtgcacacacacacactcactactagcaaagaatttcttttttttgagatggagttttgctcttgttgcccaggttggaatgcaatggcaygatctaggctcactgcaacctctgcctcctgggttcaagcgattctcctgcctcagcctcccaagtagctgggattacaggtgaccaccatcacgcccggctaattttttgtatttttagtagagacgcggtttcaccatattggtcaggctggcctcgaactcctgacctcaggtgatctgcccgccctggcctcccaaagtgctgggattacaggcatgagccacygcacctggcctaagaatttctttataaagcatcagttaacacataaaataatgcagcatgaaccaaaggtgaagaaaagctgggaataaactttctagaggttgaggaaggagcactagcagaaagagaaataattttgtacttccctctttcctccctacacatgaagtgccctcagcccttgaccactgagtggacattgagttggattctcaattgtcttgaatcagatctggctccctcccccaacccccataacagttcaatgaggcatccattccttcagcaaatatttattgaacatctactatgtgcaaagtattgtgttaggcccagtgatgaagaaagatgaaatagatgtctttgccctcaggaacctatgaagtaggaggttaaggaggcagtgatacagacatccacagtacatgtacctggagttcaagaccaacatagtgagaccctgtctctataaaaaatttttttaaaaagctgggcacggaggttcacacctgtaatctcagcactttgggaggctgaggcaggccgactacttgagcccaagagttcgagaccagcctggacagtatggtgaaatcctgtctctacaaatagcacaaaaattatctgggcgtggtggcacctgcctgtagtcctagctgctggtgggttaattggtgggcgcactgaggcaggaggattgcttgagcctaagaggcagaggtgtcagtgagccaagattgtgccaccgcactccagcctgggtgatagagtaagacgctgcctctaartaaataaatagaaaaaaaatttcacgtcatttggggtgaactttcaaggtagatttcagtaggtggagttgggggatgggacattctaggcaaagcctcagagtctgattatagggaaaggaggtacacacaagggtgtcattggagatcagcctgaaaaggaagctagatgtctaaatatggaagacttggaattccaggcttagataagggatgctgtgagacaaacatactctctccttaaatactctagccttccagctagtcagtagtcacagacagccaagtattttaggatcatctggttcactcattcatgcatttaatcaaaaatttaggccgggtgcggtggctcatgcctgtaatcccagaactttgggaggctgaggcgggcagattacctgaggtcaggagtttgagactagcctggccaacaaggtgaaaccccatctctacgaaaaatacaaaaattagccgggggtggtggcaggcgcctgtaatcccagctactcgagaggctgaggcaggagaatggcttgaactcaggaggtggaggttgcagtgagcccagactgcgccattgcactctagcctgggtgacagagtgagactccgttgcaaataaataaataaattaaattaaattaaataaagtaaacaaatatacaaaygcrcgcgcgcgtgtgtgtgtgtgtgtatgtatatttttagagaccaaattttgccatgttacccaggctggtcttgaactcctgggctcaagcgatcctcctgcctcggcctcccaaattgttggaattacaggtgtgagccaccatgcatagcattaaagaaatagttggccaggtgcggtggctcacgcctgtaatcccagcactttgggaagccgaggtggatggattacctgaggtcaggacttcaagactagcctggccaacaaggtgaaaccccatctctactaaaaatacaaaaattagctgggcatggtggcaggcgcctgtaatcccagctacttgagaggctgaggcaggagaatcacttgaacccaggaggtggaggttgcagtgagccgagatcacaccattgcactccagcctgggtgacagagccagactctgtctcaaaaaaaaaaaaaaatatgtatatatatatatatgtgtgtgtatatgtatatttttagagaccgaattttgccatgttgcccaggctggtcgtgaactcctgggctcaagcaatcctctggcctcggcctcccaaagtgttgggattacaggtgtgagccactatgcatagcattaaagaaatagttggctgggtgcggtggctcactcctgtaatcccagcactttgggaggccaaggtgggtggttcacgaggtcaggagatggagaccatcctggctaacacagtgaaaccctttctctactaaaaataaaaaaaattagctgggcatggtggcgggcgcctgtagtcccacctactcgggaggctgaggcaggagaatggcgtgaacccgggaggtggaggttgcagtgagccgagatcacgccactgcactccagcctgggtggtgacagagcgagactccatctcaaaaaagaaaggaaagaaagaaagggagggagggagggaaagaaagaaaagagagagagaaagaaagaggctgggcgcggtggctcgcgcctgtaatcccagcactttggaaggccgatgcgggcggatcacgaggtcaggagatcgagaccatcctggctaacacagtgaaaccccgtctctactaaaaatacaaaaaattagccgggcgaggtggcgggcgcctgtagtcccagctactcgggaggctgaggcaggagaatggcgtgaaccccggggggcggagcctgcagtaagccgagatcgcgccactgcactccagcctgggcgacagcragactccgtcaaaaaaaaagaagaaaaagaaagagagagagagagagagagagaaagagagagagaaagaaaagaaaagaaagacgaaatagttaatgagtgccctatatgtgccagatcakttgctaggtgctaaggatcctgtggtgaattagacgacaaacagtctcagccctcagggagcttacgatttagtaaggatgagagacactgtaccataacttcaagtgtgatgagtattaccaaagggtagaggaggacctattaattggaggggggsggggtcaaggaaggctttcccctggggagtttcagcagaagcatgggtaggagtgagccaggccaaaggagagtgatgaagggttataatctgggaggaaagtcggttggatggccctgaggcgagataacacattrgaggcgctgaaagaaatagaaagtggcagggctttagggataggggtatttgatgaggctttaattgggaggacaccaaggataaagggcattaatttccttgtattactcttctcttccactagatgcccttccgagtacatccttctgcttcccccattgcagccttcttagaaatgcagcagcagtctcacccatcaggagcaaaagaaaatcaaagaccaaaaggagaaagcctcagagcttttgcgactgtgtggtctggctataaatttagactgttgcttgaaagaagcgaaaaacctccccttcatagacttccttcttcccatcccccctggcagccgctttgttcctctagccttgtaaaattttctctgtataaaacaggaacatcagccaaacatgtggacttccccactttccattcattagaagaatgcattatttcaaaatctcctgggagcatttaaatgcaaattttgtcaagaaagcaatttgagtcttagagaagcyctctagccacaacctaaagcagaagtttcttctttgatttgtgtgtttcttaaaaggaatctcaaccccttgccttctccctgcaacgcccccaggtcttctctgattctcacagcggactcttcccctttttgcccctgttctttcttcacctttggcaagcatcagtcacacatcttgaggaacctgctcacaaagtggcgcgtgtagcagccccaggtgggaatggagggacttttctatgtagtgtaatggacataaggaggcagatgtctgtgtgggggtgagatgtctgtgtggaggtgtttgtatgcgtgatttctgtctgggccttcttaggcctgctggtataaaataatatgggaaatgcagatgactcagcactgacacagtcaagatccccagagttagcatttctatattctctgctgtttacgaaaaatgtgcttgtgccatcaatcagcaactcatcctgcattttccgctaaaagccttttactgaaaaatgcatatacttcaaacttattccccttctttttgtaaactgagctcattagcagctgacaccaaactgagaactagttttgtttgtttgtttgttttagcacggaggattaaactggaaggaaatgagcatttgtctaaggatcctccctgtcctctttcaggcccttccctgcatgatcttcatgcccacaacttgggcaggccagcaaaacttgatgggaaaagatatgattaatgacttgctcacctgatttctgatcagggtgtggtgtggaaacaaccagcatgcacctattagygaaaagcgtcatttgttttacttgttaccaatgtgctgagcattgaccaaaatacttggcactactcacaaggtacaaagacaccttccctagcctggggttaagaagtttctccttcaaactcttgagaatgggaactggaatggaagcccaagtcccaattttggttgctcagtgttgcatgaattctttttttacttgctaatgtgcccttattgtgagatcagccagtgtaacttcttacccacaaccacctctccagacctcctgaaaaatcaagctaacaggggaggataactgctaaatggggggtggcgggcacaacgtgtcacctacattgaccagagttcttcattcactgctcatggctccagcgcactccatgaatattgggattgaatgatacacaaccgaatgttggatcaaatgatgttgggagctctgtcctcaaaatggcccctaataaatccctacccatattttccagtttcctttctttactctttcctttcccctgatgacaaagaataattggcttccccttttcttccctgaccagctatgctccagagtcctttctttgttccctaacagtcctggttccgtctcaggttcccacatttctcccttttgatctctgtctctctgttcagatggctgtcacagtttaataattctggagggtctatcccctacagatttatgtctccctgtctctcctcttattcaccccatggtgcattcagaatcccgttttcgtgcctccctgggttgtcatttctcaggctctggctccttggcctggtttacttcatggtgctggatctgccccgtcacttcttgttcagcttcttctgtttctggaaaaccctttgttcccgggcttctttgtgggctcagtgtcctccggccctacactgcagccctgtctggatcttgcccttgtcctcgttctgaccgcgtctagccctgggatctgaggcatcgtggtcttttgccctctgctttcccttcagtttctccaggtccttctccagcagccgcacaggccccgctgggtttctctccagccagggagaaaccctcctttgtcccgctcccggcggcgtaggtcagcgctgactggggctcccgctcgccctgtggagccggcccgggtctccctgccgttcggccggcccagcctttcatcctgacgcgcggggcctcccacccagcgggactcccgcgtgggccggcctctcgcgcccctcggctcgggccccagtccgggccgggcgggggtcggcagcccctgggggacccgtgtgggcagcccgggcccagccggccgcagcctggggccgaggactcgccgggacccgraggcggcggggagagggggcggggaacgggccgggcctggcgctcctgacaggaggagccgccgccgccgcccgccgctgcagccgcgccggggcgggctgagggaggagcggagccgaggggtgaggacgcggaaacgcgagccgggaccggcggagcgcgagcgggccgggtgcgagcggactgaggagcggagcgcgactgccgggccgggcgaggcgggcggacggcggagagcgagggcgccgtcgccgtctctgagacgcacaaagggtcgaggctggggccgccgccgcctcagcgcgcgggcctggaaccggcagcccccggggctcggcgagaaggcggtgcgggcggccatggccggctacgtgccgggtcagcagccggccaaccgcagccaggagaaggagttcgtgcaggcgtacgaggatgtgctggagcggtacaaaggtagggccggggactggccggcgctgaggcccgcgggccggcgcagcgtggccttcggagccggtcggctcggcggctgcaggtggggcggccgggcggggtcgcacccaccgcgcggggcttggccctgagctgctgcttctcggggccagtttatttacagagttgagataagccttcggaaaccgcccccggggcagtcggcgcgctcagagcgccagttacatgatttgccctrttatccggccccagctggaagaaggcgagacaaggcgctggcctggagaccggccgccgtggggagttgctggggaggaggaggaggaggagttgggcgcgggagaaaccacccgctctgctctgggtgcgagcttcctcccagaggggctcggacctctgtgtgcccgcggagagtccctccctcgcccccttttgtctctytgagtctcggatgagtcgcgtggaagccgaggttggaaagcaccttggtgtcttcggggtggggtgggcagcggtgtgggtgagtgtgcagtttttggtggcgagaccttaccccctccatctccccgggggtctgggcctgctggaggtaggggtctgtttttttcctcccacataaagatttgccttggagctcggatttcagccctgaaggctctcttgcgagacacttctgcaagttaatgcctaatctgcgccttgggtgtatggggagaaagttttgacagacaagagggcctgtggactgcatttccctaactgctgtaggtgcccctgaatggaagccagggatgcgtggccttgggaggcccttgccttgatctttaacatccggttctgggagtttgctttggctggcagttatgctttccacagacggggagattttcccagaaacgacacaggcagcacttttccccattttattcagctcgggcccttgtgactaggcccttagtttctttttatctgaaggagaggaaacttcagcccctatgactgagtccagcgtacttgtttacagcacctatccagtgaagggaaactaatgaagaagctgtaaaacgccccccctctcccccctcccccccactttttttttcttgtggcattggaactctgcttgggaatgcagcaggaaaaaagtagagatgaaatgcgaaaaaagacctactagggtttttgcttgttccctctgcatcagctcctgtaaactgtccagcttttcctgcctgcagcaagttttctgtcaaccccctgtggtctttctttttaagaaatgtggttcatttcagagcacaaagaggttagattgtgctgctgaacttcattgaaaaaatgctgctcagtgaatggttgcattaagtttcctttgcaggcttttgagtaacactgctctcttcagagagaggagatacattaggaccgtcccgggctgtgacagcttcaaaccagcagaattaagacccaaaataggtgaagaaatctcagcacctcactggatggtagtactggtgacctccagcggaaaggaagttggactcctagcaaatgaggctgggaaagaagggggcagtagggcttgttccaggagagacctcttttgttcagttttttttttttagctgtctcactcagtttggctttcctctgaagggccttgatcaggtgtataggaacttaatccttcccagacacaggtctctttcttgaggggaggaatgagttaaaaatggttgcccaaagtaaattacctcgagttgtatacggtggtcgtgcagtctgctcttctgatcggtgcagaacaatctctcttccccccactgcaccgttctcactgggaggtcagagtggcttagcatccgggcctttgttactttgcttatggaattcctgcattttccagacttagaaatccccgtactaccttaataggagaacagtttgtctaagcagaggagtgagctggaatctatagagtgaccaggggaaggagtttgtgaggatcatgccacgtattggttttggaaagagatgggaaaatagatattgatgatggtggggtgttctagacccttattggctggtcaccacattacttggatctctctctgctgctattaatttgtagtcacctcattatacaggctgaagcaggatttttatatgcagaaggagagctaaaattttcagctgcctaaactgcccctagggccaatgggagaagggcagtaatgtatttggagtgtgagggaagcagagctgtgtgtagtgcagctgtattaggaatggtagtcaagtatgggttttccagaactgtgcttggcaaccatttttttttttttttctgtgtggtggcagtgagcatggtcttggcaggattagatgattcagcatggaaataaatgctctcccttatttcctaaatgtcccaaaggttctttcagatagctggccagtaaacaggaggcattagataataacactggattctaacagttcagagtgggcagcagccaagagaaccagggtatatccttcatttccccaattctctgacagtcattaaagtctctcttggaggtgccacaatgttagatgccagaattctgaatgagatctggttcctgcccttggttattccatctagtaagggaaagatacttgcaaacaagtagttgtcatactgtgataagtgctagaacagagatagtatggaagccagaggaaggctgaaaccctatttggatttacctgggagatttgacaaaggaggtgacatgagagggttttttttttttttttttttttgagacggagtctcactctgctgcccaggctggagtgcagtggcacgatctccactcactgcaagctctgcctcgcggttcacgccggaggaaattaagaaggaatagtcagggaggtaggagaaccaggattttattcctctcctaggatagagaccaactctactgaagaagcaggtcacatatgagcatagttttaggttttaaagaggtggttaaaaaccagcacacttggttgatggtggttggttaagacagaattagacttttgttttcacaaagctttaaggactaaatagtctttacttgctgggctgggctaggaataaaagagaacattcacatttcaacattggtaacatctatctggtacttatgaaattcagaattgtcactaagtgttgtgggttatacgaagctagttaggaccaattttcatttatcctagtgcagaaaataacttataaaacttactgcacagagggttacaagtgaagagtctgcatattacttaatgtacaaaattgatatcgtagaaagactatgctttggatttcttctgttgtgggctccagtcctagtttttgccagttaatttctactgtgtgaccttggaaaagatttctctcatcttttgggtttctcatctgttaaaatagggatgataatactaatttcttgggattcatgagaatataaatgagctctgggcatatatttgtcctttaatgttccattttattttactttactttattttgaggtggaatcttgctctgttgctcaggctgggatgcagtggcacgatctcacctcactgcaacctctgcctcccaggttcaagcaattctcctgcctcagcctcctgaatagctgggattacaggtgcacgccaccatgcctggctaattttttctatatttttttttagtagagatggggtttcaccatgttggccaggctggtcttgaactcctgaccttgtggtctgcctgcctcagcctcccaaagtgctgggattacaggcgtgagccattgcacctggcctattttattttttaactcttttctctccttttttttttttctatctcctaccagaaggaacctttaatgtttagaaaaacgttgatttatatcttatttaagctttataatatcctgaaggatagtattacacagatgaataaatttaggcacagagacttaaaattactgtctaagagccaggctccagatttctgggtgaaggtttcacattgtatcacagaagggagttttaaaatcacagtagatgacttgggctaagtgagaaattgtgaaaatgctttaattgttagtatcattattgttgttagttttagtttctgaagtatagtcacacactttaagtgacatacatttccagatctctgaactgtggagaatttcttttccccttattatgggagaagttttacgatatataaatcacattgaaattttcatacaaaaataatacaaaataaaataaaatacaaaaaatacaagaaataaatacaaaaataatttttaaaatagtacaaaatgatgaaattttgttaacacagtgattggaaaatatgggttgaggatttgggattgtttacctaagtgacgctctgaagcaaccttttggttatatgtagattcagcttatttatcctttttagtggatgttgttcttttttttttttttttttttttgagacagggtcttgctttgttgcccaggctagagtgcagtgtggtgagatcagggctcactgcagccttcacctctcaggctcaagtgatcttcctacctcagcctcccaagtagctgggactaacaggcatgtgccaccatgcctggctaatttttaagtattttgaagagaaaaggtctcactatgttgcccaggctggtctcaaccccctggcctcaagtgatcatcctgccttggcctcacaaactgctgagattacaggcttgagccaccgtgcctggcctacactcagtttttaagttcctttttagatcaaagtcctagagttggagtggatagtttttagccagaacaaaagagtaagtgctacttctggacatgaacactgttaattcagaaagtgagtcaagtcagtctgctgggaaatcacaagttttggccacattcatgctgttgaaataataaaatgtgtccatgtgctaacagtgcttatgggagctactgccttgtcttgggcttgttggcaaatgacgtaatacaaaccagggaaatgcaccagcgtaagcctattatactggtatttttcagtgccaattccaggtttaagagatcatggtggaaagaatacttcagagtgcatatctgagaacagaaacatcccaagatcaaaagtcacaaatgaacaattatagattgtaaggagtctgttgtgttttctcagtgttcttgaaaacacccagtctttactcctttttctaagtaaggttggccctttcagcttctgataattatatattgagccatgttgtgactaggttgtatggaatgctagagctcctgtttttactctcatggttttgattggagttgaagcctctctcgtctggcttctattggtggcatttactaattttctggcctggtaaatggcttgtggtagctaagaatgtttattccagttttttggagacagggtcacccatgtcagagtgcagttgataccattgtgtagctcactctaacctcaaacccccgggctcacatgatcctcccatctcagcctccggagtagctaggattaaaggtgcatgccaccatgcccagctaattattttatttatttatttatttatttatttatttttggagacggagtctcactctgtcacccaggctggagtgcagtggtgcgaactcggctcactgcaagctccgcctcccaggttcatgccattctcctgtctcagcctcccgagtagctgggactacaggcgcccaccacacacccggctaattttttgtatttttagtagagagggggtttcaccgtgttagccaggatggtctcgatcttctgacctcgtgatctgcccgcctcrgcctcccaaagtgctgggattacaggcgtgagccaccgcacctggcaattattttattttttttatagagatgggatcttgcaatgttttctaggctagtctcgaactagcttcaagccatcctcttgccctggcctcccaaaacgctgggatttcaggtgtgtatcttctgaaagtacagtttgttacttctgatgaaatatttttttcttccagagcttctcagtttctgaagtaaattagaattaatctctgattctttgtctctttcagggcttttcataatttgacttactctgcacacccaactataccatctgttactgcctaacacatctctcttctccatttggactggtcttagcaaccttagcaacccttccccctgtgtcctgtgcctttgtttacattctcttttccaggaatgccctctcccttcctgattattcaaatctttttttttttttttttgaaacagagtctcgctctgttgcccaggctggagtgcagtggcatgatctcagctcactgcaacctccaccccctgggttcaagtgattctcctgcctcagcctcctgagtagctgggattacagatacatgccaccacgcccagctaatttttgtattttttaatagagacggtttcaccatattggccaggctggtctcaaactcctgactttgtgatctgccctcctcgacctctcaaagtgctgggattacaggcatgagccactgtgcctggccacagtaaaatctttaaaagatttttattaaagaagtaagatgtaatcccagcattttgggaggccaaggcgggcagatcacttgaggccaggagttcgagaccagtcaacacggtgaaaccctgtctctactaaaaatacaaaaattagtcaggcatggtggtgcaatcccgtggtcccagctacttggatggctgaggcacaagaattacttgaacctgggagacagaggaggctgcattaagccaagatgacaccactgcactccagcctggacaacagagcaagactttattgcaaaaaaaagaaaaggactttgttctagaaaagtcctgggatgaggggtaattctttttcaaggcaaatcttctagaaaagaattagcagtgttagtatctaaacttaattccctgtacctgcccaaaatgttctcaaatacaaccctctcttctttaacagtcatccctagagctgggcatagtcccagtttctaagaaggctgaagtaggaggatcgcttgagtccaggagtttgaggctacagtgagctatcatcaccccactgtactccaacctaggctacagagcaagaccccatctcaaaaaaaaaagcaaaaacatcatcccttaatctaacctcatgactcaattacaatgcggcttcccagagagtagatttctactgtcacccatcatttacataacctcttcattaatcctgcccatcacataaaactcaaattcttcctactggcattccagaccctcctctccctacccctaatctcaatatcattctttcagtgcttctaagtggctcacccatctccctaataccactttccccatcatagtatctgcttgtaggtactagtagaatatagtgcacacagtgagcttattcatggttgttgactgactaaaaagcacagaaaaaaaaatcacttcctatatgtctcaatccaacatgttcctgcaggttgaaaactataaactccaaaaaacacttcaagcaagccctttcctttcatcaacacaaacgaattgtgtttatcgttctgaataaaaatcactatggaaatttgccatggtaagagggaatccaacagtacatctggcaatgctcttgtctaaaagaaagatgctgactgaccaattatttaattagtcttaggtgactactcaaatcatccctgataattggaacattcctgatggttgacacatggtcatacagaagaaagcaattttaaacagagaaaaataaaagcttgtgccaaatgaaagcagacttccactataacacaattttaggtagccacagcaagtggaggatatcagatcccaggcaagcaaaaaagatcccatccttggccaggtacggtggctcacacctgtaatcccagcactttgggaggccgaggtgggtggatcacctgaggtcagaagtttgagaccagcctggccaacttggcgaaaccccatctctaccaaaaatacaaaaattagccaggcatggtggtacatgcctgtagtcccagctacttgggaggctgaagcaagagaatcgcttgaacccaggaggtggaggttgtagagagcccagattgtgccactgtactccagcctgggtgacagagtgagactccgtcttaaaaaaaaaaaggtcccatcgttgctcactccattttttcccaagcatctacctgttggtcagcttgcctctctatcccctgcccctacacaccccsacccaacaaccacagaaagcatattgtctaaagctctgtatactttactgttttttttttttttttacaattttccacattaatatgtgttcataatatgaaaagaaattattcaaaaatataaatcagttggcttccctggtggtctagtggctaggattcggcactttcaaaaatataaatcaaagtccatgactctaaaaataacatatgcattgatatgctcgcccctttgacccttctctcaagagaaattccctgccaagtaatccacatacataagaagtgtaaaaagtccctagattaaaagagcataaaacttcattatggaaacacagtagtcccagctatttgggaggctgagacaggaggatcacgagtccaggagtttgaggctacagtgagctatgatcacgccattgcactccagcctggatgacagaggaaatattaattttagagtaatcagagaaagccgcatgaagaataaattaataagtatttattgaatgtctaccatgaaccagggagtaggtgatgtgctgagaagacaaagatattgtccttgtctctctatgatcttactgttaaatggaggaaacatattggcaaactgacagttactgtctattgtagggagggctatcatatagataaatgctgatgctgtggtagtgaagaggagtacccagtatagccagagtgagaaagtgtccaggaaggcatccaagagtaagtgaaacctgaactgttacctaaaggatgtgggaccctgagcaaaaagtttggggaaagagcattctgggcagcatgaacagaagtaaggggatgagcaagcttgagagggggaatattgggcattgataaggttggagcataggatgtgagggaaggagagatgagatgagatagggagagtgggcaggacaaaaatgttgactggctttgtatgtcatattgtatagagcttggactttatcctaaaggcttttgggagccattgaataaaagtaggcaaggaagactatgcttagatttacattttaggagtacttttcctctggcagcagtgccaaggaaggtaggggcgaggaggaaagactagtggcagacaagttaggaagctgtcacaggaatttaggcagggagtgaaactaaggttgtgaaaatagtaatgtaawaaagcaggcaaatcaagaaatgtgaaggggtaacatccatgtgttttgatgactaattgtatgtggtatatgagggggagagggaagaacctaggatgacttggaggtttctggcttgagtatttgtgtgggtgggtcgtgtcatgaactaaaatagagaatataagaggaggaaggttattttctgtgaagtggtggcagtgatggtccacgagaagatactgagtttaatttaggttacattgcggtcgaggcttctgagggatgctaggtagagatgtccaggaggtagttggttgtaatgaacatgaaacttaggagagtgataggtgagagggtgagagagtcatcagcttatcaaaccacagccataggaggggagaaggagctggctttaggagtgtatgtatattgagacaaaaactctggggaactccaacaggagagtggtgtcagaagcagagaaagaggatctcctgaaggaaattgtccacagaaagggagtggccagaaaggtaagaggaacaggagagaagtgagtttcaaggagagtgtgacacacattgtagattatgcagaggtcaaataaggcaaagactacagatgtccaaaataaaggttactgctactggaacattttcagtggagttgtgggaagtgaatggaaagtgcagaagaggagtcagtgacctttggaacttggactttgaaggaagagagaggaggaagacaggtgaagaagggtggggagagttttgtttatgtattgtaacacaggagagacttgagcatgtttattttaagtgctgttttgaaagagccagtagagaaggaagrtataatacaattcaaagacggggagaaaaattgatggagcatgggctctagagtcaaaagttgtgtcttttagaaagatcagagggttaaaaataagaatgcaggtgaytaagttggttggttagaggtgtaggaacttgagggaatttctcctgatgctcatactctctctatgaagtaggaggtgaagttatttgctgagagtcaggaggaaggaaagaaggggtgagtgtgtatgtgtgtgtgtgtgtgtgcacgtgtgtgtgtgtatgtgtgtgtgttttccctctagccctagaagcactcaacaacctgattgtaatagattccaaggcagacaggtagattgatctaggatcagaattttccagcatagttttgacggaagaatatggggtccttgtagtttgtcttaaaatgtagcatcagtttgattattgattgtttgtactgttgttctctggctggcttgtattttggctccccagtgaaattgtctactcctctgggaagaagcatatatgtaacttttgcattcctgcctgtcatttagctaaatactatgcagaaattaattcttaagtttttgttgagataatttgacttttggacaggacatcttgactcttgacatagagagaggctttcctcacttgtggtctttaatccccatctcattatctgacatggatagtggaggattcactcactctccatgagtgaactccaggcctagcttcttcattrgtcttaacaggttagctttactactctccccagggcagttgagctttgctttccatgaaggttatgtagttaatttgtactaggcttgtgaagacctgggtgtttacaagactggacagagaggctgttgtggaaaatgcagcctccttcttgtttattttggcaggcaggcaatgaaggagatagatttgttctcakgactcagagccctacctgctttaccttaacaggttcaatataaccaccacctttcagatgtgatagtgtccttcagagtttatctgacctttatatctaaaaagagtattagttaccctttgccctctacttgcttggttttttttcacttttattccagtgtagaggatatttcctaatgtgttagggccagctcagaattgatgtagttctttcccattggcacattccgcatctttgtttgtttattgccatgttcgccacagtgtgccttgttttgcgctccttgttttgtgaagctggactcttatcagataaacttgccatgagtcacactggggagtggaagtatgtctccactaatttggagaatctttgatcttgtttcactccctggtttggcttgtccagtgcaatttgtctctcaacctgmaagaggtgtgtgtgtgtgtgtgtgtgtgtgtgtgtgtgkacttgggtgtcccttgcctgtggcttcacctgttgccatgaatggttgacttcagggcatgcccctttgtgtatacagacttcctctactattgttatcaccatcagcaaaaatgtctctgttaagagcctctttgaatgtagaatatagtatataacactgagagttcataaaccctctgtcctctagggatttacagtatataatacacattacaaatgacaaaagacaataaagaatgtgtaagcggttgaacaaataatggattattgctcctcatttagctatcatattcacagtagaagatatcctaaaaagacatgtagtcagtgaggaagaggattaacagagaccagatcatcttcagctccaactaagatggcagagagctgccacctgtggccctttgatgccaggtaatttctctctgatatcctttctagtcaygcaggacctttttgccatattatctatacatatggggcaggatcctaacaggacctttgctctctagtggtaacctgtcactgaaatgggaggctccagtttccagcagggagagtgcctggaaggcttggctcttctggtacagttatctttgtaacttgagaaaatttattccagacctactacaaacattcgtgtgctcacaagcaccacagacagagcagcagccaaagctagctgcagcctgagcatgggtcagtgtagggaaagaagctaactgacctggcctgagtcacctctagaggggaagaatgtaggacttgtcccagcctttgttggttagtttcccaaatggaaaacagggaccagagtaggtggggtactttgaggtcctcatacctttcagaggactggatccttgttttcattcttgttcttattgttaataagtgtaataacagtattcatgtaacactgcctttattaggaagaatgaggaactgccaaagggctggaaattttctttactttccctgtgggagagaaagatagatggagcattaggtgcccatctctcaggcctcctttctctgattatcctgtgggaagtacctggaaagcagtgaggcattggaaggaatggtctaggccttggcatgagtatgtggtcgtgaaggcataagacaaaatatcttgtgtagctgtagcacaggtgctgtggtaagaggaaataggtttgggggcagtattaagggggctaataagcgcagaaaatagtatttgttgctgtcgttagttacttcactttgccttgcctatatgtattgtctgacagcagagccgaaactccagcatccttttgtctcctcctcctcctcctctttttcttattttctgacttataaagatgtatatcttcaataaataagcttgtgatgatatggaaagttaaataaataaaagttctagaaattggaaaactaaatggtgatttcattgtggtctttaaatataacaagtgttataggccacggtggctcacacctgtaatcccagcactttgggaggccaaggcgggcagatcacctgagatcaggagttytagaccagcgggaccaacatggagaaaccccgtctgtactaaaaatacaaaattagctggcgtggtggcccatgcctgtaatcccagctacttgggaggctgaggcaggagaatcgcttgaacccgggaggcggaggttgcggtgagccgagatcgcaccattgcactctagcctgggcaacaagagcgaaactccgtctcaaaaaaaaaaaaaaaaaaaaacaaccagaaaaacaaacaagtgttataattgtaattcttgtaattccttaagccaaaactccattataacatttcttagtttgttgttgttgttgttgttgttactttttgtgtgtatttgtttgaacttcccagctgtattgtgatctctttgaaggtctagattgtgtctgatgagatgcatatgatgcacttcatgaattgagctactttgcaaatgatgctggttgttttatttcttagtgttttcagcaacttccagcacctttcacaatgtttctttccacgtggttgtcccacagatgttgcatacttgatatgtccaaaaggggcattgttgtccccctccctgctcctggacctgcctcttcttctatgttcccgattttagtgaatgcttttcccgtccatccagtggagaaattctaaatactgaatgctttgtgtatactaaatatatattctgtccatttcatagtttaaagtgttgctatcagatggagaattgtaatgtgcagaatataataaagcctctttttttttttttttttttttttttgagacagagttttgctcttgttgcccaggctaaagaagtgcaatggcatgatctcggctcaccgcaacctctgcctcccaggttcaagcgattctactgcctcagcctcctgagtagctgggattacagacatgcggcaccacgcttggctaattttgtattttttagtagagacggggtttctccatattgatgaggctggtcttgaacttctgatctcaggtgatccacctgtcttggcctccgaaagtgctgggattacaggcgtgagccaccgcacctggccaataaagcctctttataccattttctaatttctatttcatagaattttaaaactgcataagcctttaacctctgtttctcaaattcactttcccctttggaatgttataattctacttcacctgactcctggaactccctgttatcatgtaacatattttaattattttgattgttgtctgagtcttcctactacaagagtgagactgagtctcactcttggccaggctggagtgcagtggcgctgtctctgctcactgtaacctctgcattctgggttcaagagattctcctgcctcagcctcccgagtagctaggattacaggtgtgcaccaccacacttggctaatttgtgtattttagtagacacagggtttcaccatgttggccaggcaggtctcgaactcctgacctcgtgatctgcccgccttggcctcccaaagtgttgggattacaggtgtgagccaccacacccggccaacaatgcaaacttcttttaaaaatttgtttttaaattttttgtgggtacataataggtgtatgtatttatgaggtacatgagatgttttgatacaggcatgcaatgtgaaataagcacatcatggagaatggggtgtctatcccctcaagcatttatctttgtgttgcaaacaatctaattacactctaagttattttaaaatgtatagttaagttattattgactatagtcacccttttgtgctatcaaatagtaggtcttattctaactattttttaaaaatgtggaacacttcacgaatttgtgtgtcatccttgtgcaggggcctccctaacctctctgttgttccaattttagtatatgtgttgcttaagtgagcactagaatgcaaacttcttaagaatagaggtttttatttgtgtattaactaatttccctagcacctagaagagtttctggtataaagtagctgctccaatcaatattgaatgaatgaattggaaatgttaagttagttcactcttgttccccataaggaaaagaggcatggaaaggcacaataacttgctcaagctaacgccatatctccttaccaggtaagtgggttttaaaaaagtttaaataaaacgatgcttaatcacagttcctttatgtgatttggtactaatgtgtattatggacttaactgtattatctctatgaaaaggggtgggggaagcaaaagggaagaagctaatatatattgagtccttactatatgccgggtattttgttttattttatttatttatttatttatttatttgagacagagtcttgctttgttgcctggtctggagtgcggtggcactatctcggctcactacaacttcgcctcccgggttcaagtgattcttgtgcctcagcctgctgagtagctgggactaggcgcgtgccaccactctgggctaactttttatatttttagtagagacggggtttcgccattttggccaggctagtctcaaactcctgacctcaggtagtccgctcgtcttggcctcccaaagtgctaggattataggcgtgagccaccgcgccaggccagtcttatttaattgtcataaatgatatcctatgatagtccagtaaccttactagattttacagatgagagaactgaggcttaaggaacctaaatcacttcccagagggtcacacagctagtaagtgactgaactgggttttgaacccaggcccgattaactccatttggccctcttttaccttaaggcacaggaaaattttggatttgtggtctgggttgctttaagattcccagatcagactactcttgaaaatggtctgatttgaactactcaagtagagttacaaaaattgtttaccttaagacagccccatggagcagtggggttgtgtctgtagcgctcttgagtaaaaaaaaattctgtgttgcacatactcccactcagttgtatcgtatataattcacatttcagactttctttttaaccagggatccagaataactacagaaaggtgattatgtaacatacttgtacagtgcagccacttctgtgtttggtaatattctttttttttttttttttgagatggagtcttgttctgtcactcaggctggagtacagtggcgcgatgtcggctcactacaacctctgcctcctggattcaagcaattctgtacctcagcctcccgagtagctgtgattacaggtgcccaccatcatgcctggctaattttttgtatttttagtagagatggggtttcaccatcttggccaggctagtcttgaactcctgacctcatgatccacctgcctcagcctcccaaagtgctgggattacaggcgtgagccactgtgctcggctggtagtactgttaagcgctaagagcacaaacaaaaactatgtctaaaatgtagggcaggtagagcaggtgaggattaaacccagttgaaatcagcggtttcagtagtaagtgggcagatcataattacctgtgttgctcagagacctaagctgagagtgggggtggggaaaggtcacacccattatctttggagaaatgatgagagtaaataacccatagtttccagtttattccagaagcattctcgccagagtcacaatgttgaagtgggttttgagttagaccttgttaccccagatcatccaaggttaacatagtttccttagataccacagccattcattgtgaacgctgttagcttcctcttaggtagctttatgtagcctaccttagaaaggagggtggggtctgggaggggagaggagggaatagcaaaagtagcagagaaacaaaggactaattaggaggttcctcagtcatttgggagtagatctttttcattagctgatcactgagatcaaggatggaggtggtgatccaggaggaggaggagttgtagtaatcagaagcagaatagcataacttggcagtcagtggtggtccaaggaccagcagcatctgatagcttgttagatacatatatatataaattttttttttttttttttttttttgagagagtctcgctctgttgcccaggctggagtgcagtggtgcgatcttggctcactgcaacctctacctcccaggttgaagcgattctcgtgcctcagcctcctgagtagctgtgaccacaggtgcatgccatcacacccggctaatttttgtatttttagtagagatggggttttaccatgttgaacagactggtctcgaactgctgacctcagatgatccacccgcctcggcatcccaaagtgttgggattacaggtgtgagccactgtgcctggcctgaatcaattttaattttatcaagattcccaggtgattttttttttcttgaggcagagtcttactctgtcacccagcctggagtgcagtggtgtgatgacagctcactgcagcctcaatctccccgggctcaggtgatcctcccacctcagcctcccaaatagctgggactacaggctcgtgccaccatgcccggctaattcttgttttgttttttttttttttttttttgtccgaggcagagtcttgttctgtcacccaggctgaagtgcagtggcatgatcttggctcactgcaacctctgcctcccgggttcaagcaattctcctgcctcagcctcctgagtagctggggattataggcgcatgctaccatgcctggctaattttttttgtatttttagtggagatggggtttcactgtgttggccaggctggtctcaaactggctggtctcaaactcctgacctcatgatccgcctgccttggcctctcaaagtgcgggattacaggcgtgagctactgcacccgaccaattcttgtatttttttttttttttttgtagagatggggctttgccatgttgcccaggctggtctcaagctcctgagctcaagtgatccgcccaccttggcctcccaaagtgctaggattacaggcatgagccaccatgccaggcccccaggtggttttttaattcgattctgtgcccgttaaagtttgagaagcaccaagtttgtgattaggtggttagtgcaaggggctttggagttggacagacctgggattgaaacctggtttggccacttactacctgtgtgactttagataaattatttgaactctctgtgacagtttctcatatgtgtaataggggaactctctatttcatagggttgtgggggagagtaaatgacatggtgcattttgcaactgacactatcttagatttaatgaaatttagtaatgtctgtatcatattaagcactgagtctagcacagcctagcatactcaataagtgttattactaataattaaattaggcaaatttacaggaataaagaggctttctcctcttcctctttttctctttatctctcaatgagtacgtttgtctgcagttttataaagctgtattgtgtgtgtacactctttggtgttttgcctagcattatttaatggtagttatagcagcagcattaacacatcttgtacttattaatgtgccagkcataatttttatgtactttatgcatatattatttcattcagtccttagagcaaccatgtgaaataaatattatctccattttcggatgaagaaacagaacaaacaggttaagtgacttgcctgagatcacatagccagtcagtggcagaatcaggatttgagctgagacactcttattccagcatctgtgctctattttcatgtattgctattgctctcaaacttatgtggtgtgatggaaatcaggaaactttgattggatacttgattctgccactaatttatttgtgaccttggtcaagtcacttgtcgtctttgggcctatttccttattataaaaatggagggattatcaaactcaaaagcaattaaacaaaaaaagacaaaaaatgaaaaaagagtaaaacacaaaaayggagggattagatgagatttgtaaagtctgttcagtgattcattcaacatatagtgatttcaagcaaagattggaagaaaattttatctagggaattggttcaaaagtacttgttcaagcaggttggtgtcattaagaacaaggggtttgaatcttgactcagccacttcctggctatatgaccttgggcaacttacttaacctttctaaacattgatttcctcgttagtagtggggagaatagttcttaccttgcagggatattgtgaggtttgaataagataatacgtattagcacctagcatatgtgaaacatrcartggatactcaatatccgtgagttgtcttttcttccttccattcattcgggagatgcttagggaagcagatataccagattcaaaaggatttagaccctcgcttggtccttatgtccttttctgtaatggtattctcacctttgggaaatgagaattagtagggaaggaagtgtgcatatagccaggtcctgtctgtttttaaataatccatctttttgattttagattaaaatttctttttacaatatataatttaggccagtaatcccagcactttgggaggcctaggtgggcggatcgcctgaggtcaggagttgaagaccggcctggccaacattagtgaaaccccatctctactaaaaatacaaaaattagctgggcgtggtggcatgcgcctgtaatcccagctacttggaaggctgaggcaggagaatcgctttaacccgggaggcggaggttccagtgagctgagattgcgccactgcactccatcctgggcgacagcgcaagactctgtctcaaacaaaacaaagcaaacgacagcaaaaacatataatttatgacaggataaatgccattttttttgaccagctgggcaacatagtgagaccctgtctcatagtaataacaataacgaagtaccacaaactgggtggcttaaacaacagatatttattgtcttacagttctggaggcgagaagtctgaaatcaagttgtcagcagagttgattccttgtgaaggctgtgagggagaacctgttccatgcatctcttctagtttctggttgcctcagatgttccttggcttgtaaatgatgttctctcaccgccttcacatctgtatatgtctgtctgtgttcaaatgtcccctttttataacactagttatattgggttagagccttttcgaatgacctcatcttaagttgatcatttgtaaagaccctatttccagataaagtcacattcacagtccctggggttaggacatctttctgggggatacaattcatcctataacaaatggtttagggccgagcacggtggctcatgcctgtaatcccagcactttgggaggccaaggcatgtggatcacctgaggtcagttcgagaccagcctggccaacgtggtgaaaccctgtctctactaaaaatacaaaaaaattagctgggcgtggtggtgggtgcctgtaatcccagttacttgggaggctgaggcaggacaatcacttgagcttgggaggcagagattgcggtgagccaagattgtgccactgcagtccagcctgggcaacagagcaagactctgtctccaaaaaaaaaaccacacaaaaaacaaacaaaaaaatcaaaacaaatggtttagtcactttgtaacctggacagaggagtgaacatatatgaaattaactttctttggtcttttaagatttattactaagatttaactagagttaaaactttccttgtcctgttggccgggtgccttggctcaagcctgtaatcccagccctttgggagggtgaggcaggtggatcacctgaggttgggaatttgagaccaacatggcgaaaccccgactctactaaaaataacagagtagctgggcatggtagtacacgcctgtaatcccagctacttgggaggctgaggcaggagaattgcttgagcccaggaggcagtgattgcagtgagctgagatcacgccactgcacgccagcctgacaacagagcgagagactctatctcaaaaagaaaataaaagctcttcttgtcctgctaattctgcattttgatttttggcagcatttaggaaagagctgaggtggacctggtgtgtagcgttggtgggagttccttcgttttctgggctgaatgatttaataataatataatagtggctttcattaatttcttactatgtgccaggaatggactgtgttaagcactttatatacattaatccacttaattctcatgataaccctgtgaaatagattatctcattttgcagaggagaaaagtgggtctcagccagtgaaataacttgctcaagttctctcacccagtaaatggtagagcagtcatttatgtgtagctctgttggacttcagaactccagctcttaactcagtatatacttttccttcacttccttgaatagaactgtttggcttgagtctccttttctctaaaaactcctagttctggaatggtgccaacttaaggggtcagggaagtgacctttacttgtgttcctttgagctgttattgttttcattgggaaagagaatgtgaagtcagttcacatttcttacctactggttgcagtcttgccatggggccctagtcagatgtgagatgttgtaagttacttaaaaaaaaaaatgtcctagtgattaagaggaaaaaacataggcctgctatgtttatgtaactctcttttgtattattacaaaattaaacatgttcactgtaatacatttaagcagaaattacaaagaaaaaagtaaaaattctcttttctagtctttattttctccacctaggcccactggtcagggtaaccactgttcaagctttggtttgtatccttacaggttttttcttgccaggcttgctttggaactgcacctttacatcctttatattcctttaggttggttgtgtctcttcttgactcatgagccttacctcttatttatttttattaccatacatctggcttacatttttattttttattttttttttagagacagggtcttgctacattgcccaggctagtgtgcagtggctgttcacaggcaccatcatagcacagtgcagcctcaaactcctggtcttaagcagtgccccctgagtagctgagactacaggactgcaccactgcactgggctgccttacttttgagtctccctttgatacttaagagttctgccatagggccaggcatggtggctcacgcctgtaatcccagcactttgggatgctgatggatcacaaggtcaggagatcaagaccatcctggctagcacggtgaaacctcgtctctactaaaaatacaaaaaaaaattagccaggcgtggtggcgggcgcctgtagtcctagctactcgggaggctaaggcaggagaatggcgtgaacccaggaggtggagcttgcagtgagccgagatcacgccactgctctccagcctgggtgacagggtgagactccgtctcaaaaaaaaaaaaagatttctgctattgcacccttttctgtagtctttccctcacctcctggtaaaattttacttacctttgaagctcagttcaagtcctcccttttacattaatccactggaaagctaacccatgataactcattctgcttcataactcatagcattaatttctaccactcatttgccagttgaccatgaaatgccgtgtatcgtcacttgtattttattatttgttatttaacttatcacacatttgcccagttagattgtgctgcttgggctcatggtgatttattctttctagtcccaattttgcctaacacaatgtcctacatttagcaagtactcagtaaatgttgatgtgattggattttgttagtacttcacacccttctaaagatcaggtgcttagagccggaagcctaagggaacacttacctggctgacatcatcttggctgcctgtcaagatggggtgtgtgcctgagagaactgcccgtaaatgaaatacttgtgcaacaggttatgttttctcctttagtgggtgggattcaagacttcacattgggaaaaagagatagtaagtgtaggaagagggctgaaaaggggatggatgggaggatgctaccttgtgagaggtggggatatggctttattaaaaacataaatattaaaggctggcgtattgcagagagaagcttcttggaaccagcaggctaattaggcaaactggcttctctggtgcaaaccagttgttaattgccatttattttctttgctataaaactgtaccagccatctacttactttctcattagagtgaatctggagaaaaggcttaggttagatttaggaaatccaggagaaaaatgcaggacagtcagagtaagaccagggatgggcataatcctttctctcacttgtcttaccagccctagaccttaagggtggccaggacctccttgcatttgccagtagaggttgctattgaagtagtgtaaaacctcttgtttctattcctgctaactccttttgccccatcttatttttctccttcactgacaccctcctatcacacacacattattggttagttatcattcccatctctgaggttcagatatgcagtggaccaccctgcctttagctgtccagactttgactgcaacctgtctttctattccactcctcctcccctcccccaaatgatttgaaatggagaggaaaggaaatggagtttgatggttttaactcttctgtggctgtggcttagggagcagaatgttttgattgcttgatttaggggtcttgaggtctcctaatacaatattctttttgttaatagaaaggccccactccattttttttttctctgagtattttggactcaaagtcttgtgttgaaatgtcggtacctgcccccgaaggggaaaagatccctttcagagtttatttttcccccccattcatggggaattcttctcattatcagaagatgaagattactggtcctttgaacagagtataaatatagccaacaccctaatatatttctaatgattgggctttagctttaaaaacattaggctagatgcctccctattttttgtggcatgatttagctgtaactagcctggaggcaataacaatactaaatgaccttttgtagtcacattaaacattgaaatggtactgagactgccttggtggggagttttggcctatgggaatgatgtgrgttttggtttctactcctttctctgttwtcagataaatcctcctacatgtcccattctctggctctgggaagtactgacagtagggaaaagttagtacactcatctcattgttcagatcaagtttcctgggtgcggttttgcagaacttcctacaagagctgactcaagagttctcttctattgtggagatgttcctgctcttatatgtcatactaatttatatccttgaaattttgagcagcatcatttggatgtgttaagttgggaatgaagaaagtgaaaatattttcagagattccttgagaaaagggttccttttgctgggtaaatcaacgttccctagatgctgtggctaagaagtgaagaattctaagccaacttttttttaccccttttcttttctttacttttttttttttcgagatggagtttgctcttgttgcccaaggctggagtgcaatggtgtgatctcggctcactgcaacctccgcctcccgggttcaagcgattctcctgcctcagcctcccgaggagctgggattacaggcattacagacgtgtgccaccatgcctggctaattttttgcatttccagtagaaacggggtttcaccatgttagccaggctggtctctaactcctgacctcaggtgaaccacccacctcagcctcccaaagtgctgggattacaggtgtgagccactgcgcccggccttttttttttttttttttttttttttttaagagacagagtcttgttctttcacccaggctggggtgcagtgacatgatcataactcactgtaaccttgaactcctgggctaaagcgatcctcctgcctccatctcctgagtaagctaggaatacaggcacatgccatcatgcccagctcagttttattattttttttttttttgtagagacagggtctcactatgttgccaaggctggtcttgaactcctggcctcaagctatcctcccacctaagcctcccaaagtgttggattataggtgtgagacaccttgtccagcacctgtttttcctttttgatgtcagatccctctgaataacaagttatttgcctttttttccctccataagactgtgagcaccttgagagctgcgagaacatctcacttatctttgtatctctgatgtttaggacagtgtccagctcaaagtgtctataaatgtatgttgcattgaatagtggagggaagctttaaatacatttactgcagacagatgtatgcttagcatatttaattgggagacattattagaaagtggagatggataaagaaaggaatttttgtggatatgatatagagaatttttgtttcctaaggatttaaaatttttgtttgtttatttattkgtttattttttagagatggggtcttgcagtgttgcctaggcttgtcttgaactgctgccttcaagtgatcctcctgcctcagcctcctgagtatgtggaattacaggcatgagccactgcacccaacttgcctaacaatttttagagtaacagttattttgcggttcctttacgtggagaacctttagaagtgttccatctgactaccttggacaaggcactgtgaccttctttgtagcagagactaaagacacctgcccatttccctcaaatggagggatatccctcagtaaaggaaggagctcagaattagattgggggtagagaaaggaagcattgagtccctcctagccctgcactgtggaaatgtaaagctattattatgataattgctgttggcaaacaagaaaattctcagcctctggtttgtacctacacccagtcacaacctcaggttgggtggatgcagactttaaatattggggtcacctgtagctgttggaaaaggtccctgtggtttctctgggtgttgtgcaagcattactttttggctcttttccctgtatccatcagtaaaaagtaggaagtttgaggagctgtgctttcggttggcattaggcattggagtgcctttatttcctacatttaactggtaaatatccaacactccataacaggatggccctgcttggaaattcttacctagggagtgactgaagcctaagaggaactgcacagccccctgtattgaaaacggagtagtcatttcctagagcatggcttggatcctgatcagctgatttcctgtctctacagggatgtgatgtgattcctcccccttccttctggaagaaatggatattttttttcatttcctgtttgatagcatattttctgagtaccaggagacacttgatgactataaaacatttgatgtgtggggggtgggaaggaaggaggcttttgttttcagcagaatggctttcatttgaggaattcaaagcacatacatgaacccaagctgttttgttcccatgggagagacacaggctctaagaagattgtttcgaatccctttcctgggctgtgtctacttgacctgcactggtagagccccttctcccccataggttagaaaagctcggtccctcatggagctctgcatgctgtggattctgctcttgccacatccgctactcagccctttttgtgcctaaatccgctggagagcaactattagtccctgggggaagtgacaccacccttggaatggaacctggctggatgccccttgatccctgactgagtgacacagactgggacaggaatctggctgtccagatttcctgtcctctgtcctcactagccgacttggctgcttccaccctggggctgggggtatggggtgtggtgggagctggttgctaacaagcagcgccgcctgtggacctgcacagccacttgttttcctagccaagagctacccgtccagtctggcctgttcctgatccatctggagtgagagcagagacctggaagagagatcagtggggaggcagtcattgtgatcccttttgtttgtagtgaagctttgcttagtgtttgagggcctggggtttaattttgtaacagactcttactatagttgtgtgtgtttaactataagattttcttttcttctcttttctccttcctcgtcctcctcctcatcctttctcctcctcctcctcctccttcttcctgtctgtttttatttttcccaactttataaaggtataattgatatataaaaattgtatatctttatggtgtacaatgtgatgttttgatatatgtaaacattgtggaatgattaaatcaagctagttaacatctgtcacttcacatagttttgtgtgatgagaatatttaagatttactacttccagaattttcaagtacgatacattgtttgctgtacaatacatctccagaacttattcattttttctagagttgctttttcttaaataaattattaggtttcttcttgaccttgaagaagtccagaaaaattcttacaaaatagggaattgcatggtaggtaggttatgagaagtttcatttttgggttttgtgaataytacgaacagcttttcctagtttgctagggatttgygtggccaggtatttgctgcatttaaagttcttagatattatcatcagaagaacagtcttttttttttttttttttttttttgagatggggtctcgctctgtccgccaggctagagtgcagtggcgggatctcagctcactgcaagctccgcctcccgggttcatgccattctcttgcctcagcctcccgagtagctgggactacaggcgcccgccaccacgcccggctaatttttttttttttgtatttttagtagagacggggtttcactgtgttagccaggatggtttcgatctcctgacctcgtgatccgcccacctcggcctcccaaagtgctgggattacaggcatgagctaccgcacccggccagaagaacagtcttaacaagaataagtggaatcagggagcatgcctctaacatttaacagtacattcttccttttacctctgttgttgaccatgtgccttcttgctccaggggttttcagttttcttttattttgttgtatcagatacattttccctctagggtagaaagcagcatcttacagtggaaaggaaccctggctttgggtcttactggctctgtggtcttaaacagtcatgtaacccctttcaactgtgtgcttttcctaattccccatttgtaaaatattggtggtgataaccatcttgcagggtttttgtaaaggttaaatgagttaatatacgtaaaacacattggttggcacatagtatgtaattgtagcttgttttttattagtaggagtcataataacaatacgcttgatttttttatgataaaatacactaatataacatttagcattttagccatctgtaagggtaaatatagtggcatcaagtacattcacttgattgttgtgcagccgtcactattatctatctctagaactttttcatcttctcaaactaaaattccaaacccattaaacaataactcaccttccccctccttagcccctggcaaccacaattctactttctgtttctatgcatttgactactctatgtacttcatataagtggaatcatacagtatttgtccttttgtgtctggctcatttcatgtagcataatgtcctcaaggttcattcatgttgtagcatgtgccagaatttccttcctttttaaggctaaataatattccatttatgtatctaccacattttatytatccattcatctgttgatggatacttggcttgctaataatatgattatttttgggtttttttgacatcttatttaattaattaatttatttagacagcgtcttgctctgttgcccaggctggagtgcaatggtgcgatttccgctcactgtaatctccgcctcctgggttcaagtgattctcctgcctcagccttccgagtagctgggattacaggtgcatgctaccatgcctgactaatttttgtatttttttagtagagatggggtttcaccatgttggccaggctgatctcgaactcttgatcacctgtttcggcctccctaagtgctaggattacagatgtgagccactgcgtccggccagattatttttaatagtaatgaattgattgtctaaggtgcgttcaaaggcttcaaagctggggagaagaggatgaagtagaacaatatccttgtttgtgtgttgactttgtctctctgggttttgcttgcaagacctattttgataggagtctgatgaatgatggacctactgaaccctatacagagggtccagrcctggcagaattctaggaaaaaaaaattgcctcctagtctaatttttctcagtgataaactactctgtgtgcttacagtttgtctatcttgcttctctccctctctcctttgctcctactatgaatgggattcttggaatggtgacatatctagactcttggattgttttgcagaggtcgaaggctgagagagaattgctatatagctgaggggtgatgagtacagcgaacggccaactgtgtgccaacctggctttccagggcagtatttttaggatatatgtacctatatgtgtacacacatatctctacacacacatacatacatatgtacacacacacaaatatcccattattgacacttgacacagtaagggagctacatgttcttctctgggttcccctcaatgcagcccaccaccagaatgcatgcattggaaacgggtccaggataatgtgagaggtctccaaggagttccaagtataaagagccttagcagaagggccttgacagcttagacagtctcttacaatgtctaccaaaattctgaagaaagactgctatccagctgtgatttttctgccttccaggttagacctgaaaaagtccaggagcctagcttctgtgtcctgtgcttatgctggacatgggtggagggtgaggagaggcagtagtccctccaaacccttgtatctccaactgtggattctcctgtttgtttatagggtggaaggsgtggtttatactggtttgtccccagttcctgctctgtgcctgaggggactgcagtggcattaggattttttgcccagttgctcatggacatagagacacgtcacctcagtgcacccccctgtgcaaattggcctaccctcatattacctgcttttgtacctccaatgcctagagaccagttgtctctcagaagctactcaggatgattttatgctgtcagcataataaaagtgaattaattctatattaaattaataaagaccatatttagtattagtcaactaaggttgtatatgtacatattactaaagaaaaatgaattttaaaaaagaatctattttagagaaacagattaaatatgaacgacagtagggggcacttgtatgacagtagaataaagacaagcgtgagagtgttcagtttgaaatttgaagtttaacttttacttgtttcttggaagttcatgttttttcctcatgcaactttctgcaaaactgaaggttggattttaaatataaaatatttgacatgaccaagttatatttaccctttgtcaactaaaaattgacttttttcaaagtttgttatttttttaatttaatttaatttaattttattttgagacagagccccctctgttgcccacgttggaatgcagtggtgcgatcttggctcactgcaaccaccacctcccaggttcaagagattctcatgcctcagcctcctgagtaactgcaattacagatgtacaccaccacgcctggctgatttttgtatttttgttagaaacagggttttgccatgttggccaggctggtctcgaacttctggcctcaagtgatctgtgtgcctcggcctctcaaagtgttgggattacaggcgtgagccaccatacccagtctttttttatttttttaaagacaggttcttgctctgtcgcacagagtggagtgcagtggcacaatcatagctcactgtaacgtgtctaccaggctcaacagatcctcccacctcagtttctcaagtatctgagactacaggcatgtgccattacacctggctaatttttaaattttttgtaaagacgaagtctcattttattgcccaggctggtctcaaactcctgggctcaagccatccttctgccctggcctcccaaagagctgggattataggcatgagccactgtgccccaatttatttattttttatttttttaccttcagatgctctttggcaagcaagtaaggattgctcaattaaaagtattgcattatctcattcaactatatgaacatacaaaacttaaaaaaatttgtctgaggccaggcgtggtgggtcatgcctgtattcccagcactttgggaagccgaggcaggtggatcacctgaggtcgcgagtttgagaccagcctggccaacatggagaaaccccatctctactaaaaatacagaaattagccgggcatggtagcacgagcctataatcccagctactagggaggctgaggcaggaggattgcttgatcctgggaggcggaggttgcagttagccgagattgtgccactgcactccagcctgggtaacagtcgagactccatctcaaaaaaaaaaaaaaaaaaaaaaagtctgaaacagtattggaagctttaatttctatttcaacaaatttgtgctactctggattatgtgctacctgtcactcaaggatcttgttgaaatactttcttgtacaaaaacaacgaatcaaaacaaaacaaaacaaaaatgagtgtacttcatgttgtatttgagtagaggtcctaacaaacacttgaaaaatggctggtggtaggctggacgcggtggctcacgcctgtaatcccagcactttgggaggccgaggtgggcagatcacaaggtcaggagatcgagactaccctggctaacatggtgaaaacctgtctctaccaaaaatacaaaaaaattagccgggcatggtggcgggtgcctgtagtcccagctactctggaggctgaggtgggagaatggcgtgaacctgggaggcggagcttgcagtgagcagagatcgcgccactgcactccagcctaggcgacagagagagactctgtctcaaaaaaaaagaaaaatggctggtgttagatgaacacagctttctctcatttcaataatgatattgaaaggttttaaaggccaaataattttttttttggagacagagtcttgctctgtcacccacgctgtagtgcaatggcgcaatctcagctcactgcaacctccgcctcccaggttcaagtgattctcctgcctcagcctcctgagtagctgggattacaggtgagtgccaccatgcccggctaatttttgtatttttagtagagatggggttttaccatgttggccaggctggtctcgaactcctgacctcaggtgatccacccaccttggcctcccaaagtgctgggattacaggcgtaagccaccgcgcctggcctaggccaaataatttttatgaactgtctggagaagctttgatgaggaataacagtatcattttcaaattggcttctgcacaaactacgtaattttgagtattccatgttaatgcatatgatgtagctggctcttaatcaccctatgaaaatggagtacaaggcatgctgaatacttcaaattcacagataactactaaaactaattttaatcaactgtctcgtcatttattcctacttgaattaccaaagatgcttgcttatggggggaaattgaacagattttttttcctcttgtttaccctttaccttttttaaaatgttatctgccactgttttttttttttttcaracagtctcgctctgtcgctgcaacctctgccttccaggttcaagcgattctcctgcctcagcatcccaagtaactgggattacaggtgtcccctaccacgtccagctaatttttgtatttttagtagagatggggtttcaccatgttggccaggctggtctcaaattcctgacctcaagtgatcctcccatctcagcctcccaaatttgccactattctttatattccagctaaaatgaactagtgctttctgcttttttttttcctagctttcctgctttcatgcctttgctcatgctgtatcctgtgcctgcattttcctttaatttctacattatatttggtccttacatatccatctcaaatgttactttttgtggatccttccctgattatctcagatacaagttatatcatctttctgaactgacataatattattgaaagaaatacacttaaaagtaatagtaataactgacaacattcagagtctgttacaaaatgttttcacatgtattagctcattggaacctcacagatgtttttcatcactcctgttttacagctgaggaaattaaggcttaaggagattaagtaacttgcctgaggttacccataattagaactaaatcttttttttttttttaattttttttagagacaaggtcttggctgttgcacaggctgcagtgcagtggtgtaaacatggctcacagcagcctcaaactcctgggctcaagagattgtcccactccagcctcctgagtagctaggactataggtgtatgccactacacccagctaaatttttgtgttttttgtagagatggggtctcactgtgttgcccaggctggtcttgaactcctgacctgaaatgatccttctgcgttagtcctccaaagtgctgggattacgggcatgagccatcatacctagcataaatctaaatcttatgacctcaaatcccatgttttttccaccaaacagtgctatcttacgattcttatcacttgctactatgggttagaattacttgtgtaaatgtcacatctggcctactactttgtactgtccttagatgaagagttaatgccttattctttgtctctgacatcccatagcacagagtattgcgtataataaggcttcaataaccattgctgaaaggctgacaagttgaagaaatgttgatgaatgcatgtgtctagcacagtgcctcgcacatagatgcctaataaacatttattgaatttaattgtaaaatggatcaaagaccatagttaataagagcttatagggcacttaataagtgccgggcaactgggcaccggtggctcacgcctgtgatccctgcacttttgggaggctgaggcaggcggatcacgaggtcaggagatcaagactatcctggccaacatggtgaaaccccgtctctactaaaaatacgaaaattagcagggcttggtggcacacgtctgtaatcccagctacttgggaggctgaagcaggagaatctcttgaacccaggaggcggaggttgcagtgagccgagattgcaccactgcactccagcctgggtgacagagtgagactctgtctcaaaaaaaaaaaaaaaaaaaaaaaaaaaagtgccagtcactgttataaatgctttatgtcaaattaactaatttaatccttagaacctatctccattttacactggagtaaactgaagaacaggagggcatagtgatttgcccagggacacacagctgttaagcagcagagttaggtttcacaatttgctctagaattctcatgtactcaaacattatgctataatcagttgttcataatattttcacgctgttaaattcctcctgaatgcctgtctgtcttgggtgtagctcaaagaatgaaaagcagaagcagcataacttgttgaatatactcttgagcctgcgtcagaatcacctgcagggcatgttaaaacacagattgctgggtcccatcctcagttctgattcagtaggtctggggtggggcttgagaaattatatttctaacaagttcccaggagatgctgatgctgctggtctggggaccacttggtgtagcatataggtgttaagagcatggactcaagctgctgaggtttgaatctcagctctgccatttattaactgaacttgggcaagttcttgaacctttctgtgcttcagttctcatctgtaaagtgttttactgttaccacatatatcataggattctgacggagattgaatgaaataacatgtaaagtgcttaaaatggtgcttggtttgtagtaagcatgcagtcttagctacagtaatggggataggacatgtttcttgccttgtagattttagagtctagttattagacttaaatctaataattttaaaaagtacaaattcaggtattagtttacatggttctgattctaccttagatttggaaagatgaaatgcgtgtatcttgggggatatggtgggtagtgggagaccaggaggaggaaaggtacatgaaactagaagataatggaaagttatatagtcagaatttagaaaggttggaattgccagtggttttggtattattacctgagaacttgagggagatagaggaaggtgcctgtgctctctgtttgccaaagagataactgactccttttcccatttctctttcttagagctggtatctggtctgcaggcagttccggcagcatttgctttttgtggggaacagtggctaaggaagtgatttgctactggcttcagaagttgggctctgctgcctttatcctccacagctgcctcacatagttttgattcttcctgagaaaggcagttgttaggtttggaagtcttcagattccagagacagctggacagctgaccctctggtagctatttcccaaactgccagcctcctgttgcctcatctccctgggccccttcttttttgctttgaagcaatatcctatatttagtgaactaaccaatttgaggttagaggaaatttgatgggggagtctctcccaccttaaaatcctggatggatggagtatttgggcccaggaacaagatgtatcctgttaaaaaaaatttaacaccttcatcaagtatactccaaatgacagcttacagtgctatgaatgtacctctagctcatgggtaaggagcagtgtttatttttgggtgccctgaagaaaatatttgggggaaggagtggggagaagctcaggcagctccatttatggttgagcaatgcttggtattctacagaagggaccatatggacagtggaagagagtttagcattctgattgttcacctcttgctccttccattctgatggctaattagggacacctcattagctawcagagtggaacaagtatttgccaggctgacatgagcctcagccctgcatcctgcatcttctgctttcccaacctgctgagtcaccacctaggaatggcagtagccaggttaccacctggagcacctggagcactcttggcataatgcactgttgactggttttggtctcctagacacagcttgggcctctccaagcctgttggagtgataggctgggtcttagctctccttccagcttgttccacaaggcgctgacctacttttcagggacaattaagtgtttgtgagcaaaggaaggcggtgacccgagtgaaggtgaaccagagctgcattaaacaaacatttggagtcactttttctatcttacacaggagggcccatctcagtccaaatggaatggcagatcaggctgattgtggtagccacattctagatgcttatcaagatagtcaactaacccttgaatttttattctttctatcaatgtaccttaatatcagaagttacttttcataatcattgtaccccttgtctgtgggctatacgaaaagatttggaagcaagttggggctcttagagtgaattattgatacaagctagcttttgatataccttttggtgtatcaaagatacactttctggtggcaatgtctggttcatttgtaacatcttggagaggattggaatctcttttcctttttgtatcaggccaggataataggatagaggagaggccagatctgtagagaatgagcaagtggcttgtttagggtttcctgcccytgtgaggtaagggctcaaggattagattcagtctttccatttgcagtgaaaggaagtaaactcactttcccaccctcatcctggaggttacttatgttatttgcagaccccaacttctgcctctctgttaagtwtacttcttatgcaggttgcccttactgttacatcttaccactgggggaaagatccaaggctctgggaaggacagtgacagttgtcctacattggctagtttcaagaccctgagggaattgccaagccagcaattaggcaatttctttttcttttcttttctttccttttttgagatggagtcttgctctgtcgcccaggctggagtgcagtggcgcgatcttcactcactgcaagctccgcctcctgggttcacaccattctcctgcctcagcctcctgcctcagcctctggagtagctgggactacaggcaccagccaccatgcctagctaattttttttcatttttagtagagatgggctttcactgtgttagccaggatgatcttgatctcctgacctcgtgatccgcccgcctcggccaccaaggtgctgggattacaggtgtgagccacggcgcttttttttttttttttttgagacggagtctttctctgttgcctaggctggagtgcaatggcacgatctcggctcactgcaacttccgcctcccaggttcaagcgattctcctgcctcagcctcccaagtagttgggattacaggtgcctgccaccacccccagctaatttttgtatttttaggagaagcggggtttcaccatgttggccaggctggtcccgaactcctgacctcaggtgatccacctgcctcggcctcccaaagtgctgggattataggggtaagccaccgcccccagctggaaatttcttaaacttttatttttagcaactccatattcatgagaactctcataatcttctagtcagtaaaaagaaaagttattgaagttattgatactgcacccagagatccagatcaaatcttaaggaaggaagaagcttagaggagaacttcaccctgccactctctcattggaattcccttctaacaacgtgtgaggtgtcagccccatttgaagaactagtttatatatcagagcatggcctggaaatcagcgtggcatcaattttggtctttttttttttttcaaatagagacaaggtctcactatgttgcccaggctggtctcaaactcctgggcttaaatgatcctctctccttggccacccaaagtgctgggattacaggtgtgaaccactgtgcctcaccagttttggtcttacagatgactaagttttttgggggagggtattttaggtgacgtgcaattgctccattcctcctagacatcccagaatctggtcacaacctccttttttccacttatcctttcctttatgcacattaaacctgttctctgctgtttcccagtctgtcagcccctttatggtgtcagtgcttcctgacctatcatgtacaatagggctcgtactggcattctcagatctcttttttttcttccacgccttttctatccccagtgctggacctgtgttcattttctccactgagctactgagtgccactgcataacagtgtgctgactgactctattacagatttatgagctctagccacagcctggctctcaatcctatcctgaaacctttttattctcttctggttgactgccattcatttttttctgcagcagccattccagtctttcaccattctcttcaaacttgttgctccaccccaccttataaactctcaataagtaatttagtcttttacgtctcaatttatctgtaggctttaccagtccttaccacattccctcctatttcagaggcaggtctctgggcatatacatatatattttgtgttcttagttcctcccttcctagtgactstttgtaaagatattcaggttttctccatcctaagataaaaattcctttaagcttatctcttcttcagactaactctctgtgctttttttttctttaccaccaaactacctcaacagcctttcttctacttctttagtcatcgtgagccactatagccaaggtttgtgcccaccatcccaatgaaaggctcttgtttgtgatgacttgcttgcagaactcagcagcctctttttgttctcacgctgtttcatcttgtcacagcatctgacaccatttggacctctttccttccctgactgtgtgctatctctggatgagttgacctactctggtgatttcatttaggaatttcatctgtgtgtacagtgatgactctcttgtcagaatctgtaactacctattgtatgagcttttcccccaggtccaaacttgtatttccaaatgactactctccttttccactttgtagcctacagaaatttgcatgtaatgtatccaaaattcagcttatacaaccactatggagaatggtttggagaactaaaaatagagctaccatacagtccagtaaccccactccttaggtttatacccaaaagaaaggaaatcagtatattgaagagctatctggactcacatgtttattacagcactgttcacaatagccaagatttggaagccacctaagtgtccatcaacagatgaatagataaagaaaatgtgggccgggcacagtagctcacgcctataatcccagcacttagggaggctgaggtgggtggatcatttgaggtcaggagttcaagacaagcctggccaacatggcgaaaccccatctctactaaaaatacaaaaactagccaggtatggtggcgcacacctgtagtcccagctactcgggaggctgaggcaggagaattgcttgaacctggaaggtgaaggttgcagtgagctgagattacgtcactgcactccagcctaggtgacagagcaagactctgtctcctctcccaaaaaaaaaaaaaaagaaagaaagaaagaaaatgtacatatacacaatagagtactagtcggccataaaaaagaatgacattctgtcatttacaacaacatggatggaactggaggacattatgttaagcgaaataagccaggcacagaatgacaaacattgcatgttcttacttatttgtgggaactaaaaattaaaataattgaactcatgaggatagagagtagaaagatggttaccagaagttgggaaggggggatggggtcacagggaagtgggggatggttaatggatgcaaaaaaataaaaagactaaataaaacctagtatttgctagcacaacaaggtgactatagtaaaaataatttaattrttcatttaaaaataactaaaagagtttaattggattgtttgaaacacaaattgcttgaggtgatggataccctatttaccctgatgtgattagtatacattgcatgcctgtatgaaaatatctcatgtaacccataaatatatacacctactgagtacccacaaatatttgtctttgtttattttcttcttcttcttttccttcttccttccttcttcttctcctcctcctgttcctctcctcctccttctctctcttcctctcctcctcctccccttcctccctccctccttcttttcttcttttccctttcctttcccctttccctttttcccattcccctttcccctcctttcttctttctcctttctcgtctctcctctcctcaccttccccttttcccttttcttcctttcctctctcctctctcttttccttccttccttctcttttctttttccttctcttttctctttccttttcttcctcttttttccttccttccttccttttctttttccttctcttttcattttccttctcttttctytttcctttccttccccttctttccttccttcccttttctttttccttctcttttccctttcctttcctttctttcctctttcttttctttcctcttttttcccctcccttccttccttctttcccttctttctttcttttcctcctttcttttccttctttcttcttcaacagggtcttgctctgttgcccaggctggagtacagtggcacaatcatagctcactgcaacctgaacatcccaggctcaagctctcctcctgcctcacccctcatgtagctgggcctacaggcacacacaaccaaggctggtctcgaactcctggcctcaagcagtccttctgccttggcccctcaaagtgctgggattataagcatgagccaccccacttggccctatttattttccacatctgattggacactaagttctgtttgtctagctgaaaaatatctcaacagatattgtttcctggctagactcactgccctattttagaccctcgtcttctttgatttatgccagtggtcatgccacatttcctcttaaaaactgatgatcagtttcaccccttgtttatgttgttttctatgccttgaatgatctttttactttttctgcctcacaaatgcttgttcatactgtaatcttttgtcccaactcaaaacttaatagattttaatggtgttcctgcttctttccttctaccccaaccagtaaaaaatttcacttaccttttcatctgagttcttatggtaggatgtacatcttttgtgatagtatttatcatcttattttacagttttctgtttaattgtcagcctcccctagaccatgagttcagtgactgcaggctgtactttcttcatctttgttttttggtgccataacaatttgtagaattgttgggctgtatatagagttcctgctttctccagataaagaatgtttagaaaaatctgaaagagttatgctactgttggatattggttgtggcagaatctcccctcccctttttacttcataaaatattcatgtttgttgtaggaagattttaaaataataaataaaaatataaaattaaagtgaccaaaaatcctaccatttataactgctgtaaatattttgatgttttctttcaaatattttcatgtgcaaatatgcatgcaatacatatttggaaaaaaacagtttgtaacatgtttcttcacttagtgtatgttgaaagtctttcagtgtcaaaaatatgtatcagcatcatttattaatatgttgctatcagtattctcttgtatggatgcattgcacttgagacagtcttctgttgttggacttttaggtaattttgcactgtttggtgttatgaacaatgagatcaatatacttacatgtatatatttgcacacttaactgtatttttaaaaagataaattcctaagaatggaattgctgagtcaaaagttatttgtatactttaaaaaacttttgccaaactactctccataaaagttttaccatgtggttgggttttacatttcattgagatttttttccccctttggttgattttatgttgccgttggaggttttatacattggaatgatttaattaaggctgtgtttctaggaatattaatatagcagcatgtgcaacatgaattggataaggaaagtcagtttttttgaggctgttctaacaatccaggtcagaggtaatgaggatcagaagggagagggtgactcttgaatgccggagagagtgactcttgaatacagaagaggatgactgggagaggtatttgcaggaactgataggatttgagaatgggttgggtaaagggtagtgccattacttgaagtgggaaattaaaaggaggcattggctggatgtggtggcacacctgtgatcccagcactttgagaggccgaggttgggggatcacttgaggtcaggggttcgagaccagtatggtgaaaccccgtctctactaaaaagacaaaaaatagccaggcatggcagtgcgtgcctgtaatcccaactactcgggaggctgaggtgaggcaggagaatcacttgaaccggggaggcggaggtcgctgtgagcckagatcgtgccactgcactgaagcctgggtgatagagtgagactccgtctcaaaaaaataaaaataaaaataaaaataaataaataaaataaaataaaataaaaaataaaaggaggcattgattttgggaggaaagatacggattcacttttagtaatttcagttctgtttgctgtgacatgctccggtggaaatgttcaagcacttggcactacagagctgcaataagaagagagccagggttcagtcatcccagcccgatatgatatttaaagtcctccataattgcctctctagcctcctctccaaccactttctcacttctaagccagacaaaactgtcttaatcttatcccattgttcaccacctgcctcaaagccctgtaggaagtcttctttgatctctccactggaagttagttccagttttctaaacttaatgctagttgtattttttttccatatcatttgtattatactttaacatcctatttgtatgtatgcattattttcttctacaggattttaaactcctagaacctgggactatatcatgaacttttttttttttggagactgtctccctctgtcacccaggctgaagtgcagtggtgcagtctcggctcactgcaacctcctgcactcaagcaatcctcccaccccagcttcccaagtagctggggttacaggcgcatgtcaccatggctggctaatttttttgtatttttactagagayggggttttgccatgtgctcaggctggtctcaaattcctgagctcaagcgattcgcccaccttggcctcccacagtgctgggattacaggtgtgagccaccgtgcctggcataaactcttttttgtctctcacattactagttctgtattttgcacagtgtcaaaaaatatttggtgatttacaaagtaaatggaatctgcttaaagtaatggtaataatacagtggattattgtcattctacacctaatacctactaaatgttaacattattttatgtgcattttcctctttatttttcttaaatactcaaacatattatgggagggggagtggaaaacaaaagatgttaagtgagaatcccctttcacagccgtgttctttgtttcctccaagattcttgaagaatggtatatacctgccttttagcttccaaccctctctgctacactgaaattgcagttgtcaaggtcaccagtcacctcctaattgccaaatccaatggtaaattttcagctctgatcttacttgacctttctgtggtacttgacactatgaaacactccattctccttaaaagtttctccttccctaaccttttgtgattttatcctctcctgattttctttcttcctcattttcgtatttatcttccctttgttcacctttaaagaaagatactttctaggattttgtccttggcactctacatagttttcatgagtgatcttatttgtactcatggcttcaactgctgtggtgactctgggccagttttctcttccgagctccaagattttatctctgagagctagaggacttcttttggatatcctgtaggtgtctttgactcaacatgttccagatgaaacccttcactctggcaaacctgcttttctctctcttactccttactttatttaaggtactatcttctatccaggcacacaaatgagatatttgggaatcatttgataatcttccttctctttgtccatacaccctaccagaccccaattcaaataaaacagcgatcaaatgctgtataatttcgtttcaaatctgtgtcctttcctttgttttgataacagtagtactttcttagttcagattctgtatctatagtgtcctaattggtttcctcccttccttttcgttactgccagaatgctctttctaaaattaaaatctgattataaaagtagtcactcggaagcccttgcaatgggtttccattgtctttggggtgaatctggtttctttagcatggcatgcaaagctttcatttcctgccattattcttccgaagtagaaagcaccctacattctagccatattaaattgagttgcttaaatgcttcatgtttgctcatgtttctactttgtttcctctgtctgaaacaccctgttcccctcactcttaattctctgtggccctgaggtcccagttcaagcatcatctcctttggaaatccttacctaggccactaggcttcctttttgctttgcttctgtatatctttatctgcattagttgtaccatattatgtgttaggttacttgtttgtctcccttactagattataagctgagagaggaaagagactgagagctcttcatttccatcagtgctctacaaatttggcacagggtagtgaataaaaaactgcttgttgagtatatgaatgattaagaagggtatgtgttcagtggcagtactgggatcaggattcagaactcacattcttgtcttttataaaatatatatattttttatttttttttaagacggagttttgctcttgttacctaggctggagtgcaatggcgcaatctcagctcactgcaacctccacctcccaggttcaagcgattctcctgcctcagcctcccaagtagctgggattacagatgcccaccaccatgctcagctaatttttgtatttttagtagaaatggggtttcaccatgttggccaggatggtctggatctcctgactttgtgatccgcccaccttggcctcccaaagtgctgggattacaggcatgcaacactgtgcccggcgtgcacagtgtatatctttaggtaaaattcttaaatgtgaattgctgtttcaaaaggtatgtgtacttgtaaatttgatggataatttgattcattgctttaatttttttttcttttttaaactccatggaatatttctagtcacattgctgtaattgttaattttgtatatttcaagcatatagacaagtacagaaaatgtatagcagatacatatgtacccactactttttaaacagatgttgacaccctcattgacgttctccctgttaggtgcttttagcacttcctcaacattgtgatgttctcccacagaattttatcttagacgtcacagtaaaaaagttcctcagaattcatacactaccattctggaggtgccaccatacattctatcttggactttctttttaaatatagcctcattgttagcaaaaggcagcttcagaggaaaattccgttatgttatttttggtgtctggaatctgacttttgaaaaatgtttattttgccttcttcctctactcaaaagcaacaaaagaatgctaccagaactttatcacaaaccaagtgacttaaacaaattaaaaaaaaaaaaggcagttggtggcctatgtttctagagacttgtttgatttgctggcagaacagcccaggtgagttgagccagtaagcacttttcttccactaggtttttcagaataaccaaatgtagttctcctaagcaggcactgatctttagctgacttagtggtgcagctgtatcctctgggttttgatggagttgatgagagaaactgttcttgcgggtggtaggaagctgttgacctgacctctgttacacctgactgtttcaatatgcctttgtggaaatcaatttcctacccttccatctctctgctagagatctataaccttgttccagtggaaggtgactcttacctctgatcttttcctaggtcctcagaatgcctggcagtgaggcttttaggttattttgggattttataaactgagaggggaaccttagtctcaggtggggctagaatctgaggtcctataggtacagatttatcctaaaagcaagtgtttttgccttctctctcagttgctcagtgcttcttacctcatttgatctcttagtattacataagcaccttagggaggaaaggactcaaaggagccaaccatttctccttggacccacagccaaaaagaaaaggctcaacgagagtgagcttattcgagggtctgtagcctaaagcatgggctcttttaaagcctcttgttgggccgtgaagcataggtctaatccacgtgaagtaattacccaggcctggggtggccacagggtgagcagagctcttcgtaccctttttgccagacctacacttaatttcctttaaagcctcacttggtcttgccatttcagccctttccttcgaagtatgaagcctgactttttttgtcttcctttcttcagccctgcagaggcagctgtggccctggggacagccctttcttcaaatggcaaactcattttctgtccagcagaccagaaggacaaggtgtaattcaacgcttctctccaccagacactgctgccagggggagacaatgaagaaagtgatctttgttgctccctgaataggtccctgaacctggcacctgcttttgttactggctccttaagtcactggagacatttttgctgtttcctgggttagcagctgctttgggataatagtagcaactggttgtcaggatgtcagttctgcctcaaagaaaatcagtgtatttatatgaggagagttaccttttctgttcttaaatttcttcagggtttgtctgaagagtgagcagttggaagtcagctgtgcccttagtttgatgaccccatgaccctcatctttgaatctgaggagacactgccatttctactatccaagtactaaccaggcctggccctgctcagcttccaaaatcagacgagatcaggcgtgttcagggtggtatggccgtggacgagacactgccatatttttttcgtcctgctctccctctggtgagactctgagttctgggttctagcatgtaggtcagtgcctcctacctggtaagcattcaacagatatatgtgggatgaatgattgaatgaattccttgatcttgctgtccaggttcagtttctctgacactgatacgtgggtgctctatgggagggggacctttgtttttaggagaaagattgcttcaaaggaattatggaaggtgttgatttctagggggctttgggggaactatgggaactctaagatatgattcgttctcgcctcattggtctagatctttctcctcgatagtaactgtctgctgacagacttgccctgtttcaggagcagtatcctgaacctgactcatctgggctctgtccttgagcagggtaagggattttttttttttaacagccatcctgtcactgtagattcagaagccctcaggaccacatctcaggcactgtagtcttggacttcctgatctggctgcattcagtcaagttccactcagctcttaggtgtctgtgcctttgtaagggctgttggagacagaagggctttttttccgctttgtcagcagctggccagagaatgcctattagtctgccagatcctaagtmtttcacgtttccctgtctgtgtctggaacttagggcagaatctcttaccacctgaggttacatctcactatttgcctttgtgggacccattggaggataaaagatgaatagccatgaaaggcatgcagagttattgaactatggttctttgaaatgctgtgactctgaggaaagatccctggtctccaagaatacaactggagccagaccattgcaccaccaccctcctttcccaagagcctctttggaaccatcactcattccatagttccaaacatccttgtttttgtttaatttttatctgataaatgttatgaaacaattttaatggtgaaacccacagaggaaatgacaaactagcatgtgttgtcttttaaatgcacttagttcaagtggttaagtcagttgttcctgttgttagattgctgttgtgtagtcgactttccttctttaggtgggaagagtctctgaatagacttwaaaaaagcaaaaggaaccagctcttctttagctgattgatcattcctttacatctgactcttttcagcacttaaattcagattgtactatgctgattgctttcagatcatgacacagaagaggtcttaaggtcatttcaggagttctttagctgaggtccatgtgatacttctccacttgtaaacaaaagtttgtatgtaggtaaatatgtatatttttatagggaaaagtatccttagttttcatcagattctcactggagtttatgacctaaaaatagttaagacttagtattttatttatttatttaagatggagttttgctcttgttgcccaggctggagtgcaatggcacgatcttggctcactgcaacttccgcctccgggtttcaagcaattctcctgcctcagcctcccaaatagctgggattacaggggtccaccaccgtgcttggctaattgttttgtttttttttttgagatggagtcttgctctgtcgcccaggctggagtgcagtggcgcgatctaggctcactgcaagcttcgcctcccgggttcacaccattctcctgcctcagcctcccaagtatctgggactacaggcgcccgccaccgcacccagctaattttttgtatttttagtagagatggggttttatcgtggtctcgatctcctgacctcgtgatccgccygcctcggcctcccaaagtgctgggattacaggcgtgagccaccgtgcctggcctattttgtatttttagtagagatggggtttcaccatgttggccaggctggtctcgaactcctgacctcaggtgatccacctacctcagcctcccaaagtgctgggattacaggcatgagccaccactcctggcctatgacttagtattttataagaatttgggggcttggcatggtggcttacgccaggcccccagcacttttggaagccaaggtgggatgatcacttgagtccagaagttcgagaccagcctgggcaacatggtgaaacactgtctctacaaaaaatacaaaaattagcgaggcatagtgatgtgtgcctgtagtcccagctacttggggggctgaggtgggagtatcgcttgagcctgggaggtcaaggctatggtgagccaagattgtgccactgcactccagcctgggtgacagaacaagaccctgtctcaaaaacaacaaaaaaagaatttggggctcctgcctcatataactagttagtggcaaagttgagatagactctgaaatcctgggattgactctacaagaatctatatttgtgttttttactatatcctactgtctaatttacggtctttaagcactaaactcctttttaacctgttaatcttgcctatcaagttgcattttgagaaaaatgaaccatgtatttgtgtttctccataactcctaatactcacatctgcacaaagtagtaccttgctggttctgttgactgactagtagcattggaaggcacaaaagcttgggttggttattactttccctttccattatctttttttttttttttcctctaagttggggtcttgctctgtcacccaggctggagtgcagtggcgcaatcacagctcactgtagcctcaacttcctgggctcaagtgatcctcccaccttagcctccccagtagccaggactacagtcatgggacagcacacctagttaacatttttagtttttatagagatgaggtctcactatattgcccaggcaggtctcaaacttctgagctcaagcagtccgcccaccttaccctcccaaagtattgggattacaggtgtgagccaccacacccagcccctttccattatcttagcagctgtcacaattatttagcctgatctttttaggtgggcatactcccttttctctctgtttttacaatgctacttacacagtttctccacctgcatccaatctgtaattgggagttttgcagagcagtgtatttggtatgctgtgaactcttccctaggtcacccaatggcatcttgtgagccaggttgtctgaaaaacttcaaatcttggtggcagtgtggtgggtgtatctcccatatgagggattgttccagggatstgactcaattgacagctcctgaatttctaatatgccaaggcttttgtggtaagatgagcaagaatttttcaagctcagatttggggatcatagcttcttgccatgctatctcattggcatgatgtgtgacttttgggcagattacttaacctctgtctatttactttttctttttttgagacagggcctcactttgtcaccaaggctagagtgcagtggtgtgatcttggctcactgcagcctcaacttcccaggttcaagcgatccttcatcctcagctccccaagtagctgggactgcaggaacgtaccaccacacccagctaattttttggagtttttgtagagacggggttttgccatgttgctcaggctggacttctgtctgttttctcatctgataatgaaaagttgcaattattttcacaagatactttcaaagatgagtcttataatgcagatgagccattttgagttccttacaacaaagatgctgtggaaatttcaggattttccccctttagttataatatgggtagcttatcctaagaacctgtgactattgggatggtcatctttttgaggccagcagtagaaagaaatttgcagtagtgactgacacattaaagcaacyccgaaacaaatcagagtgaaatagtgtcctggagttggggatatgtgggtgatatctgggctgcattttctctctaggtatccatggagagggtcctgtctccctgaatggttgtgctttcaacagttagggaatgagcttgacagtttctgcttcttccctccccttgccttgaactgccttgatatgcagtgcctcctctgttgtgtggctgtattccagtccgtaaacatgactgctgtaaggagagtacagagtattgtttattttgtaaaacttgtctcattgccatgtaatatttgctcaagagctcctgttgtggtgatattcttgtggtgagcatggccctttaaagattttgttctcaaatgttaaatgagcccctgactggtgtcctgaaaagcatttaagcttctctccctagagtttaagcaagaggagcagtaatcccagtggagcctgggctggggtctagagagaaggtggcagatgaggtggcagatgacaggcaggggcggttgtggtcctgtagctcatttgcacaaaggaggggctggcctctcctggggaggtatttccgctcactggaacaaatgagggcgctcaaaaggctgtaatgtaatgaggcttctctggtgacgtcacttgtaaatgtggtcaaagtccagttcttgggggctagtagaagcgggagtagagatcattcggtttgcatgctttcacttctcagctgtcactgtgccatggtgcctactttcagccagtgaaccaactcaactgggccgggcatgaacgcttacaagtatcagaagttcctggagggactcaacaaccttagaggtattacaaggcttcaggctccctaccctttgtccttgctgatcgtgtgagcacttattatggtgtgtrttgtatagggtctgtaaaaccctcctgctctgagctggccctattttttatgcgtttaggcaattaaacagaagggatagagtttgtaaatgcaatcctaagtgagtaggagagaatctccttaggtacttcagcaacagcctgttgtcttgcttgaacggacaagtaagaaatgtcccctgtattcttgagctcagagggctcagggcactccctgttttctttgaggtggccagacagtgtgggtggagggctcttgccatagggccctgcagcctcacctaggtgtagttatgtttcttgggccaggttttccagttgcttgtgtctacagtgagtcagagtcccatttggagagaactggagttgggagtggggaggagggtggagggaggaatgcaggttgatgggctatttgtaagcccattgtaaagtaagcctttgtaaagagtaaaacaatgactttgaaagaggaagctttttattaaagttttaaaggaaatagtgttttctttgcatcatgggcaaattcttcactgaccagacatgagaagaatgtactcagatgtgatgtaggactctttttggatattaaagagaaaaatgaatgaaatctttttactttcccttctctaattaataagtggttttatttccatttgcagaggagggtgcttaaaccatttttctttcatcagtagttaggattctggacccagagcaaccatggggtgtggagagagtgggagggggtagagggaggaaaggagtaaactgggttttttcagggatgaggaaagtggcagacagggtgtgggcaggagatctgtactcccttcttgccagggtatgtagatgttttactttctttcactatctgttgaagaactctggttctaagaaatatatatggagagctttgtatgctataaagggatatacaggtcgggcatggtggctcgcactcgtaatcccaacactttgggaggctgagatgggaggatcgcttgarcccaggagttctagaccagcctgggcaacataatgagacccccatctctacagaaatgttaaaaaattagctgggcatggtgatatgcacctgtacccttaactacttgggaagctgaggtggaaggatcactctgagttcatcttagaggtacagaacccaaataacacagcaaagagccccagagtctggagtgagaagagtgctgctctctggtgctagagaccatgtgaagaagggaagaatacccacatctgactaagcatatgtgtaaatgcaccttcctctctgagacaaagagctgtagtatggggctttagagtgaaggtaatagatcttttctctccacactactactcaccttgaatggagttctgttttctaatctttcattcactattgtttgcttcattcacttatatacactgtataatagtctttatagcataaaacatacaatatatagcagtttctcttrttgacccaaagaaaggatcagatttaaactcttctttgctcctgcaacctgagtctttttcaggtgggagaagttcctggaaagagsacatgtagtttttttggtttagtccttatcattttttggaatrttgctataggtcttagacaactattcccccaattctgggctgccaggcagagagttagatacaaaccattgcctttgtcaaatcctcctgtgggttgagtttcacccactgtgccccctgattaaggtgaatggttacttcccttcttcttttcacttaatatctttgtgtattccagaagggctgatggaaagaggtaattggctcccctcttcatttagttactgactgttgcttttcttggcatggttcagcttgtaaacattcctccatctagtgggtaactgttgaagggaatccagtgggagaatagagacattgtacaagtttttgaagttctgatccccaaattcctatgaatttttggtgttttgatccagaattggggtgcaatattttccactgctcgtgctttttctggagggctttaacttatatttctcaagcctgtcaaaaaccttagttattggggtgatttctggccagatggacctctctcatgggtatgacaggctgaactattggcccgagtcctgatttttggcagagtccagacctgtgccatgactgggataagtaggtaattagggattaattagggaagcagagaggtaggtgaagtagagtggtgagaaagtggttcactagcctttactaagaaaaatttatgataggactatgagataactgacttttaaaacagaaatataatggccaggtgcagtgtctcatgactgtaatcccagtgctttgggaagctgaggcaggaggatcagttgaggctaggagtttgagaccatcctgggcaacagtagcaaaaccctgtctctaaaaacaagcaaacaaacraaaaaacaatacaaaaactagccggtggctgggcacggtggctcacacctgtaatcctagcacttcaggaggctgaggcgggcggatcacaacgtcaggagtttgagaccaggctggccaatatgatgaaactccgtctctactaaaaatacaaaaaaattagccaggcgtggtggcgggcgcctgtagtcccagctactcaggaggctgaggcaggagaatggtgtgaacccgggaggcagagcttgcagtgagcagagatcgtgccactgcactccagcttgggcgacagagcgagactctgtctcaaattaattaattaataataaaataaattaaaaaaaaaaaactagccgggcatgatggtgtgcgcctatagtttcagtttcagctactcaggaggctgaggtgggaggattacttcagctgggggtttcaaggctggagtgagctatgatcatgccactgcactacagcctgggtgacagagtacaccctgtctctctgtcttttttttttgcaatctccgcctcccgggttcaagcaattcttrtacctcagcctcctgagtagctgagattacaggcatgagccactgtgcctggctaattttttgtatttttagtagagatggggtttcgccatgttggccaggctggtctcaaactcctgacctcaagtgatctgcccgccttggcttcccaaagtgctgggattacaggcgtgagccactgtgctcggcctctgtcgcttaagtaaatagatagattaaaaacaaaaaagaagtataccccaacatacctatgtaattttacccttctcttcctttgcatatactgtcttatttcctctgcctggaatcccattatttttttctctttgtaccaaatttctgctcatctttcaatgcctagctcaagtctcactttccttccgtaagttttgtttttgtttttgtattcccagtagaattattctctctccctcatctatgttgccatggcactttaaacatacttgttttagagcatatcacattatgttttagttattttattaaacatttgattttcctgctagtctttactgcttggtcaagttttctataactttcataggcttcagttttttcatttgtaagaaaggggatgatagaatttactttacaagatgttgtgggkattaaatgagatagtgaatataacatctgatgcagactaggagcctgatagatgttagcgatactgtttctaaaggcgggaactgtgtctcatttatccttgagtctcctttacctagcatagtgcctggcacatagtaagcataaaaagagtatttgggggaattgaattgaactaaactcatatatttaaatgtccttcagtagtcaccataggaggttaaaaaaatattctaacaatggtgcctatgctgcatacttttatttaagcatgctttttgtgggttttctcttcagtgccaggttatgaccctcataagaaactccatagtcgccgggcatggtggctcacgcctgtaatcccagcactttgggacgccgaggctggcggatcacgaggtcaggagatccaggccatcctggccaacatggtgaaaccccatctttactaaaaatacaaaaattagccgagtgtggtggtgcrtgcctgtagtcccagctcctcaggaggctaaggcaggagaatcgcttgaatccaagaggcggaggctgcagtgagctgagatcataggtgagcctgggtgacagagcaagactgtctcaaaaaaaaaaaaaaaaaaawgaaaagaaaagaaaaaaagaaactccatagtcattttatagtcatacctaatttttggtcaaaagatgatattacccaagacaaaattaaacccaatctcaaagaatgaaaatgcactactattgaaaacattggaaagatggtactactagtctgtaggtagttccagatgaggggttccaggtattttgaacagcaacagtattgttgaataagtggaaaaagtgactactgagaaagaacatggtcctttttggttctcttagttctgatacatttgtcagatcatgtttctcattatcttagagctttacttgggacatccacttagtctgccttctgagaagcctgtcccctgttaccacatacagtcaagcaggacaagctttcacaccccaacatacaccctcagagagtgaattctttttttaagggggtgcttttttcccctcttcaacttggcttggaaaaaagacttttttgactttttttctgatgttaaatgatggactacattgtccttatagaaagcagggaaaaataaactaataaaatcaccgaaatcctacaaattactaggctcatattttgctgtatttctgtcatcttttctctatccatgtgtatataatgttgcttttatatatatctgttgttgtagttctctgtcttgctctttattattttgtgagcattctttatacctttatctacatcatgattttttacagttttatggaattccatcaaatggaaggttcatttatttaacatactccagtagcggggcatgtacattgctaatttttcactgctatgataacgaacatccttgtaaataaatttttctgtgcatttctgattttttttaaggatggatttccacaagtggaatcactgggtcttaatacatatattcaaagctctggatgttggcttttaattttatttcacttttaaaggctactgagggtaacaagaggctatctgtaacactgaatacctctctgatagctcttggccccttgtcctctagggatggccctgtcttcaggcttagtggccagttggctcagatgttttattatccagttaatttcatggtagaacaggggccaagtggccttctcacttagtcagcagctcccatcatgtcatcatcatatcactgcactgctttactctgaagcttttctcacagcaactctaggcatttaaatagcttcattgatccttccaaccctagtacccttttctcttgtagtggtaagggacccattaatgttgattgggaaactgcagtagcaagaatgaccatcaatattgtacaggaatcccacattggaaccctggattggtaccagattgagattctctttgttttcttgctgttactgagctagcaccgaggtaataaattgggccagcttaatttgataaaataggttgacaaactttactgtgtcaacacacccctgctttggtagatttctgcctctggaagaactagaactggtgctgtgttttaaatcaatgtattacagccaagtgcaaatcagcttctgttatgtgggactgatagccttagagtagaattatagacttgatgagagtacatccttgtttctgacttggagtggacatcctggagcagataacgtgaggttttgtagctgatgatagactggggatatttggaggttagctggagaactgaaagaaggcacatgtgtaggactttgtgtgtagggggccaataagaaagtctctgcagcagttaggatagtggaaaatggcttgagtcactgacaggcttgcgtcctgcatccttcatagtgagaactgtgtgcctttcccattcccagagcccttaagcaaagctgtcataaaagggcgattctctccactgcagggaatctggaagtctgcatgcttctggggtgaggcctgtcaacaccttttacagcactaggcacctagtagaccatgtgcttatttggatagttgatagttttgtcctgttaaagttttttctctccttaattgtatactttttaggcttactgcatgtcactgggctagagagggtcatcagcacaaactcactttggggttggtttcagttgctgctgtttttgcaatgtgtattttttttgttacaactggagatggttgttatacgatccctatttctcaaagagtgagcctgtatagctaacaagcatacaataccattttcccctcatccttgattttgttttcttrtcatgtaggcattagtattgaaaggttaaggccttcatcctcactatgctgctgtggtttctattggttgttggagaaaccccaggctgataatactacttttatgttgattactcattgtaacaactgtggggatggtactttcaatgaataccagttgttaaatagcatcttttgctcattgtggaatggcaggaaccttttggacttcttggtttgaaatcctttgatttggaagatcacttttttacaatctgttatcaacttaattgcctcactccctgatcatgttccatgtttcctgttgcatttactggaagtctccatctccttccttcctttcattgagaactttctgacaggatacaaagattattgatagtccctgtctttgagggattatcagccccatatagtttagtggggagactgtagagggcactagattttttttttttttttgagatggagtcttgctctgtcacccaggctggggtgcaatggcatatctctgctcactgcaacctctgcctcccaggttcaagtgattctcctgcgtcagcctcccgagtagctgggattataggcgtgtgccaccatgctggtctaatttttgtattttcagtagagatggggtttcaccgtgttccccaggctgatcttgaattcctgacctcaggtgatctgcccaccttggcatcccaaagtgctgggattacaggtgtgagccaccatgccctactggcactagatatttatttatttatttaaccatgccctgccagcactagatatttatttatttatttatttattyattcattcattcattcattcgagatggaatttcgctcttattgcccaggctggagtgcagtggtgcgatcttggctcactgcaacctccgcctcctgggttcaagcgattctcctgcctcagcctcctgagtagctgggatttgcccactaccacacctggctgattttttgtatttttagtagagacggggtttcaccatgttgcccaggctagtctcaaactcctgacctcaggtgacccatctgccttggcctcccagagtgctgggattacaggcgtgagctgtgcctggccagcactagatatttttaagacagaggaatgacataaacaactagggtgggtattttttgaggggtggggtggggagagataactggcagcagtgtgaaagatcatttatagggatcatttacagggaagtggggatatagctaagccagtaagtatgtacctgattttagtttgtttaggatgcaaagaggtgagagaagtaaagagcagggatgttaaatctttctttttgatggagtttcgctcttgtcacccaggctgcagtgcaatggcacaatctcggctcactgcaacctccgtgtcctgggctcaagtgattctcctgcctcagcctcccgagtagctgggattacaggcgcctgccaccacgcccagctaatttttgtatttttagtagagacagggtcttgccatgttggccaggcttgtcttgaactcctgaccttgggtgatccacccacctcggcctcccaaagtgctgggattacaggcttgagccaccgcacacagccagggatgtgaaatctttctaaaagagaatttgggctgggtgtggtggctcatggctgtaatccagcactttgggaggctgaggcgggtggatcacctgaggagttcaagaccagcctggtccaacatggtgaaaccccatctctactaaaaatacaaaaattagaccgggcgcggtggctcatgcctgtaatcccagcactttgggaggccgaggtgagcggatcacctgaagtcaggagttcaagaccagcctgaccaacatggagaaaacttgtctctactaaaaatacaaaattagctgggcgtggtggtgcatgcctgtaatcccagctactcaggagcctgaggcaggagaatcgcttgaacctgggaggcagaggttgtggtgagccaagatcatgccattgcactccagcctgggcaacaagagtgaaactctgtctcaaaaaagaaaaaaaaaaattagctgggtgtggtgacaggcacctataatctcagctattcaggaggctgaggtaagagaatcgcttgagccaaggctttggaggttgcagtgagctgagatygcgttactgcactccagcctgggcaacagggcgagactccgtctcaaaaaaaaaaaaaaagagagagagaatttggtttttaaaaatattttatgttgaatgttagctggaactggagatccactttacccccacagctcaagttcagcttgacccttatgttgtgcaatgctttgtgtttgggttggtatttcctgggactggtcaggtgatgcacttcagcatgaggcctgtgtagtagctgaagagtagtgacccaaggtgtctatcagtgataagaggagagaagaagcccgtttagctctggacagggcctctgtttcctctgagatctcttgtctactctccctggtccagggctccatctttgcatamctttttacagatagatttgaagtgccaacttcattctgttttggagtactggcattggacacaattgattacatccctgcctgtttaaaatattctcttcttttaccttcaatgagagtatttcatggttttccttaacctatctgattgctgtttgtctgctttgttgggtctttttcttcttctgactcttaactgtggcagttttctaaggggtaaggcagtgtagtgaagtgggaagaacatgggytttggatccaggcagggctgggttcaaatatatgttttttgtgtgtgtgcgtgtgtgtggagaacggtctcgctatattgcccaggcaggtctcgaactcctgggctcaaactatcttcccgcctctgcagagctccctgagagctgggattacaggcgtgagccactgcgcctggctcaaatctgtgtttctacatttatcagctgagtgacctggggcaagttactcacttttcctgagcctcagttttttcatctgtaaaatggggataataatatcttccatataaaattatgaggattaaacagagtagtataagtaaattttcttattgcctgattgatyggttgatcgtagagatgggggtctctgtgtgttgtacaggctggtctgaaactcctgggctcaagtgatccatccccttggcctcctaaagtgctgggattacaggtgtgagccactgtgcccagcccaaactcagtattttcaaaccaagcttaaatttggcttttctatcctagtccccattttttgacagttgaaytcacattcttccagtctctgagattagaaaccttgcagacatctgttaactcttttctcttcatcaaccccattttcaatctgtcattgagttcttttgttcttcagagtttctcttaaatttgtctttttctccccattctctattccatgactctagtccagtcacttatcactttgtacctgaattacagcaaccgcctcatattttgttttctgtgtcctgtttctctcttcagttaacaccgaagtagcagctactttcctagtatttcctattactgaaagtctaaatttgttacaaagaccttttatggctggacctggtggcccatgcctgtaatcccagcacttttggaggctgaggcagaaggattgcttgaggtcaggagtctgagaccaggctaggcaacatagggaaactgtgtctctacaagaaaaaaacatttttttttaagtagccagacctggtggtgtgtgcctgtagtcccagctactcaggaggatgaagtgggaggattgcttgaagcccaggaggtccaggctgcagtgagccatgaccctgtcactgcactgtagcttggggacagagcaagaccctgtctcaaaaaaaaaaaaaaaaagacattttatgctctcatccccttcctacttaaccaggcttatctcacttattttcctagaacacaccttcagttccacacaaaccctgttcctcattgtgtcttatcctccctcattcattctctctccttgccctttctttctttctttcttttttttttttttttgagactggagtctcgctctgttgcccaggctggagtgcagtgacgtgatctcggctcactgcaagctccacctcccaggttcacgccattctcctgcctcagcctcccgagtagctgggactacaggcacctgccaccatgcccagctaatttttttttttttgtattttttagtagagatggggtttcaccttgttagccaggatgktctcgatctcctgaccttgtgatccgcccgcctctgcctcccaaagtgctgagattacaggcgtgagccaccgtgcccagcctctccttrccctttagttctctttacctggaatgcccttgttctttatacttaactgaaatctgtctattccttcaagtttcacttcaggtctttcttctgatgaagacttctctgattatcgtagtccaagttgatgtatcactttcccaagctagttttatctrtctattgaaatggtaagcttttttgagagaactgttttatagacatttctattattcccacggtgcctcgctcatgcctagmcaagtttaaatgctccttacagagcacttataaaatgtggtgaccaaagccaatcactctttcattcgacaaatgtgtatgagcacctaccatgtgtgctgtgctctgcactgggatcccagcaataaacaacacagaaacaagacaggttatactgtagagaaggagacactagacaaatatttgttggtcaacagaatttgtggaagccaggcaggactctaagtgaggacaaatgacaagaagagggagaatttagaaaataagatatcagtgaaacgactattataggaaaaaggtgtttaatggattcattcagcaggtaatttattgaatatccactgatacaaatgtattcccaggtattagggatataycagtaaataaagcaaagtcctttcccttgtaragcttatattctatcatttagaggcatttttgaaaagcaaagcacctaatattggatgaagcccatctgtgggaggacagcagtgaaggagttaaaatgcttctagggctccaggctttgttgaaacagatggtttctttgcactagggaatgtttttaagagggattagaggactgggctgaggaaggcctgagacctctttccctcacgccatagcacacacacctgctgttctggcgcctggtagctatgtaacttgtcccccacttggtaggcacttgtttgcaggcttgtgattgtgactgtagggctggctctaagcttctgacatttttattttcctttcgtgatttttatttgtggtccaacagcaatgaagtcccatttgaatttaacagacgttgggacttgtctgcgttcctttctggtccatatttacttttacataattgtaatctttctgtttgtgtgtgtgtgtgtgtgtgtgtgtgtgtgtgtgtgtgtatttttctcccgatccagttttattgtggtaaaatacacatgacaaaaaattgatcattgtaagtactttaaagtgtacagttcattgacattaagtacattcacaatattgtacaaacaccatgactattgaattgcagaactttttcatgatcccaaatggaaatcccatatccattaagcagtaattccccttctccccaacccctggcaaccactaatcagctttgtgacttgcctgccctggatttgctcattctggatattttatataaatttagtcatgtggccttttgtctctggcttctttcacttagcatatgcacatatttacatgccttttccatgtaacattataaggattttttaagtgtttcgttacagacattatagttttcttttttggacacagtctcgctctgtcgcccaagctggagtgcagtggtgctatcgcggctcactgcaacctctgcctctcgggttcacgccattctcctgcctcagcttcccgagtagctgggactacaggcacccgccaccacgcccggctaatttttttgtatttttagtagagacggggtttcaccatgttagctaggatggtctcgatctcctgacctcgtgatccgcccgcctcagcctctcaaagtgctgggattataggcgtgagccaccacgcccggcccagacattataattttaagttatcttgttgataatggcttcatttagccattcatttattgttgaatatttggattgtttcaagttgctattattttttaaaatgctacggtggaaacctccctgagtgtgctctgccatctttcaggggactctgaatgttgcacatcagctgcagaagagccattgtgcttgatttaggatagtgtggactgttatccagctctgtgggaggacagtcaagtaatgaattttatatagaagggagcattattctttgcaaaataagaccatgttatccagggagtggcagggaaaagttttttttccccactgcctagaattctctgataatccctctatccctttggctgtaggaaagaattgattatagcagttgaagatgaaatgttttattcatttattcattcaacaaatatttgagagcctactatatgccagacatttgaaacttgctcatgggttgagcttggctaaacagtgcctttcactccctgggcctttcatacctgcctgggaacaagaataggacctacttccagagtaatcagagaggatccagaggtcagagccatgtggggccttattacctcatggtttaactcctcaagatttggtaccattatagatactaatcacacattaatttgtctgctcactctggggatttcaaggccaggctgccacttttcatacgtggctgttcttgttcaccactctaacagagtcctggctgctaggagatgagccatcaggcctgtgccctcttagtagttttgttcactatatcctgggcaaggcagcaaggagaaggtgcttactgactgagtataaaagcttcagagactttattatagtaacgttactgtgttcatgcaaggggtgaggttggcatgtcacagattctgagttagcccagatatacttgggttagtgctgctggggccttcttgccttctggcagacagccctcctcccttttttgtccttgctgacccatttaacagaatacttttaatttctctctaccttgctaggaaaataaagaccacttaggaccattcagggccacacactgcttacaaaacccagtgtggagtagaaaaagcactggaggccgggcgcggtggctytgcctataatcccagcactttgggaggccgaagcgggtggatcacarggtcaggagatcgagagcatcctggccaacatggtgaaatcccgtctctactaaaatgcaaaaaattaactggatgtggtggcgcatgcctgtagtcccagctattcgggaggctgaggcaggggaatcacttgaacctgggaggcggaggttgcggtgaccagagattgcaccactgaactccagcctggtgatggagccagactccatctcaaaaaaaaaaaaaaaagaaagaaagaaagaaagaaaaagcactggaaacaattgctagatcttaaacattcacttaggaaatgccaaacctgtagatttggagtaagaagcagagaggctagtgagagagttcagggtttaggcctgatttctatcctcttccacctaccacttgttgcatttccttcactgtcagaatttgattgttctgtgtctgtatcttcagatgtgtttttcctagtgtatttgaaaaactgttgaacagtcccctctgggcagggagggaagagggttagacaatcaggagtagagactctgttatttctctctccagacctagaccctggagttaactgaaggtccagagttactgaggggcggctgtgtttgtttttcagtaggctggctttactgagtgggatacaagagcccaaagcacaggccattcccagaagcctaacattttcatatttctttctctgccaaagaatctttggttagggttaagaataactagtctgtctgtggaaataccaaggccttttgtttgccagaagaaaagcgcttttgattaaggctgccttttctctctctcttttttttttcttaagctgttgtgggaagacttcagagcctctgaaggtgcygtatttaaggggtgtaggggaaggaatgatagctaaatagaactaagggagacttaatcgtgctttaccgcacatttgtgcagagattaamaacagcaacaaaatctacccagtttttggtcattgcttctactagcctttctttcttcctgtcttttatgaaatctacccaaaacagtagttcccaaaggacctgctgtactgatctgaccttgaatcatactctatcacttagtgtgatttggggcatgttacttaacttttctctttaggctagagttttgcaactataaaatggggattatagtagaccattttcatagggttataatgagaattgaatgagttaatatgtggaaaatacttaggacagtgcctggcacatagtaagagcttatcccagtaaatattactgctactgtgtatggcaaatgctgagtgtagctttattttttcgattagtaattccaaatgtggctttctagggttagcaaagtcagggctttttttttatagaatgaaaaggaagcagacattcccattaggcattaactttttatcagtcagaggcaaagggaaagatttattctctgtgtggacgcatcatagaggctcagtgtcttcttagttgaatgtcaacaagggaatcaatttcatcatgaagaactactctttggcaaaagcaagggcgagggttgggttgtgtactttcgtagtctttgtctgagagtagtgatgtttcttgtgccccaggaaagcttgaaccaaggtatagagaaagggcccctgatcctccaaatttacagtagtaagagaagcaagaaatatcttagtaggaaaaggggaaaccctcagggctgggtctcgtcccagtgactctactaccaggtctggagaatgtcactagtggaggctctgggcaagtgcctggccactgcatttccctggccatagtaagagatgtgcagaatgacctgccctaagtctctgggctgtttgttttataaactgctaccttcttccccaaattgctgggagtggctaaggaagtggcacagaaatttagatttttgtgtctttcttgcccttttctgtattgtctttagtttttagaaggactttcttggctgccttctccctcccccaccttgctccatcctctcttgcaaagtaaaatctcatcttcctgcaggaggttaggttgtaaagtttacacataaagtgaggattccaaataatcaaaattatcatggaaaatatctcaaatgacccagaaattaaagtatataaacatggttttgtgtatatgccagaacaaagttggaataccatatgaaatagttggcctgtaattaggagacattttatatgaaaaaataagtattctcaaaaactagaatcatgtacagcattcagaatgctcacaatgtgaagaggcacaccggacttagacatgctaaagtctcagattcaagtcctctcatctcatgctcatgttcatcctggtaaataacttcactttggtgtaaaacctcattgagtggaattgtgagcaaacttttgtactgtttatttttctcttcctggtcaagtttgcatagttaaatgcaagtatgttgtgattgtattttatccttcttttctgctttctgtttttctaatttcttcttcccttttaaaaatcctcactgccgggggcagtggctcacacctataatcccagcactttgggaggctgaggcaggcgaatcacttgaggccaggagtttgaaaccagcctggccaacgtggtgaaagcctctctctactaaaaatacaaaaattagccgggtgtggccaggtgcagtggctcacgcctgtaatcccagcactttgggaggccaaggagggtggatcacaaggtcaggagatcaagaccatcctggctaacatggtgaaaccctgtctctactaaaaatacaaaaaaaaaaaaaaaaaattagccaggtgtggtgacgggcacctgtagtcccagctactcgggaggctgaggcaggagaatgtcatgaacccgggaggcggagcttgcagtgagctgagattgcgccactgtactccagcctgggcgacagagcgagactccttctcaaaaaaaaaaaaaaaaaaaaaaaaaaaaaaaaaaagccaggtgtggtggcaggcgcctgtaatcccagctactcaggagggaggctagtgcaggagaatcacttgaacccgggagacccaggttgcagtgagccgagatcacacctctgcactccagtctgagtggcagagtgagactctgtctccaaaaaaaaaaaaaaattctcactttcttcttctaaatccattttatagcacacaacaattcttctcttacccagaatgcttatttgtgtgttagcttgtcccatttcttagtcattttcgttattcaaaattatttaaaggagaattgagagtaggaagggaagacttctaatagtcctcttcgtttaaattctgtaatcatagcttccactctcctccttttaggtcctctaacttttgattcttataccttgcatatgaggctctttccttctttttccccccattttagtcatttttctgtagaaaatttctgcttatgcttggggagctagatatgaattcttgttatacttactaagcatcactggttctatctctagatgtttaatagtcaggtttttagatcaataggtttttagatcaatcccaaattcatagtgtcatgaaaagatagatgaggaactgagcccacctggagaagtcaaaggatacttgggccaagtgatataactagttattgacaagcttaaaccatgacccagggttctgatgtacagttgaatgcctttcctccaaatcacattgcttgctgttgaagccttggctaggagtaatctttagtaagatccttgaattgtgactttttttcttttgtttaattttattacagttccttcctttaacaaaaatgctaagtaatataagctttaagagggttaaaattagtccggtttcaaagatatatttgagaattatgtagtatctcttgagatagtctagagatcttagagctacgttggggcctaaggactgagaatcgctgtcatcagactagaggtttgagaaaaggagatttttatttatttatttttgagacctagtttcgctcttgttgcccaggctggagtgcaatggcgcaatcttggttcgccacaacccccgcctcccaggttcaagcgattctcctgcctcagcctcctgagtagcatgtgccaccacgcccagctaattttgtatttttagtagagacggagtttctccgtgttggtcaggccggtttcaaactcctgacctcatgtgatccacccgcctcggcctcccaaagtgctggcattacaggcgtgagccacctttcccggcctaactactgtttctatagaaggagttttccagattgatgcctaatgtacaaataactgcatcatcagtccctggctgtcatcattttgctgtgcaaaaagggaacatcagagaggggtccaggagccactccacatatcattcgtaaatgttattgctaatggagagagggatgatggtgggggcaggcgtatttgtgttcatagaggaaggtaggactgtaatctccatgcctagtttctgattggcattgataatataaccatctttcagagagtcagctccaagaggtaactgggaaacatctcagttttgctccgggcactatttcctttgccatctataccagaagctgtggtgaatgggaaagcyattgctttctgaagtgcccttaggcctttctcagtgactcttaagttttaagaatcatttgggtgagcataatgctgaaatcctgtagctatgaaagctgcactgccatggcaataaaactccccattgaataagtaaaatggcaatttccaggaatctgggtggtagttatttcaatcaagttgagaaatgggatcaccgagagggggatttccgcagaatctgggctgtcagggaaatctttaggytgtcagggaaatctttattccccattgtcttctccttacaaattccaggagaggagtatgaggttatatttgtgtcctcagtaagcccataaaggtcagccagtgtgctaccttacattgtaattttccttttcaacattctttttttttttttttttggttaaattttactttaagttctgggatacatgtgcagaatgtgcaggtttgttacataggtatacatgtgccatggtggttttcattcgtttatgtactgaacataatcttagtacctcacagacagtgcacatgtactaacacctttcctgaaaccttaaaatataagaaatatagaaatacaggtagtttgtaartctttgctcttggggaagccaattttggatttcctttgtctttttgtcctatcatactccttgaaaggggtagtaaaagcatttttctctttttccytctctgtagttcaccccagtggggcacatagttgctggattcagcaacgttctttcccaaatgattcttaaggcatgcgggtcactgaggtttatttttaaatccataacccagggttcagcagttgtccttactgaattcccgtgtggaggctttcagctgcccagacacccccacgtctttactgggcacattccagcagtcctaaagtcctgaccctcaggagtgaaattctggtctggtgtctcactcctggaattccttcatgaggcatggctatggcatgaatcaggtgtcagattggaaagccaagagatcaggtggcttgtgatcataatataaaaaatttctaactggtaaaatggttttggagacttaatgcgtattgaaagtttctttctgctttattgtcagccttagccgcctcttgatggtctctttagttcctttcctggattgtctaggagcatgctggaggcagtcagaacataaggagttaaattgcagtgaacttatggagaatgattaaacagtgattaagtgatattttaacttctgtttacaggggagaaatggatgtcatcaggaaaagggtttgtttgcagttttgactgaagtcatcttatcttagccagggctgcctgcccttattcaatttcatttttagctgcaaggtgaactcccccacacacttattttctgatgtccatctttgtctttgctcatattccaccccttcctttctttccccagaccccgtgttgctctaggaaaacttgctccactcagaacagagttggggtgggacttagctgcccttctgcatcttctgtttctggaagtctttgggatgaaccatacatgggagagtcaggatactggaatgccattgaactagtggaaaaagcactagataggcaattgaagaggcctgggtttgaattccagctctgctacttattagctatgtgatcttggacaaattacttaatctctgtaagtcttagtttcctgttctgtaaaatggaggtgataatttctacctgaaagaataggaattagagaggattagagttatatatgtaaagagcattgcctgacacacacacagtaggcattcaattatgtgtgatcaaagaggtcagagttgatggtagaatttagactgtctcggttagccttttgcctgtttttcccagtgctaattgtatagtttatatattatagtttaaagttatgctgccaggcgcggtggctcatgtctgtaatcccagccctttgggaggccgaggcaggtggatcacttgaggtcaggagttcgagaccagcctggccaacatggtgaaaccccgtctctactaaaaatacaaaaattagccaggtgtggtggcacacacttgtaatcccagctactcacgaggctgaggcaggagaatcacttgaacctgggaggtggaggttacagtgagctgagatcacaccactgcacttctgcttgggtgacagagcaagactctgtttcaaaaatgaaattttaaaaaaatgaagttatgctctcctttgcttttattacagtctagtaaggagcttggagggcttttagacccccataatctccatcaccctcctcaaagctgctctaaataaacaaatttaagtaaaaagtatttgttatataaatgcaggatgaagacttattatgatggcttttcctctttcaaccagattgcaagatacaagcctatttttaataaaatttctggttccctactctggtactaatgcaaagatttatttttcttagggatgagttgtggccaattgatataaaaggagatataggccaggcatggtggctcgtatctgtaatcccagcactttgggaggctgaggcaggtggatcacttggggtcaggagttcaaggccagcctggccaacatggtgaaaccccatctctactaaaaatacaaaaattagcagggcgtggtggctcatgcctgtaattccagctaccggggaggctgagacaggagaatcgcttgaatctgggaggcagaggtttcagtgagccgagattgcgccactagactccagcctgggcaacagagcgatactccacctcacacgcacacacacaaagaagatgtactttcttcttttgatacttttttacatatttgacgcatttgtgatagagaaatggattatgattattctatccttcttccttttactaaggtagaatgagccaaggtcagtggggcctgacggatctcagggcctttgctgttcctctcatccctggctatggttggctaagtctctttttcttaggtctcagggtgttcagctgttttgggaacttgttgaaaattgttgytttgcagtacaaaagacactctgttactttttaatcaatatctttttttttgagacagggtctggctctgttgcccaggctcgactacagtagcccatctctgttcactgcagcctctgcctcccgggttcaagtgattcttgtgccacagcctcctgagcagctgggactacaggcgcgtgctaccatgcccagctaatatttttgtatttttagtagagatgggattttgccaygttgtccaggctggcttcgaactcctggcctcaagcggtacacccgccttggccttccaaagtgctgggattataggcgtgagccactgcgctgggccagtaatcagtatctttttagcatattacttattttggggggatcctccaaatcaggggtctccagtgtgctaaatatttgatagagcatagggaaatttgagtattttagtttccgagtattagtaaagagtggctcacattgccttttactttatacrttcatgcattggaagacttaatattgttaagatggcagcactccccaaactgatctatagattcaatgcaatccctgtcagaatcccagtggggttttttcttcttctttcttctcctcctcctcctcttcctcttattcttygtcttcctcttcctcctcctcctcttcttccagaaattggcaagctgctcctgaaattcatgtgaaaatgcaagggacccagaatagtcaaaacaatcttgaaaaagaacaaaattggaggactcacacttccagatttgaaaacttactacaaagctacagtaattaagacaggatggtactggcatagggatagacatatagatcaatggaatagaattgagagtctaaaaataaacccttacatttatggtaaattgatttgtgataaaggtgccaagacaattcaatgtagaaagaattgtcttttcaacaaattatactgggacaactggatatccatatacaaaagaatgaaattggccaggcgttgtggctcacgcccataatcccagcactttagcaggcagaggtaggtggatcacgagatcaggagttcgagaccagcctggccaacattgtgaaaccccatttctactaaaaatacaaaaattagctggatgtggtggcgggcrcctgtaatcccagctactcgggaggctgaggcaggagaatcgcttgaacccgggaggcagaggttgcagtgagctgagatgaygccattgcactccagcctgggcaacagagcaagactccaccttaaaaaaaaaaaaaaaaagaatttaaaccctgacctcacacaacatataaaacttaactcaaagtggaacatagacctacatataagagctaaaattacaaaactattagaagaaaacttaggggtaaatctttgtgaccttggattaggtagtggtttcttgtagctaacactgaaagtatacacaaaaaagaaaaaaatagagaaattatacttgatcaaaatgtaaaacctttgtgcttcaaaggacactacctagaaatgaagacacctcacagaatgggagaaaatatttgcaaatcatatatctaataagggacttatatccaaaatatataaagaattctttgaactcaacagtaaaaagaaaacccaataaaaaaatgggcaaaggatttatatagccatttcttcaaagaagatatacaaatggctaataagcacatgaaaagatgcttagatgcttaacatcattagttattatggaaatgctaatcaagatcacaatgagataccacttcatacccactagaatggctttaataaaaaagagagtgaggatgtggagaaattggaacacccccaacattgctggtgggaatataaaatggtgcacctgctttagaaaacagtttggtggttcttcaaaaagtagagttgccacatgacccagcaattccaaagtatatatccaaaagaaatattatattcatagaatatagaaaacatatattcatagaaaactcgtacataaatgttcatagcagcattattcatagtagccccaaagcagaaacagctgaaacatctatcaactgatgaatggataaacacactgtggcatatccatacaacagaatattatttgtcagtgaaaaggaatgaagtactgattgatgctaacatggatcaaccttgagaacattagactaagtgaaagaagccagacacaaaaggcttgtatgattccatttataccatttatacataataggcaaatccatagagaccataagtagattagtggttgctaggggttgaggaggggcgaatgggaagtgactgctaattgatatagggtttcttcagggggtgatggaatgttctaaagttagataatggtgatggttgaacaactctgtgaacatactgatacttaaatatccattgaattgtttacctaaaaagggtgaatttatgttaaccaaatctcagtgaagctgttataaaaatattaggctgatttgtaggtatgaatagtatttgtctgtttgtattgggccccttattgctgccactgagaatcttgaagttgtcttgaatattttgcttcagaactgtcactgtcttgagcaggcaagttactgttgccccaaatcttcaaggtgagaaacaggtttgcaatcatttttttgcaggagaatacatgatggcactttatatcaggaagcgaacttttaaggtgagcactctgaagttgaagcatttccaagttttaagtgggactgtgccctaccttagttcttacttcatcctttaaactgtgtgtcacactggagtaggcagtttcccagccccatacccagctccaccaagatcctcacttctttcatcatttgcccatttttccccaggctatgtttgatcttgctctgaggccttctttcttgggaggtatagcgagagtagctgcagaaacctctgggtggcaccctgcccccacaggattaccaaagaatgacatgtgtggaagaggctcaggcctgtgttggcaggaagaagtgactcatttttcatcaaaggaatttcaaagaacatataatgacaggatgatgtcacaggagcaggtggagacaggaaccttgattgagctgctggaagatattaaatggtgtggctgcctgggcagtcagaatgattgaccagcataaatcacaggaaacatcrcctgttttttagttcctatttcatgagcsctggtgtgggcagtgctgttcatgtgccctcagagcatatggttgagtctatgcatgtcttgggtatactgtgtttgtatctgggtgagatggctcacaacatcctgtgctagtcatggacttctttttcatgcagggcggcgtgtgtgggttcctgcactgtgtgcctcagttctatagctagcagggtctgtgtcttggaaatgagcctcacatggtcatactggctggtttgaaggcatgacatttcctctgacatatttagagaggggaacttgccttgacatcagaaggtcagatctcagaattttttaccttattgccaaaagtaccctagttccatctagtattttggcaagagctagatctttgctcaaagcccagttaagtcttgtggtggtggtgtttttcttctttgagtagagggccctccaatggtgttgtatggttgaagctgataaggtgaggcggagtgtggtggcgggatggagagtttcagtcaggataagtcttagtatcttttcatatcgcaaagcagtaaagttggttaggttattcaggctgttatttatattaagattgtgaaagagtgctcctggtcatcatcatgcacctaccagagtctgtgtgattatgaggttggaggctaaattagccatttacacaaagataaaagagaggctagcattgataatattctgcctcaggtttcaggcctctcaaggaaggtcttaggagagatggcttagcaatatcaattgctgcctttgtgcttataactcgttcatctgaagatggcctggaaaaagggacttttaggctgcataggacaccaccaaaaaagtagaagatactacctctctttaagatgtatcagggctggtgctgggcgtggtggcacacgcctgtaatcccagcactttgggaggccgaggcaggtggatcacgaggtcaggagatcgagaccatcctggctaacacggtgaaaccccatctctactaaaaatacaaaaaaattagctgggcgtggtggcgggtgcctgtagtcccagctacacgggaggctgaggcaggagaatggcatgtacctgggwggtggagcttgcagtgagccgacatggcaccactgcactccagcctgggcgacagagcgagactccgtctcaaaaaaaaaaaaacaaaaaaggaaaaagaaaagaaaaagatatatcagaagagctgggcatggtagctcacacctgtagttctagctactcgggaggctaaggcaggaggattgcttgagcccaggagttcaaggctatagaatagtgccatgattgtgcctgtgtagtcactgtactccagcctggacagcatagaggcccagtttctttaaaaaaaaaaattttttttttaaataaacccaagatatatcagaagcaagaaggaaaagttaaaaaacaacaactataatttgaaagggaggaaggaaagctttatttatttcttgacacagtctttaattgttacgttcttctggctgatcatgagttttgtttttagacaatattactaggtacactgtaggatgtaaacagatctttggagtaggataagaaggaaatgagtcagataacttacttcttagagaagggtgctggactttccgggggcttagttagcaatattcctcctccctgctagcagccatctccctgtatctcttcatgaaataacaaatcattagaagagatttttaacctgaagtgctgaaggacccagggaagaaagttccctagggtgtatttgatttgggagccccctgagggtaatctgtggtgatgctgtttcagaagtcaccacctgactcrttgtcagatgagtctgagcccaagactcgtacctgccacataatatatacaggtcctctctccctttggttatgagctaaaggcctttaatcatgaggtagaggagtggataagggagaaatatctgaaacccaattaaccagattccagaatgttaagggaatccatgtgggggctgggattctgaacatctctctctctctctctctctctctctctctctgtgtgtgtatgtgtgtgtgtgtgtgtgtgtgtgttttggtggggggtgaaatgacttttttttttttttaatttgagacagagtctcactctgtcaccaggctggagtgccgtggcatgctcggctcactgcaaccaccaactccctggttcaaatgattctcctgcctcagcctcccgagtagctgggattacaggcacgcgccaccacgcccggcctagaaatgacttttttaggggctcacctataggataaaatccaaactcatcttgtcatttaagatctttcataatccagtccaactttctataacattaaatcaaaattatacatgttcttactttaaaaggttaaaatattactataaggcatatgacaaaaataatctgtattttccactatttttttttaagagacagggtctcactcttccacccaggctggagtgcagtggtgtgatcatggctcactgcacccttgaactcctgggctcaagggatcttcccacctcagcttcctgagtagcttagactataggtgtgyaccactgcgcctggctaatttttttttctttttgtagagttgggggtcttgttttgttctccaggctagtctcaaactcctggcctcaaatgatgctcctaccttggcctcccagagtgctgggattgcaggtgtgggcccccacacctgggccacatttctgtttcttttttttctgcacacacaaacagccagaatatatttctttctcttttactagtgattcttgatttttttttttttttggttttgaacattatctgttgatattctactacagaaaattagggtttagtttttttattcttacccccttaacgtacacactttctcttaccccttcttcccaaagtcacacgttattgccgttatattcagtgttcagattattgtgattatataaatattgcttaaaggtgagctatgtaatatactatgattacatttcctttttggaccaacttttaatttttcctggaattaataattgccatattttgtcacttgtttactgatctatgtacataccttcagactctctcatgggactctaagacttctctctcagtatgttgaaacatatcaaataatcttttagttcaatagtctatttggagacatcccccaggagctttctcttattcactctggatgggttgctcttaaagcctttagtaaagctgtcatcctggcacttcccttcactatcatacggggaaattccctcacctgtcttccctgttggatttcatgtttcccagagctgatgtcgtatttcatgatgtactccattttttcattgtggtatatcctagcttcctgagaaaggatacaagggaggtaaatgtttttgagactttgcttatctgaaaatgtcttattctacttttcatttgattaagagtttgagtatagagttctaggttgcaaatcactttctagcagattttttaaaaaattatttaaaatttttttgtagaaatgagatctcgctatgttgcccaagctggcctcaaactcctggcttcaagcaattgtctggctaatactgccttttaagtctctctaaggatattaattagaggctgtctttctctctctctctctctgtctctctctctctctgtctctctctctctctctctcctctctccttccttccttccttctttcccctttcccttcccttcccttcccttccctcccctcctctcccctcctctcccctcccctcccctccccttcccttccctttcttttcttttttcctctgcatccagcattgtctctgtttcttctgagctccttctatttattttggtctctgtctttcatgttagaagttctcttaaaatgtctgatgtttcttggtgatcttcacatttaagacttgggccctggccaggcacagtggctcacacctataatcccagcactttgggaggccgaggcaggtggattgcttgagcccaggagttcaagactagcctgggcaaccccatctgtacaaaaaattacaaaaatgagctggatgtggtggcgcatggaggctgaggtgggcagatygcttgagccccggaggttgaagctgtagtaagctgagactgcgccactacactccagcttgggcaacagagtgagaccctgtctccaaaaataaaaaaagaaagagctgggccctaaaatgctgattggtgggactcgttaactggtatactcctaatgaataaccaggtagaggaggttggtttccccaggaaagactggccagtctcccatctgggggccaattctggtagctagagctctgggccaagtggagcaattggccagtctggaagggcctcatcgttcattgtcaaagtttattgattgattgattgattgattgagacggagtctcaccctgtcactcaggctggagtgcaacctctgcctcccaggttcaagcaattctcctgccacagcctcccaagtagctgggattacaggtgtttgccaccatgcctggctaattttgtatttttagtagaggcggggtttcaccatgttggccaggctggtctcgaactcctgagctcaggtgatccacctgtttctgcctcccaaagtactaggattacaggtgcgtgccaccacacccagctaattttgtatttttagtagaggcggggtttcaccatgttggccaggctggtctcgaactcttgagctcaggtgatccacctgcttcrgcctcccaaagtgttaggattataggcgtgagccaycatgcccggcccattgtcagatttcatttaatatccctgttttcactgagacacctggctcctgacctcacacgggcctgaagacttccaaccaatcttgttttcagccttactctgcagcatgccttctcctaccaagtcttcagaggttcctggtgcttccaatttctgagcctttctgggattctgcagtacaatttaccttgtttcttattgttgcccatttcctgcaggcacttagcagagagaaagaaagctgacatttaagttttcgaccatttgtttatccacactccagtgtatcaaacttttgttgctatttcttattcttattttctgtgggtttgtgccattttaattctcttactgtcacttttctgaggtttctgaaagggagctaaatgtgcttattaaatttgtgatggataccccaaagttggcagaagttaatcttcccaatttacttacctctctctgagcctcctcaaccccaacccaaatacacaaaccctgtggttcattctagtgtcacttgtactttctgtttttcattctcttcctcatgctatctctcctcctggagtgtttactcttcttatttcagactgttgaaatcctatacattcttctagtcccaggttatatttcttatctatggaagccttttttttgacttccccaacaggaaatgaccatttcattgactgaatttctgaagttccattcactgagttcttatagtcttgccctcctgacacagcctgtactgctttatgttaagactatctgtatacatatttctccagttagattgtaagctcttaaaggatagtagcataagactggctttgtaattttttttgttattgataacaatcaacatagtacctaggcaactaaatatttcacagaaccacagaattttagagctggaaaagaatttagagatctagaatgtgaactcattttatgaatgagtaaacagatccagtgtagttaaacgatcctgaagtcatttaataagccaagaacagaactggacctataatcgtctctagttctgtaatgtctaaatgcattgataaaatctgatatgtgcttatttagatattctggtttatcaaaggttaaccagagagtgctttttgtttcattcttgttgaaaatttttgtcaatatctttttggttttagtaattaggtatgccataggtaatttcttttcttttctccctccttcgctgcctctctctcttctttctttcttttttcctcccctccccgcccctctcctctctcttcctttctcttttcttgtcttttctttctttctttctcttcttttstgtgtgtgtgtgtgtgtgtgtttgttttttttttttttttttttttttttgayggaatcttgctttgtcacccaggttgaagtgtagtggcgtgagtagctgggactacagatgtgcatccccacacccagctaacttattgtattttttcataacaacagggttttgccatgttgcccagggtggtctcgaactcctgggctcaagaaatctgccctctcggcctcccaaagtactgcgattacagacgtgagccaccgccttgtgctgtctctctttttctctttctctctctttttgataaaaatcaggatcttgagtattctggattttgtcaaaaactgagctggaggtggtgcggtggcctgtaattccagcactttgggaggccgaggcaggtggatcacttgaggccaggagtttgagactgggttggccaacatggcgaaaccccgtctctactaaaaatacaaaaattagccgggcgtggtggtgtgcctgtaatcccagctacttgggaggctgaggcacgagaatcgcttgaacctgggaggtggagtttgcagtgagctgagatcgcaccactgcactccagcctgagtgacagagtgagactgtgtctcaaaaacaaacaaacaaaaaaaccccaaaacaacaacaacaaaaactaagctggataatagttttcttcccaggcatatatgagcatcagagacccaaggattataggtagggaaaaaatgtaggcaactgtattgaaggtgctctgatttttaagaaaattttaaaaattcactggatatgatgtatttggggtgattctttctttcttttttttttttttttttaacctagcagtaaagtacaggcccagttgggtcctacttaaagttttcctgtttgacaatttatcaggaattattattgcttaagatagctttgaagtaaattgtctgtgtcaaagaccttcctccacttctctcacttacctagctcttggcagctgtttccaaaatgtttgcactaactccatagattcatgtctgaaggattagatactccaggaacatctattgggagaaagtttaactacaactgttgtccatttttcaattaatgtgccagtcactaatcaaaaaaacagatgctgtcgttttcctcatccactacttgggacacctaaggatggatggacagatacttaagaggctgcctccttcttctgagattgggcttttcatcagggctgtgccacagggtgtgatgctgtgtgatagcagatggctctgcttcatgcccattactttttgttttatccaaagtagaagctgtggtccccagattttagagagtaagggcttaatcatactcattggcttttctgcctttgcctgtttctgcattgccacctggctgccattagagggaattcattacaactctgagtccctgcagggagctgagaggagctatccttgtgtttaggatgggacatgtgttcttaaaactgggccaggcacggtggctcccagcactttgggaggccgaagcaggtggatcacttgaggccaggagttcgagaccagcctggccaacatggtgaaactccgtttctattaaacatacaaaaattagctgggtgtggtggtgtatgcctgtaatcccagctactcaggagactgaggcacaagaattgcttgaacctgggaagtggagattgcagtgagccgatatctcaccactgcactccagcctgggcgacacagcaagactctgtctcaaaaaaagaaaaaaacaaaaaacttaaaaatggttacccagatttccttttatgacttgttcagtcagaggcagctgggaggatgcacgctggggaaagcattactcaccaggcacacatagtggccctgactgctggcaagtagtctgggctgtgttaagagtgagtcacctcggggaatggaaaaattgcaaggtactgaggggtaggagttgtgtgccagtgactgctccttttctgtctgctattttctctataaggactcatcacaaaaccataaatactgacgatcctgttgaggcagccgtgaagccaaccaactttatggtgataatgtttcccataaaaggaatgagctgactggacatagcattgttgccttctatgttacaggtgtatatagattttgacacaagcttgaacttgtataatgaaagttccatgtgtgagaatttcatcagaataaaagcaacacagttttctttgttgtttaaaaactyagtcttctgtgtctatctatctttgtccagtaggggtcactgagggttaggctctcaataagagaaacactaatctagtgataaatgagctggattccttgtctattgtgacatctttgtatattcagtactatgttttttaaaatattagagcagaaacaaaaggcgtgaacttgtattaagaactttatgggcgaagcgcagtggctcatgcctgtaacccgaggcgggtggatatcacctgaggtcaggagttcgagaccagcctggccaacatggtgaaaccccgtctctaccaaaaatacaaaaaaattagacgggcatggtggcgcatgcctgtaatcccagctacttgggaggctgaggcaggagaattgcttaaacccgggaggcagaggttgcagtgaaccgagattgtgccattgcactacagtctgggcaacaagagtgaaattccatctcaaaaattaaaaaaaaaaagaatatttctggacaaaaataacaatcctgggcaagattctggaacagtccccatagacagggcttcttttcttcgtatcatttttttctccatttctttaagatgttggctaccagagtttcctggaaaaagcttactagatagatattatttcattggggaaaagggtcaaaatkccagagagagagattacttaaaatggtaatatggctgttgaggttgactagatattcttgtcctttccctttttgaagcaatgctgtcgaagcctaatttgacttagtcattgagctgttcaataccacacattactttcacttaccttcttgcatttgccactgaggatgacttgatgccctgctaggaggtctcttgtgtggtaatcataataacaagagttggcattaatgagtcaatgtttaatgctttttaaatagttaatgcttactgtgtgccaaatatattatgcattttctcacttaatcctcactgtaacactgtgaagaggtaattttattatccctttttgacatgagataactatggattaaagagattaagtaattggttcatagatacacaactagagattgtgaaatcagaatttgaatataggtttggctcacaaattatatttacagccctggtaagagagagagggagagagagagagagagaggcaggcacttgggtttaagagtgagttttcttttttctttttttctttttttgagacagtttcgctgttgttgcccaggctggggtgcagtggcatgatctcagctcactgcaacctccacttcctgggttcaggcaattctcttgcctcagcctcccaagtagctgggattacaggcactcctgggtaattttgtatttttaatagagatggggtttcaccatattggtcaggctggtctcgaactcctgacctcaggtgatccaaccacctcgtcctcccaaagtgctgggattacaggcatgcgccaccacacctggccaagagtgagttttctaagtgctgtaccagagcatctctcactttattttctgcccctcctctttagtgttactttcccttttctttcttaagggtaagaccttcagttgctgagcttgataggaaggccatctagagttagatcctgggcagaatccatatccggagggatttccagaagtggaatttcttttcttttcttttcttttcttttttttttttttttttttgtgatagagtcttgttctgtttcccaagctggagtgcagtggcgcgatctcagctcactgcagcctccacctcccgggctcaagggattcttctgactcagcctcccaggtagctgagactacaggcacatgccaccatgcccggctaatttttgtaattttagtagagacgggtggccaggctggtcttgaactcctgaccttaggtgatccaccccgcctcagccttttaatgtgctgggattacaggcgtgagccaccatgcccagccaaaagtggaatttctttctccctgccttcctctcccctcccctcccctcccctcccctcccttcccttctctattgtcttgctctgctgtctaggctggagtgcagtggtgtgatcatagctcactgtggcctgaaactcctgggctggagtgattctcctgcctcagcctcccaagtagctagaactacaggtgtgtaaccactgggcctggctaagtgttattatgttttggagagatggggtcttgctatgttgcccagggtggtcttaaactcctgtcctcaggcagtcctcctgcctcagcttctcaaagcrctgggattacaggggtgagccactgctcccagccaagcagtttaatttctgaattaataaactatcttccttccagctccaaggaaaagcaaaacttacacttgtgttcttggagacacttttttcttttaaattcccaggtagatttggaagttcactgttaaagrtggttcgacacccttgttagtgtatgttacctactaggcctctctagargagcattttgagttatttctgccataagatgaatggttttccaggcacttgttctcggttgtatgtttttgtggtcaaaaaagatgcattaccagaagaaatgtttatattttgggagtattcataattcactgggcccagctttgccctttctagtgtgcacccgcccccattcttgctcttaagcagttctcagatcctctcattcatttattaatttgctcattccacaaatagttatttagtgactaagattttataaaggagagcagacatttatctagcttcaaaaacagtctagtgagggagtaacaatatgtgctcagctgtattataaagcacaaagtgctaaactttatgagagaaacagataaagtataataaaagctcaagggagggagaagtttacttctcactgggatggagggaggaactggagataattctgtggaagtactggctttaagctggtctatagaaataggagtttaatatctggagatgggaaggaaaaacgtgccaggataatgagggaaatattgtgaagccagagagttttggatttaatttgctgatagggagaaatgtaaagttttacagtgaagttataaataaacatttattaagcatttaaaatgtgccaatcattatacatgcttcaaggagattactgttgtggtgaacgagggcagggttggtaagttggagactgagattagacagattaggtaatttaggtgaggtawgttatcagttgccaaggtttcgtacagtctgagcaatattcatagtctttgtggtcagatgtagtttgtttgctgctcctccaaataatgacaattataatcagcaattattgagcaggtattgagcacctgaaacacattaactcattcatccttactacaactctgagacagatgctattattatcatcattttacagatgaggaaattgaggttccatgaagttaagtaacttgcccaaagatgctaaatgtgatgtatacatagtagtatggatttaaacccaggcagactgggcttataatttccatgctactataatactcatggcatctatgtatacggagcaataaatatggagattttccttactttattgtattcaatgacacttttgtatgtagaatgttctttgtagacattctgggcctttgcaagttgtctcaataccacattgccaaaccttagaggcagagtcatggatgtctcctaattaagttatctgaagcccacatcctctgcctgtcttcagttagatgcctagtgtactcatgggaggggacagatgacaagagtttcagggccaggctttgatgtctgcatcgtgccatttccagaaacccaaggttttcagtcctatcggttatgtgctattccctctaccaaatttataatcttaggtatatttattgtattttttaaaagacttctctctttgtaagcattatttttctagatttggcttttttagttacggtgtaacgtaaatttttagtctgaatctgctaaagttatgatgcttgtggatatcaattattttgagaccaagtaaatctcaatgacatttgaataaaatgtccagcatacctttgcacaggcttgttttgcttgcaaacattaaagtaattctggggtgttgccttgtgttgagatttcttgtgggtaacagttaggggagaccatcccaaattcctgtgggtaatcccaaagagaggcagatctaaaatcttaatgaagttctgagtctgtcttctacaaggcttctttcatggtttggggycctgcccgttggctgttagtaagggatatcctggggggtgctaaatgtgactttaaaaagactgttctttgtatgataaatgatctcttaaaaagaaaactagtcactccctcctgccagcctctaaccacttcctgtaaatgacagcacacagatcttagtttcaccaagtgaaaaaattattttattttcatgaaagcagttcccctctgcttcttccttccaacatacatatatataataaatataaatataaatatatacacacacacacacacaagctgcagataggcaggctttttacctgtaatatcaaggtataaaatgacatgtttttatgatcttatgagaataaattactttggttatctttcattgtcttctctaataataaatgtaggttcagaacatatcttggtatttgagtactttggattttttcccccaaatttcctaggtgtttttgaatgacacaaacatggtatatgattttctaattactgatgccagaagctcctataacagctttatgatggcttcaggtagcaaatagggcagggaaatggctttcactttgggaaacgaaaatatggtgaaggtatttgtaagactgtgaaaagacggttgtggtggctcatgcctgtaatcccagcactttgggaggcagaggcgggagggtcactcttaaggccaggagtttgagaccagcctggactacatagtgagaccccatcttcaaaaaaaattaaaaaattatagccagcatggtgatgcatgtttatagtcccagctcctcaggaggctaaaccaggaggattgcttgagcctaggagttcaaggctgtagtgagctatgatcacaccactgcattctggcctgggcgacagagcgagaccatgtttcgaaaaagatggttgagaaatggtggacagatgccaagtggagtggctcatgtctataatccctgcactttggtaggctgaggcaggcagatcacttgagcccaggagttcgagaccagcctgggaaacatggcaaaaccccatctctgcaaaaaacacaaaaattagccagacgtggtggcacatgcctgtagtcccagctactcgggaggcagaggtgggaggattacttgagcccggtagtttgaggctgcagcgagctatgattgtgccactgcattccagcttggactacagagtaagaccctgtctcaagaaayggtgatagaaacagcactagcaggctgggcgcggtggctcatgcctataatcccagcagtttgggaggcccaggcggatggatcacctgaggtcaggagttggagaccagcctggccaacatggtgaaactctgactctactaaaaatacaaaaattagctgggcgtgccgggcgcggtggctcactcctgtaatcccagcactttgggaggctgaggcgggtggatcatgaggtcaggagttcgagaccagcctaaccaatgtgatgaaaccccgtctctactaaaaatacaaaaattagccgggtgtggtggtgtgtgcctgtaatcccagctactcaggaggctgaggcaggagaattgcttggagccgggagacggaggttgcagtgagctgagatcacgccattgcactccagcctaggcaacagagcaagagcgaaactccgtctcaaaaaaaaaaaaaaaaaaattagctgggcgtggtggcacacacctgtagtcacagctactggggaggctgaggcaggagaattgcttgaacccaggagatagaggttgcagagatcggagcatcactgcactctccagcctaggcaacagagcaagactctgtctcaagaaagaaataaaagggaagaaacagcactagcaattaatatatactgttgttgagattcttttcttaaagccaggtggaactattatataaataagtcttgtaacgaggaagtataaacacctcaagttgcttaccctaaagttagtgtacttattttgacagaatttttttcttttttgagatgaagtctcgctctgtcgcccaggctggagtgcagtggcgcgatctcggctcactgcaagctctgcctaccaggttcacaccattctcctgcctcagcctcccaagtagctgggactacaggcgcccaccaccacggctggctaattttttgtatttttagtagagatggggtttcactgtgttagccaggatggtctcgatctcctgacctcatgatccgcccgcctcggcctcccaaagtgctgggattacaggcgtgagccactgtgcctggcctgttgtgacagaattttttaacaaagggataaaatatatttatttggaatcaggcataataaaagttcagacatgggccagacacagtggctcacgcctgtaatcccaacattttgggaggcctaggcaggaggattgcttgattccatgagtttgagaccaacctgggctgtaacatagtaagatcctgtctctacagaaaaaaagacagaaaaagctcaggtgtcagctcatcctctttcttggatgaccttggcaaaataacttgaatttctggagcctcaagtgcttgatttataaaatgrggtaataatatatagttcccagggatattacagggatcaaatgaaataacagatgtaaagatgctttatagtagctgcttaataaattttagtttcccttccaagcaagtccatcttcttcgaccatcacagcccaggagcttcttcacttctccacagcaaggggtgtgtcatagtcatcttggtgtccatggtatctggcacaatgctctgcatcttttaatgaaatgaatgaagtgctttgtttcagaagagagggagctccagcttagtctccactggactatgtcatcaatttttcctttctaattcttattcccttcagcaaacactattacatttcacatatcaagaattctctattgaccctacattgctctctctgctcctgtttacagcaaagttccttgaaggagttgtttttccctgtccttgattattcttctcccattcattagttcttgaatcgctccagtcaggctttttctctaccatgccatcaaaactgcacttgttagagtcaccagtgacctccagaatgctaaattcaatggtcagttctcaatcctcaacttgacatattaatagctcttgcatggttaattgctactttttagaacgctttcacctggcttctgggatagcttactcttttgggtctccctctaatccactgaatcctcttttttagccccttttggttgttcttgctcttccctagataatgttgaaaggcttccaggacttagtccttgaacttgatctcttctctatgtttactcactaaataatgccatctagtctcctggctttaaaattccagcctgggccaggcacagtggctcacacctgtaatcccagcactttgggaggccgaggcaggtggatcacctgagatcaggagttcgagaccagcctgcccaacatggcaaaaccgtgtctctactaaaaatacaaaaattagccgggcgtggtggtgggcacctgtaatcccagcttcttgggaggctgaggcaggagaatcacttgaacccggtaggtggaggttgcagtgagccaagatagtgccactgcactgcagcttgggtgacagagctagactccatctcagagaaaaaaaaaaaaagaaaaaaattccaggccaggtctctccctgaactctagattcatatattcaattgtctattcaaagttccacttgaggggtgggcatggtggctcaagcctgtaatcccagcactttaggaggccaaggaaggaggatcacatgaggccaggagtttgagaccagcctgggcaacatggcgaaacccggtttctaccaaaagaaacaacaaggaagtttcacttgaatgtctttaggcatttcaaacctaatgttattcaaaaggacatttctaccctgcccccccaaaaaacagacagccacagccaccaatgaatcccaaaccctctgcatctctggtatcagtcttccccatctcaggaaatagcagttctatcctttcaatttctcaggccaacattttggagttattttttattctttccctgctcattccacaaccaatctataagcaaatccagatgattccttctttgtaattacagaatttgaacacatcttaccacctctgtggccacactctggctctacccatcattttgtagccaccaattttcacttgaattattatactggcattatagctggtttccctgtacccactcttatctctcagtagtatgatctcaacataggaacaagaatgatccttttttttttgagatagagtttcgttctgtcacccaggctggagtggcgcgattttggctcactgcaacctccgcctcctggattcaagcgattcttctgcctcagcctcctgagtagctgggactacaggcgcgtgccaccacgcccggcttatttttagtatttttagtagagacggggtttcactgtgttagtcaggatggtctcgatctcttgacctcatgatccacctgcctcggcctcccaaagtgctgggattacaggcgtgattcaccgcgccaggctgagcaatccttttaaaacctaagttaaatcgtgttactgtctcacacaaagccctccaatggcttcccgtttcacctagaataaaagccaaaggctttacaatgatctgtacagccataggtgatctgacctcgtctctggcctcctcttctgatactctttcctttcctctttcaggtccagccattctaggttctttggtgttccctgaacataagaaacgtaattctgcctcagggactttgcacttgttctttggcttatccattctccagatagccacatgacttgtttgctcatattctttttttttttttttttttttttttttttgagatgcactctcactctgtctcccaggctggagtgcagtggcgcaatctcggctcactgcaagctctgcctcccgggttcaaaccattctcctgcctcagcctcccaagtagctgggattacaggcgaccatcaccacgcccagctaagtttttgtaattttagtagagatggggtttcacggtgttagccatgatggtctcagtctcctgacctcatgatccacccgcctccgcctcccaaagtgctgggattacaggcgtgagccaccacgcccggcctcatattctttatctgctcagatgtcaccttattagacgagccttctctgaccatcctatatataaaaccgtaaacttggctaggtgctggccgggcgcagtggctcacacctgtaatcccagcactttgggaggccaaggcagttggatcacgaggtcaggagttcgagaccagcctggccaatgcggtgaaaccccatctctactaaaaatagaaaaattagctaggtgtagtggcacgtgcctgtagtcccagctgctcaggaggctgaggcaggagaatcgcttgaagccgggaggcacaggttgcagtgagccaagatcatgccactgcactccagcctgggcaacagagcaagactctgtctcaaaaaaaaaaaaagtaaactwtcccccattgacattgacactccatctcctcttcgtctcctttagtattctccatagcatttatgtgacaagctatgtatttacctgtttatatttcttttctttcttctcctactagtatgtaagttctgtgagagcaaggtctttgttttgtttactgctattgtttctggtacctggaacatgacctggcacataatatgaagtaaatatttgatgaatgaaatgtaggttagcacaaaattgtagatgatcctattgccagatttaaaagttcccattgtattagtggtcccgtcaaggcccctttattatttttctgggtagtaggttatgcacatctaaaactctttccttttgcttcaacaagctctagaaaaaagcaaaaggaaaataaataaataaataaagatttcacatagaaaaaaaagtaaaacccttccctattattagaaaaaaataaacttgacagatatataaagcaattttcattttttaaagcttgtgagactatagcatcttcatctatatcatagtgtaataggtactttagaagtaagtaaacagggtctcactttgtctcaaataaaaaggctgtagtgcagtggcatgatcatggcttgctgcagccttgattcctgggctcaagccatcttcccacctcagcctccccagtagctgggactatacacacataccatctcatctggctaaattttaaaatttttttgtagaaatggggtcccactgtgttactcagtctggtcctgaactcctgggctcaagtgatcctcctgcctcagcctcctgaagtgcagggattacaagcatgagccactgcatctggcctgatttagtgagtttggacaaatgtatacagtcatggaaccaccaccacaatcaacaaaaggaacatttccatcctcttacagttattttgtgatccttttagtcaatttccttccctcattctcagcctcttccatttctagttgtatagttttgcttttctagaaagttatataaatggaatcatatggtatgtagccttttgtgtttggctttttttatgtagcataatagttttgagaatcatctgtgtcgtcgtatgtatcagtagttttattctattttattgcagaataggtagtccattatatggatgcacaatttgtttatacatttaccagttgatggacatttgggttgtttccagttttttatattatgaataatgctgctgcaaacattcatatacaggtctttgtgtggatatacgtttctctttttcttggatagatacctaggagtgagattgctgggtcctctggtctaaggccgggcacagtggcacatgcctgtaatcccagcacctttggaggcagaggcgggaggattgcttgaggtcaggagttcgagaccagcttggccaacatggtgaaaccccatctctactaaaaatataaaaattagctgggtgcggtggcatccacctgtaatcccagctactcaggaggctgaggcaggagaattgcttcaaccctagaggcggaggttgcagtgaactgatatcgtgccttccaaagtgctgggattacagccatgaaccactgcgcccagccagacggatttttttaacccttgagaagtaccccctaaatgagcagtttgctctcctcgctgatcttcatcacacctagatgtcaggtctgcttcatgggagcttgctctgtatgtatcctccctggactgatgttcaggctccttgcttctcctcccgggttgtgggtatggagggtttgccctctgacaactccagggtacttgtggtgctcatacatcctcatgtactttgctttctccccgcaagaggttccctaatgcttctgtgacttttttcttctggctacatcctgaagtctggccttgcaggcaggctgggaatggaaagttaagagtgtgacgtcctctgacaccctcccttcttgtagaagggtctgaggtttgtttatttaagctgagcagaggatgccaaagatagaggtttgagtcagcttgacactggcttaggcgctccttttcactctccttgttccttcttccctttcccctcccccgctggccagttgtttcctgggctttgtctgagatacactgtacagttttagtcccagtctactagcgcctgctgaaaaacagtcagaagtgagatggaggagaagctgccaggaagtttctgacaacactaagctccggcctctgcctctgctgatagtacaggacaacagtaacctcaggagaaaggcatccagaggcctgcgctgagcttgtggctaactcaagggaggagaaaggacgggcctggaaatgcccctcttagattcatcttatttaccaccaaccatctttattttgactcacgttcttggagttgctggtgttctatactggaagaggcatgccagaggtagagcaggtaactaactggtacccagttattctttaaatctactgtggggcttttgagggtggggtgaatgatggaggtcttcccagttgctttccttaaagggccagtacgtccttcagctggggtgctgtcagacttaagagtgtgtgtgtgtgagtataatgaagaagctggtctgccctggggccactttgggatgggggtggtgctcttttctgttctgtgagtctgtctggagagtgctggttagatgaggtgatgactgggctcaaaactgaagggaagtggctgctgtgctgacttagtctttcctcagagaactgagctctttctttctcaatctcagagtggtttcttggaaccttgtttttaactgaaaacatacagtaactcttttaccctcctccaggtatagatttgggttggagaagtttctgttaacttggtgtgttttggggtgagaaaaggcagaggaggaagggtcagtcagtggaaggggtcgtgcgatgtccttgccgaggggcatcctggaacactgggtgtctgtgttctctttgatatcattgatactgttcctacacagtttggctatgtgtatccaaatcatcttgttcaatgcaaggaagttaatccctctcttccctagggaatcaggctttgataattaaaaaaaaatttttttttgtaatggcaccagaaccctcattcttcccatattgctattagttatattctgttgacttctaaacactcagagcagggatcagccctgagtttggctgattctgagtctccatggttgaggattcatatggtctaacttttactggagtgtatacccttgggtctcattgccttcagtactctcattgtgatgggctcactaccttcaaacttaggtatgtagacactttttatagtgtatcttacaagttaaggtggggatttgatggcttattatttagctttctattaaaagttcacaaacgcctgacagaattagaattagattcaatcattccccagtgtcctttccagtamgtcccagaaaagcttttgactaaatattcagatcctagtgtgcatctatagcagcggaaacaaagacagacattttagaagtgtgtttgattgtgtggtggtgtttttaaaaaagccacctcaaagtggctttcctgtatttgaacttagaaagaaagagataggcaggcttaagttgtttggtcctatttactatttcacatgtaatgagaaaataaatacaatatcatttaggtagaggctgctgcttttctttccttgtgcattatggtaatgtcatttttaaacattaaataactaattagttgttaatatttttaaagtttatcttcagtataggactttaatggaacttaagagctatcactgtattttaagtgctttcttttttatgtttagaaatgttaatttcataaacagccataaagtaattgaaataaaaagatacattgtaaaagctttttatttctatgaaacaactttgattctaataccaaatagttatatcgggaatgtgctacgtttgctttatctgtaaaatgagagatgtcatttttcaattggaggctatggattccaaatcttccatggagttacttacgagattctgtacccattttattataattgcaattttaagatgcatttcatttatttaaaaatgtatttttaaaaataatatgtacactctaattacctgccagttggacatcacagaataaagtttttccaccatctctgtgtatatatttgtactattaataaatgtacacttgattaaaaacacaaagatcgcttcttctgatgtagtcttttttttttttttaattggagttacatacagtattgcagaacaaactatagcacataggtcttgtgcctaataatagtaataataatgattcaggcagagctcagttgtatgagctcaggtgttaactgaactattataatagtgaagtgggtaattaattcatctctatgtagtaatactgtattactggtttagtatgtgtaccagaagtttctgttcttttgtctcacttttctatttgtgtttacatattatgaggaatgttcatagttgtttttttctttctttctttctttctttcttttttttttttggagacggagttttgctcttgttatccaggctggagtacaatggagcacaatcctggctcaccgcaagctccgcctcccgggttcaagtgattctcctgcctcagtctcctgagtagctggtaatacaggcatgtgccaccacagccggctgattttgtatttttagtagagayggggtttctccatgttggtcaggctggtctcgaactcctgacctcaggtgatccacctgcctcggcctcccaaagtgctgggattataggtgtgagccaccgtgcctggctgaagaatgttcatagttttaaacactgaaggtaactggctttgaaacaaatatttgtgctattctttcaggctctcgtctcaatttatttgaataatgtcctgagattattaggcaaacagtgaagctgttattatttgtttctatttatttgtgtgaatcagttcttaaaaattgattcttgtctacggccataccaccccaaacatgcccaatatcatctaaaaattgattctctgcaataaaacacaacatagaaataaaccagatgctggctgggcgtggtggctcacacctgtaattccagcactttgggaggctgaggcaggtggatcacctgaggtcaggaattcgagaccagcctggtcaacatggtgaaaccccatctctactaaaaatacaaaaattagctggtgtgatggcaggtgcctgtaatcccagctactcgggaggctgaggcaggagaacagcttgaactcaggaggtggaggttgcagtgagctgcgatcacaccactgtattccagcctgggcagcagaatgagagtccgtctcaaaaaaaaaaaaaaagaaaagaaatataaaagggtttttttttttttaattaaatctactccgttcctgtttcactggttttatttcctatcttggccttataagcatccaggactccagcatcttttaaaaactcacagctctactaatggatgcttgtcctttagggtaagtagttaactgcctctggaaagccttccttgactgaaatacgagttcctattctgtgctgcagtagcaccctgttaacactacttattcaaacctgtattgtcatcttacttaacttgcccttctctccttactaattaaaaacagggactcttttttttttctttctgaaaccgagtctcactttgtcacccaggctggagtacagtggtacgatgttggttcactgcaaattctgccatccgggttcaagcgattctcatgactcaacctcccgagtagctgagactacaggcgcctgccaccacgcctgactaattttttatttatttatttttttgagacagagtcttgccctgtcgcccaggctggcgtgcagtggtgcaatctcagctcactgcaacccccgcctcccgggttcaagcgattctcctgcctcagcctcctgagtagctgggattacaggcgcacgccaccacaccctgctaatttttgtatttttagtagagacggggtttcatcatgttggtcaggctggtctcgaactcttgaccttgtaatctgcccacttctaccttccaaagtgctgggattacaggcgaaaacagggactattactcatctcagtatctgcagtgtctgaggcaaaacagatgtcagtaaatatggccgtgcgcagtggctcacacctgtaatcccagcactttgggaggctgaggcgggtggatcacctgaggtcaggagttcgagaccagcctgaccaacatggagaaaccctgtctctactaaaaaatacaaaattagcaggatgtagtggcacatacctgtaatcccagctactggggaggcggaggttgcagtgagccgagatctcaccattccactccagcctgggcaacaagagtgaaactccatctaaaaaaaaaaaaaatcagtaaatattaacttgaataaaaaattaaagatggcactagctgtaaactgtagcaggaaccatgccctgttcatttgtctattaagagggtttggttgagtttaatgtgtgatctaaggtaggatgctcagtataggttaattagatgatacagagttgccctgtgttttattttattaaatctcacattgtgatagtgtaaacaggaaaagagctttatggtttttttcctctctagggtcttgttttccttacctgtaaagtgaaggagttggataatatgatcttttaaagttctctccgttttcagcatcccactaggaggaacagccataatccctggatccaaactatatgaaatacagtctaagattgtattccatcacctccccatcctgggttttttttatttaaagcagttccctttatcatactattgggttatattaaacctaagatcaattataaaatggccaaaccttgtacatgaattgttgttgtctcccttctagtcgctgctatgcccttggttttcttgaacttcagcataagacttataggtatcctagagccaggcatggtggttcacgcctgtaatcctagcactttgggaggtcaaggcatggggatcacttgaggtcaggaatttgagaccagcttggccaacatggtgaaaccccatctctaccaaaaaataaaaaaattagctgggtgtggtggtgtgcgcctgtaatcccagctacttgggaggctgaggtgggagaatcacttgaacccaggaggcagaggttgcagtgagccaagattgcacccctgcattccagcctgggcaacagagtgagactccatctcaggagaaaaaaaaaaaaaagacttacaggtattctagttaaattttgtcctgtgagatttggtgcaggcttctaaccttttgagatttctttgagctttaattcttccatttatggcaataactgtgtgtcctccatttgtgtcatctacaaactagttaagtgcataaaaggaactcagatatttgaataaatggtcatatatctaacatatctttgctcaaatagctaaagcattagaatgtttaatcaaggtagagtctttgtcttttccattcctttcctttttttaaaaaaaaaaaagagacgaggttttgctatgttgcccatcctgaacttgaatttcaagcstcctcccaccttagcctcccaagtagctgggactataggcaccctctaccatgcctggctctttttctttcctttgcattttttttttcttaaagatttgtatggtgtagtagaaaaaccacttaacttggaatcagaagatctaggctctaagctcttgctcttctgcttacatgttggactggtcacttacttcctctggtcttcaaatttctaggctgtttgagaagaaaaaagactaaggtctctaactttctgtgattctgattcagttcgatcatctggcctgttcttggaagtcatatggaattgtggttgagagcaggttgagagtctggagtcagattgcctatgtttttatcctagttctgccactactggctgagtgacattagtttatctgggcctctgttttcctcatctgcaaaatgggtttaattatgctgcttggttgttttgacttagttgttttcccctctctccctccctccctccctctctctttcccttctttccctccttccctccctccctcgctcccttttttgatggagtcttgctttgtcgcccaggctggagtgcagtggcataatctcagctcactgcaacctctgcctcctgggttcaagtgattctcctgcctcagcctcccgagtagctgggattacaggtgtctgccaccacacccagtttaatttttgtatttttagtagaagtggggttttaccatgttggccaggctgaacttgaactcctgacctcaagtgatccgtccatcttggcctctcagagttctgggattacatgcatgagccaccacgcccagccttgacttagttcttagaacacattctgcatgtggtaaggaatatgtgattatttaccatcattattagaattttttcacataagataacattgaagacatagtgctttcctgtgaactgttgggatgaaacagtaattgtccttattttttaattttttaaatttaaaaaaaatttcatatatagagaccgggtttctccatgttgcccatgctggtctcgaactcctggactcaagcaatcctccacgtcggcctcccaaagtgctgggattacaggcttgagccaccggcacccggcctgtctttatagttagtaattaagaaatgtgacatgccgggcatggtggctcacgcctgtaatcctgacattttgggaggctgaggtgggtggatcatgaggtcaggagctcaaaaccagcctggccaagatggtaaaaccctgtctctactaaaaatacaaaaattagccaggtgctgtggtgggcgcctgtaatcccagctacttgggaagtggaggcaggagaatcgcttgaacccgagaggcagaggttgcagcgagccgagatcaagccactgcactctagcctgggcaacagagcaagactctgtctcaaaaaaaagaaatgtgacagaacccaatacagaggtatataaaaagtaggtgatatattatgatcactgttttatacgttaagaaagatgtttgtgtcttttatatccttaatagtgggtgattttggcattttaggaaagacattaagtatataccttcaattttctttgtttctgtaaraaagccagtagctgtcaattctcarataacttctgaccacatgtggaaatactggcctgaacctcttccctccactcacccttttcaaratctgcaggtagcagccagacttaaactttttcctacctttaacaggaaatgacaaaagttgggaaaaaaagaaggggaatggctcggatgactctactggcccatctcctctggatagttaagagctgactgtcctaatcaaagtcctctcctccattgcagcagaacttgcctctttttgaggctcaggacctcttgggaacttgaagggaaggcctgtctcctgtaggtagactgaccttgtccccaagactctaccctacttttctcagtctgcagtgccgttrggagaaataggttctgcttgagtgccagggaatttaggagatggcagattttggttcactttcctccaacttcacccagtaattattattttgatttttagagactgtgaattcagtatttctagaagttgccacatgtgttcattttggatgtgtcctaaatctctggtcaaccagttaagtattttttattttttattttgagacatagtctcattctgtcgccccggctggagtgcagtggcgcaatctcggctcacagcaacctctgcctctggagttcaagtgattctcgtgcctcagcctcccaggtatctggaattacaggcatgtgccgccatgcccggctaatttttgtatttttttagtagaggtggggtttcgccatgttggccagggtggtctctaactccttacctcaagtgatctgcccaccttggcctcccaaaagtgctggcattataggcgtaagccactgtgcctggccgagttaaatgtttttatttgttacccttcccaagaatatttcaccttcttacatatacaactcctatgcctttgtttgtttattctggtttaggtccttctcagagacagcagggtataacagggagcacagctttggagctggacaaatggacatgtaatcttggtcaagttatttaaccttttaaagtcctagaatttttatctctaaaatggaaatgataatatctttcttggagaattgttgggattaaatgaaatgatatttaaagtttttagcacattaactgtgaactaacagttatagtaaatgttcagttaattttagcttaggttattgagtaccttctaaatgtgatagagatggggttatggagacaaaagagtccctacactcagataatttatttttttattttttatttttgagagagtctcgctctgtggcccaggctggagtgcagtggcacaatctcggctcactgcaacttctacctcccgggttcaagcagttctcctgcctcagcytctcaagtagctgggattacaggcatgtgccaccacgcccagctaattttttttgtattttagttagagtcggggttttaccgtgttggccccagggtggtctcgaactcctgagctcaggcagtttacccgccttggcctcctaaagtgctaggattacaggcgtgagccactgcactcagtctcactcagggaatttaaatctgataaaggaagaggttactagatatgagtcaggaaatgttcattcctttttttctctcttccctatttcttatgcattccttttcccagtacgaggcaaattctaggaggacccttcatctccaaggctaaaaagagtcttataagagggacaaactgagtacagttgtcacaggttatcagggtgactgagagcttagtctaggcgggataaagtcagctgtgagaacctttattagtaagcagtaacaggattattagcagtttgtaggtgggagggatacccacttgggagtgaagttgtcaagcaactgaggcaggtcatagggcttgtttaaactgaatggtctgctaggraagcttgcatttactttttttcatttgtagtcgtttgggctaatctctggaaacttgctttcctaggtgctgcccctcctccctccctgccttcaggaacaggattgaaagcagcattagcctgaagaagtcgttctatttagggagctagagcagagggccagtgattaggcccttatctgcagcggggcctttttgagtggtgtggggcagggctgcagtgtctgtcctgacacccacagaggctggacttttctgtcccctggttgggttagaactgtgaagaaccaatagaagggctgggccagctgaatgaaaaagcccttcattgtgtttcttcaacattccagtgtctggtacaattagccaagactcggaaaacaagttggacaaacaagcaggcagccttctactgatggatgaaaggatttctggcacagctgagttaagtgcactgactgtaaagacagagtaggaggatctgggaagaagaaggggactttggaatgccattcctggctgtgaggggaaagaatggagcaacaagcaaacggtatttttgaagctgataaaatttgctgtgataatctacctgggaggctggctgaggcgaggctggctgaggtggggctactctgtaaagtaggtggaatcactggggagttactgactcttcccttttggcagctgtaagtgcggggaagggaaactttctttggaatctagggatctgttcacagtggacggtgagtgtatgagcttgctccattatagtctctcccatcatgagaccttctcatttggttaacactatatgtacttctgcctgagaagaggcacacctgaggagcaagttgttgggcaatggatgcactgttcctgacttggcagtaaaccacttagctcaccagctctcctgcaactaagattcaccacattacaagcttctgctctgcaaatggagggtaactcaaagaccagtttcttcctactcaggtttactcacttcataccttgactggacttttgcatatggagctctcccctctgtacgctctattggtctggaaacacagagttggtgctacttttgaacagcatgcagcatgctatatgcctgagacatggacccagtttttggaagtgccctagggaggagcttcctctctgacctcaagggaagaaggaggtcagtaggaagtggtgggtggagccacttctctgttctgctgtctcctctctacacctcacagccctttttgaggagctgcgaagggtgcacaggccagtagctggaggttctttggtaccccctccttttaggtggggtcagcagacacaggggcgccatgtggccgagttaccaagatgaacacgagttcracgcccacctggtttgtcgcatgtgctgtatgggttagtatgtgaagtttttttttttttttgcttgtccgggcctgaggatcccaaatagcccttgctctcattgactcataggaatgcatggacttcgaagccttgtggtgttacaacctttaggcttgttaaaatgtgcagtggaatagattggggtgccctacttcctggggaacttcttaagcttgcagtaactggcagttaagagcccaagctttgggtgtagaactttttttatagagactgaattcatgctcatgcttctgcctgtatcaggaaaccacttttaaggtatgttgcatagtgctgaaagtccagagtgtatttttagcagaagttggttggttacggagtccacctctgagcagactggcgggaggatggggggtgggagggaggagtcatggcctatgtttcctctttggggcttattgctagttcttttacactttactctgccagctgtgacagagagagaaaaagactcaaagatgatctggggtcagggacctaaataagagaggctaggggaagagtcatgttagctgtgacttagatctctcttgataaggcatcattaaataatgattatttaagtaatgtcctgtggccttgaacaagtgacttaacctttttggcmgtaggtttccttggtttcaaaattgtagggtatacagactggtgctagactgagagacatcaattctctgtaaaatgaaaaaagataaagaaaatgtagtgtgtctttcataaagctaaacttaaagaattgtcttttattctgaaattgtctctcctactttctaatgttaaaatatcctttattttatgaaagaattgttattatatggtagtgtgtttttaagatatccctacttagcaaaatgaaaagtgacaacttctgttaggctttctgatttattgtggaacatgtatttgtctatgaaatcttagtttgggaaccactggtttggtaatctactatcttttgattttatactttgagtctctaacaaggagcaaaattgtgacccaaataggcagattttcattaaaattgaagtaactagttgtttgatgaagaggagaccttagaaaaatctcagagaaggagagcaacagaactagggttctgatcagtctcctgactcctaggctagtgcttgcaagtatttaggtgctttttgaggaaaaaaagctgccatagcaataatgcttggggcacagagggggcaattttagtggtctacttttttttttttatctttcctgtatcattgagatttcttccctggaacctagaagaaagaattgcctatatctaaaagtgcttggagataaacgtatagcaaaagggcctttcctgtaaccaacaaagaagtataggaaagtctaaaatctttattgaaagtttcagggcaaaaacgtaatgtagccccatctcccccaatcccacataatcccctaaaggcactgtagactaatagctaagaaaatgggcttggcatcaactgtctacacggggttcctactccaccacttaacaacaaaaccaactggggacattgcttaacctttytctagctcrgttacctcattttttatttttctttttttcatatcaccgtaaaataaaatcacttgtatagggagaatgaatgaagattagcagtggattttcatgttatatacttttcacattatattactactgtaactaccagctagcatttattaacttattatgtgtgagagactaggctaagtgctttcatatcatatactcctcacaatcacttcatgatttagggtctattttattttattttattttattttattttattttattttatttgagacggagtcttactctgttgctcaggctggagtgcagtggtatgatcttggctcactgcagcctccacctcaggggctcaaacgattctcctgcctcagccttccaagtagctggaattacaggcacgcatcaccacacctggctaatttttgtatttttggtagagatggggtttcgccatgttgccttggctggtcttgagttcctcacctcaagtgatccctctcaaaaaaataaaaataaataaaattactattcaaacctcattgcttaaaaaagggattaaaacagactctaaatcagccgggtgtggtggctcatgcctataatcgcagcactttgggaggccaaggagggcggatcagttgaggtcaagagttcaagaccagcctgagcaatatggtgaaaccccatctctaccaaaaatacaagttagcagggtgtggtggcgtgcgcctatagtcccagctactgggggtggggttgggggcgcggctgaggagggaagatcgcttgagcctgggaggcagagatttcagtgagccgggatccactccagcctgggtgatagagcaagaccctgtctcaaaaaaaaaaaaaaaaagaggtcggtcacagtggctcatgcctgtaatcccagcactttgggaggccgaggcgggcggatcacgaggtcaggagatcgagaccatcctggctgacacggtgaaaccctgtctgtactaaaaatacaaaaaattagctgggcatggtggcgggtgcttgtagtcctagctactcgggaggctgaggcaggagaatggcgtaaacccaggaggtggaggttgcagtgagccgagatcacaccagtgcactccagcctgggcgacagagcgagactccgtctcaaaaaaaaaaaaaaaaaaaaaagcttcccagatgattttgagatggctggtttacagactgatatttaggaactattggcctaactcctcattttatttgcagagttggagataaaaataaaattttaaaaataacaaaggacaaatgcctaattttatagatgaaactcaggctcaaagaagggaaatgaatgtcatgcaaaggtatgaaccatagactagacaccaggaaatccaagttatagacctagttctgcccctgtgtgaccttgtctaaattatttaatctctctgggccttggtttcttcatctttaagatgatttttgaggactcttaaaactctctctttgtatttatgaaatgcttcgtttttctgactgtgatattcccgtgaattctctaagaactattgagcttttcttcctcttgtgttcttatatgtgcctccctctcactgtggctctcttcttttgttaccgtgcttacccctggatttctttatcttacttctttcctttattctgtgattcttaatagtccaaagaattatcattataatattaggttttcctaagaaataaggtaaatttttgttttgttttgttttttgagacagagtcctgctttgctctgttgtccaggctggagtgcaatggggcgatctcggctcactgcaacctctgcttcccaggttcaagtgattctcctgcctcagcctcccaagtagctgggattacaggcgtgtgccaccacacctggctgatttttgtacttttagtggagacggggtttcaccatgttggccaggttggtctcgagctcctgacctcaagtgatccacccatctcagcctcccaaagtgctgggattacaggcatgagccatcacacccggcagaaataaggtagaattttaattttgcattgaagcttctacagttgtcacttccttaaaaccccaaatctcaatcctcattggtactttctcagcctacaccagtcattggtgataaatgcctttcatgaatccctattatagttagtacttttcctttaacttgattatataggactgcattgtattgtcttctaataaatttatggaggttaaaagtctatgatctgacagacttggatttgaatctcaattctgctgtatactgcgtgactttgggaagattactaacaagtctttctgagcatgaatttgctgaaccatgaataagcatacttgagagagttgtgaggattgtcaaatactaaatgagataagcctcaaacagcacctgatacataataaacacaataaatatcgagctccaccttatctcccaaagtagacttttgtagccttctgaggatagcaatcatttataatgtttgtgccattatacattattgctgaacacattttaattgcttgacctccaatttcaccaatttcctttgcgcttacattgggaacattaagtggttcaaaatccccaggatcaagatgtggcaaggagaatttaggaaagctgaatctgtagagggaatatctgagtgggagtacctgctccctgctgaaaagcagtctttttttgagatggagtctcactctgtcacccaggctggattgcagtggtgccatctcagctcactgcaacctctgccgcccgggtccaagcagttttcctgcctcagcctcccgagtagctgggattacaggcttgtgccaccactcccagctcatttttgtatttttagtagagacggggttttgccatgttggccaggctagtctcgaactcctgacctcaggtgatctgcccacctcagcctcccaaagtgctgggatggcaggcgtgagagccacagtgcctggcctgaaaataccatcttaatgtgtcttgtagctataaccttgacacctagaggactgtgattatatatttgttaaatgaatatttttcaatacctatggttgtcctaaatgttggatatttaatgaaaaaaaaatttttttttgagatggagtcttgctctattgcccaggctggagtgcagtggcacaatctcagctcgcaacctctgcctcccaggttcaagccattttcctacctcagcctcctgagtagctgggattacaggagcgcaccaccttgcctggctaatttttgtatttttagtagagatggggtttcaccatattggccaggctggtctcgaactcctgacctcaagtgatctgcccacctcagcctcccaaaatgctgggattacaggtgtgagccactgcttctggcctttaatgaatttttttttttttttttttttaagacagaatcttactctgccacccaggcgggagtgcagtggcrcaatctcagctcactgcagcctctgcctcccgagttcaagcgattctcctgcgtcagcctcccgagtagctgggattacatgcgtgcaccaccacacctggctaatttttgtctttttttgggtagagtcgaggttccccatattggccaggctggtcttgaactccggacctcaagtgatccacccacctcggcctcccaaagttctgggattacaggtgtgagccactgcccctggctggcctttaatgaagtttaaagcatggatcttgacttgaaagagctcaattcagatacagaaatggacttagatacagagctttctaatgataggttttatatgcttagtgctaagtaaattgaagaaactttaaagtgccataggcatccaaaggtggctgacatgtccggaaaggtgtaacagaagcaagacttcagctggactttgaaaggaggttctaagttagacaagccccaagagaagagggtagatattccagttgggggaaaggttgctcctagtagagtaggacagatgcgaaaggtatgtttggaaacagtaagaagatcggaatggttgcagttgagtcatgcaggggagagtgaaaggtagatagattgtaaatttcttcaggtcagagaccagttctttatcttcttgaaccaccgaaaacgtagtgaataaaaactgcaattgaattttatagggttgtagagagctttgaattctaaaactaaagtgatcaaatccgtaaaggattttgaatagagagagaggtgatgtgggctaagtggtgattaggaagatttgtcgaaataggctgtttgctctctatttgccacagctatcaatttttaactccaattccttatcttcagttctgactgctcttctgaactctagaccaaagattccaactgtctgtgagaagatcctcctaacacctcactctttgtcttctcctttacccaatgtaccctcaccaaatcggtaacctctttctgttttcattatcttgaagttctactctcctcccagttgctgtggctagaagcatgagaattgtcttgaactctgccattccttacccgccaccacatctaaaggctatttaaaaggctatttaaaatagctaaaggctattgtttctacctctacattgcatgacaacgtagaggtacctgccctcttctttactttcctgctgcctctgccctaattcatgctatttcaagatgtttctcctggtctgtcactggagacttctaactggttcttctgcctcttagtgtctttctggtataatgtggccttcagtccaaagccagattagtcttcccaaaacatactgtgggtcagaaaatttcagtggttctgctttgtctacttaattaagtacgtactccttactctagctttctgggtcctttgtgatgtcagctagctgttctgttagcctggttgctcatcacactgctaactgcatggtatggtcatgcatgtaatagccatactgttccctaaaacacatcctgtatacttacatgtctccaaatcactacttgtgctttgtaaattaaaaaaaaaaaatttctttttgagacagggtcttgctgtcacccaggctggagggcagtgacacaatcttggctcactgcaacctctgcctcctgggctcaagtgaccctcccacctcagccacccaagtagctgggaccacaggcgcaagccaccatgcctggcttatttttgtattttttgtagagacagagttttgtcatattgcccaggctggtcttgaactcctgagctcaagtgatccacacaccttaacctctgaaagtgcagggattatagrcatgagccaccatgcccagcctacttgtgctttttttaagtttggaatcctttgactcctttttgggctgccagaatcctactcgttatccaaggtttagttcagacaccgttcacttcgtagccttttgtctaagatcaggtatagttctatcacgccttccatgracacctcctacctctctgtgaggattaatcaactctatgcttgtgctatagtgtcattttgtgcagcttgtgtctggtgtgttatttgcttggtgttattgttaattatttacatgttgttctccaccactagattgtaaacttcatgcggtcacaaaacaggactattccaactctacttcccttctgtgtcagctgtggtatatcctttttagawttccaggtggttggtgtttctgggcttcttgaagcacttgtcatttttctgtggcctttggaaacaggagaggctcttctctcacttgttttktgaatggttcgtaatgtactgggactatgtgggtaggctatgttggatcagaacatagaattttgcccctcaaatgcaggctttcatttgacgtcaggcctactctcaaatttctcctagtagagtaggacagataaacaagtaaacagtgataccatgcaataagcacacaaactagtgtgtgtaagagatgggaaaagctcctggaggaggggatagttgagttgaaggctgaagaatgagtagtcagagaaggggagagctatattcacagagtatgtgcaaaggcatggaactgagagaaaacctgccccatttgcaggaaattttttaaacaaggctggaagtttttatggaaaggtagagggatgagtggaaggtaggcattccatcataatggatcttagctcccaagctaaaaagtttgactgttatcccaaatggaagcatcaggctttggaactgggtagagctgggttcaagtttgacttcatgacttaccttgtgatcttgggcaagctgcttcatctgtctggactttatttttctggctaacttacagagttgttgagcattagaaagaatagatacaaggtgcttagcacctaagtaggtgctgaataaatgctrtttaattttttttttttttttaagacagaatctcactgtcayctaggcaggaggagttcagtggtgccatcttggctcactgtgacctccgcctcctgggttcaagtgatcctcgtgccttggccaaccaagtagctggtattttacaggtgcctgccaccacgtctggctaatttttgtatttttagtagagacaggggttcaccaagtaggccgggctggttttgaactcctgacctccagtgatctgcccgcttctgcctcccaaagtgctgggattacaggtgggagccactgcacccagcctaaatgtcaactattaataatattgggagaataagggctcactgaaggattttaagttacaagattaaccttgccagaaaggttgctgacaccattgagaaggatggattacagcagggatatctgtcagaagcaaggagaaaagaagagttcagttttagacaagttgagtttgagatgagcatggaagttttaggaggccattggatatatgagagtggtaaaggcctgagctaaagatacagatttggaaattatcattgtataggtcacagctgaaactatggatgttcattaaatcattaagggagaatgtaaagaacagctatttttaatttttattgaaaagctatggacatccccctactcccccccatacacacatgacacaaaacattttgcatgtaattttaggtggttcctgaacactccctctccaaaacccattagtggactcttgggtccttggacatctgaagaagctataatacagaatgaaaagaaaagagggctaaggatgagtaatgtttaagggatgaacagaagagaagaaacaaccaaagaagaaggcagaaaactagggtagaatggaatctcagattcaagagagagagtcaatttaaaaggtgaaggaatgatcaccagtgtcttctgctacagagagtttaagtgagatagaactcaaaactatccattgggttggcaattaggtgactgtggggagagcaatttcagtgaatttgtggggctggaatccaggtcacatagaataaataggaggtggggaagtgaagtctgagtgttgtcatcatacttgttcagaagccaacaggagagaaccaggagagagagagagcagttgaagatatacagactagggagtattgttggattaagtttcctatggagaagagcagcaaagagatccagattttaggtagaaggactgacttagattctgaaaagggacaactctggcaatgaaactaaaataaaattaggataggtattgatagcatgatgctcagagacccttgttgacgaagatcagtaaagttggaaacaagtattaaatccttctaattaggccggatacagtggctcatgtctgtaatcccagcgttttgggaggctgaggtgggaggatcacatgaggccaggagtttgagatcagcctggacaacatactgacaccctgtctctacaaaaagtttaaaaatagccacacatgatggcatgcacctgcagtcctagatacttgggaggctgaagcaggaggattgcttgagcctaggggttcaagattatagtgaactatgatcatgctgctgcattccagcctgggaaacagaatgagaccctgtctcaaaacaacaacaaatagcaaatttttcttttttcttttttttttttttttttgagacggagtctcgctctgtcgcccaggccggactgcggactgcagtggcgcaatctyggctcactgcaagctccgcttcccgggttcacgccattctcctgcctcagcctcccgagtagctgggactacaggcgcccgccaccgcgcccggctaattttttgtatttttagtagagacagggtttcaccttgttagccaggatggtctcgatctcctgacctcatgatccacccgcctcggcctcccaaagtgctgggattacaggcgtgagccaccacgcccggccatagcaaatttttctaatttaagccttctaattcagtaacccccaagtaattaataaggtttaaagtgttaaatctgaaacttagatggacagtagggttctctgcttctgtagagatgctggtggtggggagtgggctctctcttgtttgtttatagcctttggtggggctgagattataaagaacattaaaatgaatattgccttttckttgcccgttttcctctcacataagggtactttctgagacttttacctcagttttatctttctgcctaaccttcaatgttagtcagaaagatctttgctaggcctgggttaaactagggatttatgtgcaaggagccaatataaaacttattaaatagtttgagagtctgagctattattctgaaggtcagcataattcttaaggttgcttcttggatttccttgctaaaaattaagatattaaactccaggcactgtaatattcttttatcctgaagtttaaaccaggaaagaactttcatgtaattgatgggcataccaacataggatcctaaaaaatgatcttccagctcttaggggcaaaggaattctataaaacccttttctgaggagcttatggctcagctctaagcaggctagctagtcttgggaagggcttgtaatcatgttgcctttaatgattatattcacaataagtacttaaacgtctttctcctgagcttaaagtcagctttttagcttttggaagcatgattggtatgaggccatcaggtttccttagtacattaccgttatggaagggcttggtagatgaacagaataatttatggatagtattttttttttttttttgagatggagtcttgcgctgttgcccgagctggaatgcagtggcacgatctcagctcactgcaacctccgcctcccaggttgaagcagttctcctgcgtcagccttccgagtagctgggattacaggcgtgtgccaccacgcccagctaatttttgtatttttagtagagacggggttttactatgttggtcaggctggtctcgaacgcctgacctcgtgatccacccgcctcagcctcccaaagtgctgggattacaggtgtgagccaccgcgcctggcctatggatagtaaaattaaaaagaatcatgctactcacatattcaggtctaaatgaaatgaggcagtggactaaaaggaaaccgaatgaattccacctcctttaaatacttactagtttaaaagaaaatctgttaaytttttcctttttcatctgtgtgttgtttgacctattacagcaaacatacatagcttttataaaaaaaagaaattataaaaaaaagaaaaaacacttctatctttagagtgagaatttttaaaattagaatcagactgtttttggctatgaaggtaatgaatatagtgaagcacagtgggcctgatatcgtgtgaaaatgtaatggacacaactttagttagctctgatttttccaccctgccttcttatctcagcacacaagtgatactggcgtgttgtgattttgttttttcaggcagggtctcagtctgttgtccctgctagagtgcagtggcacaatgatagcttgctgcagcctcaaactcccaggctcaagtgatccttctgcctcggcctcccaaagtgctaggattacaggcataagccaccttgcctggcatggttttgaggtttttagatattgaactggattcttgtaggtaactcagttctgayttcattttgtgtgtttcttttaccaatcttctaatcatacttggccaattgagaacgctctccggtggttttatgttttagttcttactatgtagaactttaggtgttgcaagttgtgggaaatacaaaaaagtaaatcatgttctcttcaaggagttaatgatctccctggtaatataagaataagcatattaaaagttcagaacactatataattatataagtgctgattgagtgattagcccagtaagtaacatagatatttggaggacacagagactgttgagaactggagttgtcagaaaaggcagccaaaatttttcttaaacacaaatctgagcatgtcattctccaatttaaaatctttcaatgcttccccttacctataggataaagttcgggttccttaagcttgtcatgaaaggtcttgatttggcccataccatcctatctcgccactacctagttgtctttcagctattcctaattatgtgcagttctttgaacataagctttttcttgtctccatgaatttgcattagctataactttatgtagcaactttattccttcccttctctttctggcttatactcatcttttaaggttagatagagtcactcctccttgaaacttcattaagtcccccatatttcctgtccctacccaggtaggcttaacctcttatgttcatgagcactctgtgcttacctgttatagcacttaatcaacctgttttgaagttgtttctcttatttaaagaataaatgaggccaggtgcctgtaatcccagcattttgggaggccaacgcgggtggatcacctgaggtcaggagtttgagaacagcctggcccatatggtgaaaccctgtctctactaaaaataaaaaattagccggacgtggtgggtgggcacctgtaatcgcagctactctggaggctgaggcaggagaatcgctggaacccagggggcagagttgcactgagccgagatcgcaccattgcactccagcctgggtgacaaaagcgaaactctgtctcaaaaacagacaaaaaaagggaatgaacgaggtggattttaaagaataaataccatttggagagatgaagaggaagagaagtagccagtcatgaagggaaaataagtagtatgagcaaagagtcagtgatttcgatgagactatagttggaagctgattctgattcagtctgcagatgacacgggcttggaaaggttgatgaagatgttggataactgaatcagcatctaaaaagatcaaaatatgttggaatgacagtgatcaaatctaatgagaatcctggctttagatactttcaagactccattaagtgaaagatggattaaacttttaagtctaataataatacttttttatttttttgagatggagtcttgccctcttgccaggctggagtgcaatggcacgatctcagctcactgcaacctccgcctcctgggttcaagcgattctcctgcctcagcctcccgagtagctgggattgcaggcatgcgccaccatgtccagctaatttttgtatttttagtagagacggggtttcaccatgttggtcaggctggtcttgaactccccacttcagctgatctgcccacctcagcctcccaaagtgctgggattacaggcgtgagccaccacacccagcctaataataatacttctaacagtcccaaatgagagtcaataggcagaagttacaaggaaagcagattatgacattttatagaattattacattggtactttgtcttatgaattagtgaattctctattatcctaaattttaaacatcaagaatattgtagatttatgggagatttggagagacctttcaatgtgaacttatgattctttgttgttgaagggatttgtgtgtcagcagagaattagactatataatttctaaggtccataccttagtgctgtagtttatagtaggaagaaaattgttccttgcaaagcaagaaaggattcaaggccgaaaagaaggatgtgaggataaaaccagagaccaagataagaaagtacttattgaatggctataaactcaaaaaaaataaatagataaatatattcacctgggatgtagaacaagcattgacattgtttggaatggcagtatgttggcttttcctaggggatcaataagaagaaaataactgggcttggggagaggacctggctgaagcttgtatgaattactagtgaaccagatttatatacctctgcaactttcttccgaaatgttctctgtcttggaaaagatatggaagagtcaagcagcgggcagttatggtaatttaggtttgcagattgtcatggtgaatgtagtagtaggcagttaggcagggggagttcctggggtattagtgagggcagctttgaattgcataaccatgttgtctagcatggactgggataatcttagatgttctttttctttttatgagattgtgtcttactctgtcacccaggctggagtgcagtggtgtaatcacggctcactgcaacgtccacctcccaggttcaagtgatcctcccaccctcccacctcagcctcttgagtagctaggactacaggtgcacaccaccacctggccaatttttgtatttttagcagaggtggggttttaccatgttggccaggctggtctccaactcttgagctcaagtgatccaccggcctcagcctcccaaactgctgggattacaaggcatgagccactgcaatatgtgtgtcccaaatgccaaggcctggctgtagatgtccttaatgaatagggtaaaataagaatggagtgattgaaggttgagaatgattaggagagggtatgagagactgataatggtaagtgctaaataggtatgtttggggaaggaataaggcccaaaatgtggcagtgtggtggctggacatgaattggagatgagtgccagtggagccaagtaggcacagatgcattgtcacatatatcttcacgtatatgtagagatgataaatgaaccaagtcatcggggaaggctaaggtagatttgccatgtggaaggggataggccacggagcatggtcaatgacagtgaggatgatttgaacaagaggttatatgggatggtgtgggctttcagaaatagaaaaggaccaggactgatggctcactggtctagaaatggctctggggaattggcaggagtcggagaaagtaagtcctttacaggataaggcctctgtggagcagtcattgtcaagcattgacagtcatgtttttgttaaagaggtaaaaaaaaaaaaacctggagaaaaaaggagtttgctgctgtgacaggagaaggtagagagggaagagatgtgcagtgggggtaagctgggcagctttgagagtttgattgttttgataatggctggtaaagaaattggaatgaaggaattcctggggtaggagagggagggagttgggcattcctcaggcagatcagcacatgaagagtgaaatttaaccactgcaatatgtgtgtcccaaatgccaaggccaccctgtctgttggtggtatcacggctttggctttttgaagcttgttgtgagggaagtggggaatcagtctgctccctgctctgctcaaattattgtgctaaggagactttgccatggtwtgatttttgaggcacrtgrtgattctgtctgatttgtaaactgacaacgtgatcagggccaaagaggaagttcagctaggccaaaccttmctaagaagaagtcactgtcccacagttatgtgggtaagttgttctagagaaacagagatgtgggcagggcagcagcgtgggaacctgttacctgggtagcactaagccagtgccttctctgtgtttcctttacagatgaacgggaccgggttcagaagaaaacgttcaccaagtgggtcaacaagcacttaatgaaggtaggaccctttcatatatatgctgccccagcacctctcactgctctcatctggatctgtcattccttctttcagatggtttagattgcttgctgtgtgctcaagtctatgaagatacacatgtgacttttcttttctcttcttttcttttttaatagagaaggggtcttgccatgttgctcaggctgttctcaaactcctgggctcaagcaatcctactgcctcagcctccaaagkgctgggattacaggcatgagccaccatgcccagctttttgaaaactaatatagtcataatggcatggaaacttgtattaatctgcttcttggtgaagacattattacctaccattacatcaggaggcagaggctgaagataccatgggatgattttaaaaattcgaagaacagtttattcctagctttatacattgctttataagcctgtttctttttttttttaatttattaatttattttaaaatagacacagggtctcactatgttgcccactctggtatcaaactcctgggctaaagcgatcctcctacctctgcctcccaaagtgttaggattacaggcgtgagccactacacccagtgtatttttattttttaatctgaatactatggaaggatgatagagggggattttctctctttctcttaaagtgcatgaatcttaaatgtttaacttgatgaatttttacatgaattttaccaccaggtagtctaaaatacagaatatttccagaatggttagggctgaatgaagattattattatcattattattattttaaatagaggagaaaccataacagaggcatgttaagactcacctaaagataataataataattgttatatattagatatataaaatataataataatatattattatggtattattattttaaataaaagagaaaccaaaacagaggcatgttaagactcacctaaagataaacagtatgactactgtggcagttagaatctgaaaacaaagtttttgaattataataataattagtgcttctctgggaaagggaaaggtcaccagtgatcccttaattgccctatccagtagcctagttttatcttcctcttatttgatttctctgtagcatttgatactgtcgtctactccttaaaaccctctcttacaatgacttctagaacattgctttttcctgaattacctctttcctctatgaatgcctttttttctgcctgtttcactggcttttcttcctctgtctgactcttccatgatggtgttccccaggatcctaaccttggccattttttggttttgttctctgtattctttttgggcagtctcatccattgtagctgctgggattgttttgttgcatgggatgcaaagaaacataagtagaaatggatatgggatgatctcacagaatctgatgtctagatgcagctgggctttatgaaaactaaacagttatcagaaaactactctcatactctctttgttttttttttttttttttttttgtttgtttgtttctttgtttgtttgtttttttgagacagagtcttaccctgttgcccaggctggagtacattgggaagatcacagctcactgcagccctaacctcctgggcttgagtgattctcccacctcatcctcctgagtagctggaactacaggcatgcactaccacacccggctaatttttaaatttttttgtagagatgggttctcactgtgctgcccaggtctttcttgtttttgttgttgttgttgttgttgttgtgttttgttttttgttttttgagatggagtttcactcttgttgcccaggctggagtgcagtggcacgatctcggctcactgcaacctccgcctcctgggttcaagcaatactcctgcctcagcctcccgagtagctgggattacaggcatgcaccaccacgcccggctaattttgtacttttagtagagatggggtttctccacgttagtcaggctggtctcgaactcccaacctcaggtgatccacccacctaagtctcccaaagtgctgggattataggcgtgagccactgtgcctggccaacccaggtctttcttgtttatggggccttgtgttctttcattttacttctgtgtgcctcctatattcatttctctgcttttcgtttattgctacgagtgagccatggcggctgtgcctcaaacagtgacgtaaacccctgaggccacatgattctggatgcacaaacacagaaagtctgatgggcttaggtcttcttttcctccatgggccaattgtccatctatagttcagtaaaccgtgggtaaggaggtggttacataaatcacacatgtcttcttagggccacttgtttagtgggtactgcaggtgagcatgattttaacactgcaagatctggataaggaggcagtgatagagccttttcttggattcttgcctaagccaaaggcaagtgtcatggtgtattttacacattcatctgtatgttacctagccatagctttttttttttttttttttttatttatttttaattgataattcttgggtgtttctcacagagggggatttggcagggtcataggacaatagtggagggaaggtcagcagatacacaagtgaacaaaggtctctggttttcctaggcagaggaccctgcggccttccgcagtgtttgtgtccctgggtacttgagattagggagtggtgatgactcttaacgagcatgctgccttcaagcatctgtttaacaaagcacatcttgcaccgcccttaatccatttaaccctgagtggacacagcacatgtttcagagagcacagggttgggggtaaggtcacagatcaacaggatcccaaggcagaagaatttttcttagtacagaacaaaatgaaaagtctcccatgtctacttctttctacacagacacggcaaccatccgatttctcaatcttttccccacctctccctcctttctattccacaaagccgccattgtcatcctggcccgttctcaatgagctgttgggcacacctcccagacggggtggtggccgggcagaggggctcctcacttcccagtaggggcggccgggcagaggcgcccctcaccttccgggcggggcggctggccgggcagggggctgacccccccacctccctcccggacggggcggctggcctggcagaggagctcctcacttcccagtaggggcagccgggcagaggtgcccctcacctcccggacggggcggctggcctggcggggggctgacccccccacctccctcccrgacggggcggctggccgggcggggggctgacccccccacctccctcccggacggggcggctggccgggcggggggctgacccccccacctccctcccggacggggcggctggccgggcggggggctgacccccccacctccctcccggacggggcggctggcctggcggggggctgaccgccccacctccctcccggacggggcggctggccgggcagggggctgacccccccgcctgcctcccggacggggcggctggccgggcagaggggctcctcacttcccagtaggggcggccgggcagaggcgcccctcacctcccggacgaggcggctggctgggccgggggctgccccccccacctccctcccagacggggtggctgtcgggcggagacgctcctcacttcccagatggggcggctgccgggcggaggggctcctcacttctcagacggggcggttgccaggcagagggtctcctcacttctcagacggggcggccgggcagagatgctcctcacctcccagacggggtcgcggctgggcagaggtgctcctcacatcccagacggggcggcggggcagaggcgctccccacatctcagacgataggcggccgggcagagacgctcctcacttcctagatgtgatggcggcagggaagaggtgctcctcacttcctaggtgggatggcggccgggcggagacgctcctcactttccagactgggcagccaggcagaggggctcctcacatcccagatgatgggcggccaggcagagacgctcctcacttcccagacggggtggcggccgggcagaggctgcaatctcggcactttgggaggccaaggcaggcggctgggaggtggaggttgtagcgagccgagatcacgccactgcactccagcctgggcaccattgagcactgagtgaacgagactccgtctgcaatcccggcaccttgggaggccgaggctggtggatcacttgcggttaggggctggagactggcctggccaacagagcgaaaccccgtctccaccaaaaccagtcaggcgtggtggcgcgagcctgcaatcgcaggcactcggcaggctgagtcaggagaatcaggcagggaggttgcagtgctagccatagcttttatttaacacaccctaaattgttaagtattttcactcatgtagccagttgttcaagttaggaacctatttgattcagtactgcctataatctctcccttgttaccaagtccagttaatcacttgtagctcagaaagattgcatgcatctgtcttctcttctccatctccatatcgctgcttttgttcagggcctctgtgtctgttgccttgaccattataatagtttcctaataaagttttctataataacaatggtagtaatagtatcttgaagacttcctgtaaatcagacgtattctctctctgtgtgtgtgacagggtttactctgttgccaggctagagtgcggtggtacaatcatagctcactacagcctccaactcccgggctcaagtgatcctcccaccacagcctcccaaatagctaggtttataggcacatgccactgtgcctggctaatttttgtgtgtgtgtttgtagagatggggtcttggtatgttgcccaggcttgtcttctactcctgacctcaagtagtcctcccaccttggcctcccagtgtcttggaattacaggcatgagccaccatgcctagtctaaatcagacattctgtataytaagtcctttacatggattatttcatttaatccttcagtgatcttatgctgtgggttctgttaatatccccattttataaattacttagagagggtaagtaatttgttcaagatcatgctgctagaaaaaggcagaactgaaattttaaaattcaggcaacctaaagtctagaaaccgtgctcttaacccatgcagaactggctctggttgctgcctacctttccaggctcatagcaccaagtttccctcataccttgagttcttgctgaactatgtgccatgctattttatgactctgtatctttgttcattctgctccctgtgcttggaatatctttcccaagtttgttctgcctggataacacaaacttaacacctcttcagtaagtattttcctgacttctctgatgtggaactgactagcctttctttgtgcccctgactatactccttatgtgcttttgttaaagcatccagagtgtttatatacatggtgtatctttcagctatattatcactggagggcaaatattgtgtcttattgtttatagtgttaggacaaagaagaaagagagagaagtaaggagaaaagaaattgtaatttccttttttttctttttggagatggagtcttgctttgttgcccggctggagtgcagtggcgcaatctcagctcactgcaacctctgcctcctgggttcaagcgactctcctgcctcagcctcctgagtagctggaactacaagcatgtgccaccaaagcctggctaatttttgtatttttagtagagacagggttataccatattggccaggctgctctcctgggcttgtgatctgcctgcctcggccttccaaagtgatgagattacaggcatgagccaccgcgtccagccgtgatttccttttgtaaatttcttccatggctactagttgcctctagagtttgatgtcacctaactctktcctgatgtagagcactttgcagcgtttccaacccacctgtctagcttcatttctaagcactctgttttttgtagcttgcgctatagccacatgagacaactcactgccccctaaacactgtgtactttcacacctccttgcttatttatttctctccctagaatgcacgtcccagcctcctctgcctgaccatcacccacttcaccttctaggcccagctccagtatcaccttcctgagattctgacctctgttcctcagattaaatcaattgcaactccatctgtatttcatactgccttgaagagatgcctgtgtgttcactcatcgatgttctctgttacagtactcattgaggactgggattgtattatgctactttctctgttaagtgctgcacatagcacatgagaagtatmcaataagtacttgttaccttgagtaactaatatttcaatagtgttatagcgtatgaagcacattcttatctgtcttaatccttaaaataaccctgaagtaagtaaaggtgttttatccccttaattttaacagctagggaaaatgagaattagaggagtgaagtgactttgccaaaacgatacagctagtgagggatggagctaaggatcaatcaatcatgaatcttctgatcaaaattacttgttcttcctgctaactatgcccccagctgattctttttttttttttagacaatactgatattaattaaacgtaaggtaaactccaggcatccgtcatctttcagcctaaaaattagcaaaaactgttgaaacaaggcagttttttccccattatttcttacgttgtggctccagttacaaaaaaattttaatgaaaacgttaaacataaaaatagaagtttgagattttaaaaaagtatataaaaagccccacaaaacttgtcaatgttgttccttattctacaaaatagcaccagtaagaagagtaaaaggtgttaaaaaccattacgacagcatttctgaaatacagcttgtctcaactcccgttctccctaaaaacgacttctcatggaataaaaaaggatttaaaaattgccagagggagcaccgagctttgactgcagttttccctgtcatctcttaratgaagggaaggtgtgagaaatgtgcgtctgtccctgactgctgtcaccgcttctgagtttagtaaaaagatgagaaatgaaggtagcagacttctcatctggggacctgtgcctgtggagggtaggtctcttggagagggaatgggtttgaggggttgtcttatctaagctccttccttcacacttgtctcctagggaagagggagatacagaggagccaaatatatgacagcttatattatagaacttagcacaccccttcctgagctccccagagggttctattgcagtcactgggagggatttagctaagagtggcccctgcccttgggtttggcccctagctgattgtttcatactttgtctctaaccgttggaggaactgaatcaatcctaccttgagcttgtcccctgaactttgtagttgaattccagtgctctggctccttgctgcctgtttgtagctgatgctgcctgttggacctctgcctcagtgctgtgtgatgacaggaagctcagggagggagaagctagaggaacacatcatagcattgttagaaattggaggccagccaaagcttttcttaaatccttggtgatttttcatctcttcccaggcccccagccttacagtttcaataacatttgctcatcttgggatatttcagagagagattcactgctaatcagagttattgctctaaattggaattatttgattttgggctgagaattagggattgagatttttttttgcgactcaagcatcctttgctttgctccccaagtacaccccagattaatgccatctttggcaggtagaccaacgtaaggacaaaaccaaccaggtggctaggcatggtggttcatgcctgtaatcccagcactctgggagaccgagggggtggatcacttgaggtcaggagttcgagaccagccaggccaacatggtgaaaccccatctctactaaaaatacaaaaattagctgggagtggtggctggcgcctataatcccagctatttgggaggctgaggcaggagaatcgcttgaacacgggagatggaggttgcagtgagctgagatcgtgccaccgcactccagcgtgggtgacagagcgagactctgtctcaaaaaaacaaacaaacaaacaaacaaacaaaaaacaccacaaaccaggtctcccaacttctagatttagttgatcttggaatctcttggattccctgataaccttttgggaaacagcttactttgggataagcaaattaattcctccttattgagaacacttctgatccaatcttaaaagagatttgttaaggatataagcatctgaaataaacaacctaatttagaatgtaaacatacatatgtaagggttctgcttatataccagaaccatcaaaaagagaaatctaggtttctaaatgaggtcttatttaaattatctatgccatatctctgggtgctgttagctgataaagtgtatccccctaaagagaacatgaaagtatgaactccttaggagggagaaaaatgctttttctggtcagttcctgttgacttcacaggttagtagttagaaaggaaaagcccagtatttaatctagcagatagagcagttctttccmtttttgtatatgcaatctagaagcccctggctttcctggaattttagataaaatttccatatataccagcaaaagttttcaaatttttaataatgcttacaaccaacccttccttccttccttccgtccgtccgtctttctgtctttctgttttaagagacaagttatccctatgttccctaggctggtctcaaactcctgtgctcaaggaatctttggccttcccragtgctaggattacaggcatgagccaccacacctggcccacttacactttctctatttctgtttgagactctctagttgaatatggggtagcactgattccaggtattctgtcctatacagcctctgttttggccacatgagtcaattcactggctccctaatcactgggtggaacttcatactttttgcgtattcatgtctatgggaaataccagaatgagacgggcagtggagtttaatttaagaaattgacaaagtagtgctggttagatgctaaggaaaggagtgttacctttgttgcctacatgtgaytatatggtartggtttgtggctgtctttgcctggacctgattttttagggcttaatttcactctaaatgcttctcaggtctacatatgggcctatatttggacttgggctttactctggattttctattccctgtgcttaagtgcctgcctatcaaagtaaagctacattttgtggattttatttttttaagatggagtttcactcttgttgcccaggctggcatgcaatggtgcgatcttggctcactgcagcctccgccacccgggttcaagcgattctcctgcctcagcctcccgagtagctgggattacaggcatgtgccaccacgcctggctaattttgtatttttagtagagaacagggtttcttcatgttggtcaggctggtctcgaacttctgatctcaggtgatctgcccatcttggcctcctaaagtgctgggattacaggcgtgagccactgcacccagcctgtggattttagaatcatccacattcttagagaatctgttaatccgggttgaccggtaccactgttaaatttctcacaatttagggaattctcaaaacagagatatgataaaattcttatatgcaaagaacctcacactttgttcccctcccacccccgctctccaacagggattcccagctgctacttttattccctgcatttaagcatagttctttccagagtaaagaagtctaggacaactataatctgttttttttttttttttttagtgttgggcttttccttgaagacaaatttggccaatgaatcaatatcggtttctgtttttacaatttggagatctgccattcagaaatctatctgaaattactaggctcactttccctttccctgtatcttttaataagtgtaggagagagtaaataacattacttttctctttaaaactttctcctctgccctatatattgctcttcaacatagtttgrgtcaaggaaattgggctgcttacgtttccttttaattgtttagaggaaagatttctagatcaagttttcggcaggtgtcaatactacgaggccaggcatggtggctcacgccagtaatgtcagcactttgggaggccaaggtgggtgaatcacttgaggtcaggcgttcgggaccagccttaccaacatggtgaaaccccgtctctactaaaaatacaaaaattagccgggtgtggtgatgcatgcctgtaataccaactacttgggaggctgaggcaggagaatcgcttgaaccctggaggcagaggttgtagtgagctgagatcacaccactgcattccggcctgggtgacagagcgagactccatctcaaaaaaaaaaaaaaaaaaaaaaagagtactacgtgacaatccttgctcttttttgtgtatgtatggcggggaggggggactcttattatttaaaattgataatctgtcattttgaccctccaagcatcatagaagccttgttaagagagtcaggagacaatgatctggacccagctctgatactttccagctaagtgatcttatacaagttatttagcttctctaggcaatggttttctcatctgtaaactgagggtattagaattaagtaatctttaaagtccctttgggctaagattaggattccaagcacgtaagtgtaacttactccttttgttaaagccactgagaaattgagggaagctgtttattttttcatagctttaagctaatctttaaaaaatggaggccgggtgcagtgctcacgcctgtaatcccagcactttgggaggctgaggcgggtggatcacttgagaccaggagttcaagaccagcctggccaacatggcgaaaccttgtctctattaaaaatacaaaaaaattagctgggcgtagcagcgcatgcctgtagtcccagctactcgggaggctgaggcaggagaatcacttgaatccaggaggcggatactgtaatgagccgagatagcaccactgcacgccagcctgagcaacagagtgagactctgcctcaaaaaaaaaaaaaaagcagacagcagacccctccttgacttattaatgcttgggcactggggaggattggacttggtctctcaaaatctaattattcactaattttaagaaatcactatatggctgggtgtgatggatcaagcctgtaatcccagcacttcaggagggtgaggctggtggcttgaggccaggagttcgagactagcttgggcaacatggcaaaaccccatctctacaaagaatagaaaaaactagccaagcatggttgtatgcgccttgggagactgaggtgagaggatcacctgagcccaggaagtcgaggctatagtgagctgtgatcgcgccactgcactctagcctgggtgatggaagtgagaccctatctccaaaaaaraaaaaaaaaaaaaactttatggccagcacagtggcccacacctgtaatcccaacactttgggaggctgaggtgagatgatctcttgaggccaggagtttgagaccagcctgggtaacatactgagacaccatcttgcccccgcaacccctgtctctatgaacattcatttacaagtttttgtctggacgtatgttttcagttctctttaattacatacctaggggcagaactgctgggtcgtatggtaacttgtgtttaacctgttagtaaccatcacattattttcgaaagcaactgcaccattttacatcctcaccagcagtgtatgagggttctagattctctgcttttttgctaacacttatctgtcttttataatatagacatcctagacagcgctaatcactgcggttttgatttatgttttccttatggctaatgatgttgagcatcttttcatgtgtttattagccatttatatatcttctctggacacatttactaattttgacaatgattttctcagggagtgcaaacaggcaaggccctgaattgcagttttttactcatttgttgacagaatggtataattatttgttagaaagaagcatccttattgatgattcctgaacagtcttgcttcagttggctgcttctaaaactttttctttttttgagacaggatctcactctgttgtccaggctggagtgcagtggtgtgataatagctccctgcagcttcagtcggctgggctcaagcaaccctcccacctcagactcctgagtagctgggattgtaggcatgcaccaccacacctggctgacttttaaaattttttgtagagatggagtctcactgtgttgccctgactrgtctcaaacycctgggctcaagtaatcttcctgtcttggcctcccaaagtgctgcaataacatgcttgagccaccgcacctggccttctaaattttgatgcttagtccactggtcattttcctaagagatttgtggaaaacttcacaggcaaactagtatgagcagaagagatgaggattttaggatggatagatctggatttgatcagcctggcaatttagtagatgtgtgattttggggatgttaattgagccctccaaatccgatctctgtgtctgaaaaattcctgacacagaagcacccagtaaatgttagctagttctttactcttctttaggtagagctgtgtctagtatgcttcagaaacagactgctgttttctttattgacagttttccaggcaaggaaaaaaaaatctctttgcattctcctctcccattacctctctctgtatctctttgatagttttatttatttattttttattaaaaattttttttgggggggacagagtctcactctgttgctcaggctggagtgcagtggcacaatctcggctcactgcaacgtctccctcctgggttcaagcagttctcctttctcagcctcctgagtagctggaatgtaaggcgygccccaccacgccccgctaatttttgtatttttatttatttattttttgaggtggagtcgtgcactgtcacccaggttggagtgcagtgtcgtgatctcggttcactgcaacttctgcctccgaggttcaagtgattttcctgccttagcctcctaagtagctgggattacaggtgcctgccaccacacccagctaattttttgtatttttagtagagacgggatttcactatgttggccaggctgatctcgaactcctgacctcatgatccacccgccttggcctcccaaagtgctaggattacaggtgtgagccactgcacccagccatttttttttttttttgaaatggagtctcgctctgttgcccaggctgaagtgcagtggygccatcttggctcactgccacccctgcctcctgggttcaagcaaattctcctgcctcatcctccccagtagctaggattataggcgtgtgccaccatgcccagctaatttttgtatttttagtagataaaaggttttgtcatgttcactaggctggtctcaaactcctgacctcaggtgatccatctgcctcggcttcccaaagtgctgggattacaggcgtgagccaccaccctggccaatttttgtatattcagtagagcgggggttttgctgtgttggtcagggtggtctccaactcctgatctcaggtgatctgcccacctcgacctcccaaagtgatgggattacaggcatgagccaccgtgcttggccagtagttttatttttatagttatttggttactatagtcagacaaagattgagaggcataataagctagttctcatctaaatttcttataatatgtacaagttttgctaccacaggtataacacataaccagaattttgagaaagaaacattagggccttggtgtgaaattaactttacatttcaagttgcctcctttgtcttttcagtactctgtagtgtttaatatctgttgataagatgacctcacttggtcctcaagaccaactgcaatttatttttattattattatttttgagatggagtcttgctctgtcacccaggctggaatgcagtggtgcgatcttggctcactgcaaccccctccagcgcgattctcgtgtctcagcctcctgagtagctgggactacaggcatgtgccgccatgcacaacttttttgtatttttagtggagacagggttttgtcatgttggccaggcttgtcttaaactcccaacctcaggtgatctcccagcatcagcctcccaaattggtggtattacaggtgtgagccactgcgcctggcaacagcaatttatttaaatatttattcaggttgggagtggtagctcacacctgtaatcccaacactttgggaggctgaagtgggaggattgtttgtacccaggagttcgagactagcctgggcaatatggcaagactgtgtctcaatcaatcaagcaatatttattcattcatttatttattcattcattcattcagtgtcctcctgatttttattccctatgttcagatcttatctatcaaaaataaatccctcatttaacttagttctcttcttaatccttaatgtcaagtatgtaatattttctgactttttaaaaaacctaccattaatttataatctgattttcactctaccactctcttgagaaatagtctcacaaaagcactcttacttatttgtaggaaagttaaaaaactttcttagtctttatcctccttgacttctgctgtagtatttgataccggtgatcattcctatcttgattacactttcttgtatttttgcttacctctttcactgttattgttttgttttgtctttttcttctgtcctttgttgattgcttttccatctcctgccttctaattttggctgttccctgaggctcagtccttagcactctgctcttctatcttactcctaatccagaaagcccatttccatgtctttagctagcacctctgtgcatgtgacttctaaagttctcagctgacccaaactgaattctggtatttccagctgcttcaagaacattttcatttgtaacttctttgctgccattttaaattcaacatatttaaaattgaatttatcaaatccactgcccttttaacaaaccttatgacctgcctatttctgttaatggtccactactgttgttccacactgcaaacttgaaaccttgggtctatttgagggaggggtttttgtttttgtttttgagacaaagtttcactcctgttgcccgggctggagtacaatggtgtgatcttggctcactgcaacctctgccttccgggttcaagcgattctcctgcctcagccttctgagtagctggaattacaggcgcccacgaccacacccggctaattttttgtatttttagtagacacggggtttcaccatattggccagactggtctcgaactcctgacctcaggtgatccacccacctcaggctcccaaagtgctgagattacaggtgtgagagggaggggttttgaaatcttggagcccctggtatgctggagccagcttatggactcatgagagccaagtgttaaattttcagcaattttgtgagctggttgctaaacatagcttttttttttttttgagacagtcttgctctgttgcccaagctggagtgcaatggtgtgatcttggctcactgcaacctctgtctctgaggttcaagggattctcctgtctcagcctctcgagtagctgggattacaggtgcataccaccatgcccggctaatttttttttttttttttttttttgagacggagtttcgctctgtcgcccaggctggagtgcagtggcgcgatctcgactcactgcaagctccgcctcccgagttcacgccattctcctgcctcagcctcccgtgtagctgggactacaggcgcgcgccaccatgcccggctaatttttgtatttttagtagagacggggtttcactgtgttagccaggatggtctcgatctcctgacctcgtgatccgcccgtctcggcctcccaaagtgctgggattacaggtgtgagccactgcgcccagccacagctattattaaaaattaaattatgtaaacatacaattaaataaattatatttaaagtaaatgtaatatatcctcaaagctgttcatttcataattgttttgctgcatgttagtattgtctgtactcttgaggttatgtctgttgtgtctctgtgatggaaatactgtacataatggtgtgctactgtatatttcttcccaacattgcatttagtgatattatattagtagcttgaaattggttgtattgggaatatttacatcatggaaatcagcaaattctacaagtttgagttagatgtcttgttttgtttattgtttagacttaagaaagtgatggggaaaatgttaatattgcagattaaatttaaaagtgtgggccgggtgtggtggctcacgcctgtaatcccagcacttggggaggctgaggcgggtggatcacaaggtcgggagattgaggccaacatggtgaaaccccgtctctactaaaaatacaaaaattagctgattgtggtggtgcgcacctgtaatcccagctactcgggaggctgaggcaggagaatcacttgaactcgggaggcagaggttgccgtgagccaagattgtgccactgcactccagcctagtgacagagcaagactctgtctcaaaaaatgtatatattctttcagtttttaaagctattttccagttcatcatgaaccatcttccccagttgtataacgtacctgtcaccttcttatttctttacacacatacatacacacataccttgcatatgtccatctctatgccaagtcttatgtggtttttccgtcttctttctactaaaacatttgctaatcctccaagtcccgtttcttcgaggaagtctttacgtatgtttccattctttatcttgtccagtttccattcttatcctactttctttttttttattatttttttcagacagggttaaaaaagaaacccctcattacaaaagggtcttggtttgtcactcaggctggagtgcattggtgcaatgataccttactgcagccttgagccttaaactcctgggctaaagcagtcctcctgtctcagcctcccaaagcactggtattacaggtgtgagccattgcacctggcctcctsctctactttcagagctactttgaatattataattggaaaggacttcagttttccacacaaatgtaaaaatccccaaatccccagcctctactcaaaaaattatagtaactaaaattctactacttctgaaagtagccctttctagcgttgtctggaaaattaatatattaaaaatcaatcttccttataattttcacaagtcttcccattctgtgttgtgaacatcaccttttttttcgagacagagtcttgttctgtcgcctatgctggagtatggtggtgtgatcatagctcacttgcagccttgatttcctgggctcaagtgatcctcccacctcagcctcctgagtagctgggaccataagcatataccaccatgcctggcttttttttttgttttgtagagaagggggtctccccacattgcccaggctgatctcgaactcctaggcttatctcaaactcctagggtcaagggatcctcctgccttggcctcctaaagtactgggattgcaggcagaagccactgcacctggcaatgagtatcacttaatgaagtcgtcactagactgggactgaatcagaaatccarttgccacttaacttatagctaagtgaccataacatctcagaacctcagcttccttggtttctttgatggaatggtggtaataagtaaacttcacaaggtaattgtttggattaaataaatagaatgagatgatggctgattataaagcatagtagttaatggcaaagactaaaatcagatgaaactgaggccggtttttccacttggtgaccttgggcaatttacttaacctctttgtgccttatttcctcatgtgtaaaatagaaataataatactacttaccttagagatgtgagagatagataacatattaaacatttagtaccatgtttgatattaaccacactttctcccaaagtgagatctgtttttccatagttccaattttaaagttaattggaatttcccacaaagaaaattattctgaaattcgctattagaaatatttggtgtaagagaagggttaaattggaaatacaccccaggaaacactgggtgcctagcatttagtttcctttgcagcactctagaaggcttttctgactctggctggactcatctacccatcattcgccatgctattacattttggctcatagtaactcctaagrtgtctcaggataattaagactccccatcttcttgtccaaactttctaggacgttgttgcatgttggttagagtgtgtaatagatctggcatcaatttaaaaaacacacacgtttctggtaaagtattatcatttcacatgtattttattccaatctgaaacttcctgaattttattatttaattgttgcttccacttttaaattctttaatttgtgtttacctagaaccagagatttttatgtggatagtataataattcaatatcaaataaaaatctgtctgtttcactctcattcacaggtccgcaagcacatcaatgatctttatgaagatctgcgggatggccataacctgatctctctgttggaggtcctctcaggcatcaaactggtgagcttctcctaatgaatggcctcacaattgtggccctacaaatgacatattggtccatctcattgagtgcaagggcagcagccatcactgtttcatctattagaggggaggaagaagtagaaggaaatgttgggggactttatttctaactcagacttagaatttacaaattatataatttaaattgatgtattatatgttctcatttcttgatgaaatgagaaattagttataatcctttttatatctgcatgtttttgcattactttttctttattttctagatactaatatttyagaaacagtagattcatgtttaaaggtttttttgaattaggtgtatttttcttcctagagctctagtctatatagacgcctctcattttccaatctattgtgaatttttaaaattttatgtattcagctaaagacctgaagtttacatttaaaagcccaggtgtatgaagttatttttttttccaaatcatctcactttctcccttctgtgattcattgagtcttacagatttggagagctgccaaagttgtctgagcatagccttggatatagaacatctgggctccttgattaattaatatgcctgcttcttcccaaaatgttctaacattgattatgggaaacacctacatatctgagggcaaatcctgtctgagcttcttgccttgccaaatgatagttcttctacttgctttgagggatggaaatcacccacttgtaggcctactgttttctatatttgagcctaatgggagcaggtgattccatatggttcatactctttctctcatgccatagacaacataattttcatttagaaaagtccagggttgaatactggaaatatctgtggagaaatagagaaccaaagagatgtatagctcaagtagtctgtgaagaccagcccactcactgcctttcttagtcattgtttgttgtgtttaagtaacagaatttggcacatttgattttactgcctaagtgatattcagctccttctaggattggggcttggcttccctgggtcctttgttttggtttcgtatctttttttttgccttgcaatagaattaattatatattttttaatggcctaaaattgacagaagcttttattagcatagccggcacatttaatttctagttcttgctctctggctcgtgtttataagtctaataagtaatcagaattttactttcattgtgctggactttattcttcaccactcacacagttacattttgggcaatgtgtctggtacatttaatgaatttgtaatgattttatattgaaaagtgatcttttttggttgtattgcttacgtaataagttgaaactatgtcaatctaatttcttttcctaacctttgaaaacctttaagtgtttgtggagatactgataggatatcatctcttcaccaaaaaccatccagatatctctttgacagttattctcacsatgttttttccccatagttgacttagaaaagcagagagggtaggaggctaaggagaattgaagatgtgtttcatcataagaagtgttcaatgtaaccatctgctctggttttgatttagttttgtatctttttcggaggtgggagggtattttcatatttgtttttccttttttttaagtgttgcattcatttcctttccatctttttattgtgaatttcttgttcctctattgtgtctttgccttggttggtggccaaaggagccagcagggctgaagaccctccgtctggtgagcatgccctcctggygccatacaaacaacgaggagcaggcggaggaagatgatgatgatgtagtaggtcctcctggggatgccagcatcccagctggcactgctggcactgcagggccatcagagtctgaggttctccaggtctcgaagtagttcagttactatttgccaccttctcatttcaactgggaatttgggtcccaaagaaagtagttaaaactaattgtgccttttgtcactgttaggtgctcatggactgggaattgtttttcttagctgagaagggttggcacaaaaagaataatggtttttggaggtgtcaagttctcttctgacctggagacccatagctttctggtggccttgctgtgttttctgagtccagattgcagaattgtggaaaatttagttgacagcatgacaattaattgctcacaactccacagtctagactaactggtactctccacctctctggcctctaggttatcatcatacaccccgtcatttgttttcaaaacagcctgtttgcaaactcactgcatggagatactctggctttgctcaataatatctagttgctatagaggacagagatttaacttgcatgttcttagggtatttatttttggtgaggggtacatatgagtaaagattagagtataagaggagtgtattctgcctgcaggccctaaattatagtccaaaatctttttccagaaacaaggattaggcaatatcctcattctctgtcctcttaaaatcattttaaaaatatcatttgtctcccttctcattgccttagaatcttccattttataggcactatcatcttctaagccatattcacaattaatttagctgaaatgactgagaaaaggttcttgctaaaaagatttttcctaaacctttgactgaagaagttatcctgtgcccagagaggccttgacatctctgtgwacagattctcctatttgagaagtgttgcttagaagtgttggagagtgcccagaagatgcttccatccttatctctccatgtgttagggtactttttgcccattttaatttggagcaatgttgttctctgcagacacccgcaacagagctaccttatattttatcagcctttaattagtgtcaatttgacacttacaaaagaagtgggtataatctagtgagagtgatatttctctccaaattttagtaaaatataagcaacgttagaaagtaagcagaagaaaatgttctaggggtagatatccctttctgtgatactcagtaggcaaagagactgcattcactttccaactggtaatagttgagccttggacggggtaccagaggcactgggtagagatggggttctctccagtgggttgtatgacatctgggattgagtgactggcataactttctcaggagtaattatgttgacagccctacactatcaaagttttgtttgctgtgggtatttcatgctggagtaaagggtgcccttccttcagtggcagctatgttcytgggaaactggttgcttcctaatttttgcctcccattttggattttttcacttgtttcttgagcatatgtaacttctcatttcctatggttaaaaatcagctatctgtatttttttttttttttttttttttgaggkggagtctcactccatctcccaggctggtgtacggtggcatgatcttggctcactgcaacttccacctcctagatttaagctattcttgtgcttcagcctcccagatatctgtgattacaggcatgtgccaccacgcctggctaatttttgaggagccaatgaagggacgggatttcaccatgttggtcagggttgtctctaactcctgggctcaagcaatcctcctgcctcggcctcccaaagtgttggaattataggcgtgagccactgcacttggccaaaaattggctatcttgagctccttttgccatgtttgtaataaagttggctccatctactactatgcaatatgtaattaggactttccaccctttctctacgatagcatttaactgtgattttaggagtcatagagccaaagtctgttcccattaacctcacatccagaatcaagttctgccacatgtgactgcagatgaacctgaacagaagctgtggcattgattcggcattagtggtcaaacagtattctgtgtttgcgagatgcgtagtggtacacaagacatttggggacctcagagagcctggtcgaaacacgtacagrcctggtcttagggggtgctttgtgtaatgctcccaggcctggcttctactgtaaggaattcttgtgtggtcctttagtcctggaaataaaagagaaagggtctgtatggttaaattgtgtagccagaattaacatccctttttttgtttgtttgcagccccgggagaagggcaggatgcgttttcataggctgcagaatgtgcagattgccctggacttcctaaagcagcgacaggtaagaccatcacatgccttccccattcttccaggctgtgttggcattggggccctattcagagatgtttttagtgcccctagtaagctctcagtaaatgctaaatctgattgacccagttctgagtcttaacttgctagtgagcaattgtattctggttagagaaatcattcagtactcacacagaacttgtgacctccttgagaggaagaatgttcacggagaagaacatgatgataaagatggaattttgtggatgcaccttaggtgggggtcaaaatgaagatgaaaaataaactagaaaagagatggaaaaaaggtgtggcatccaggaagagagagaaccagattgctatatcaaggtgaaaatgagataagggggtagtgtggattgtggaatgccacatcagatctgagaaaaaggtctaagttgttaagcactgataacttaagtgagcagtttaatacaggagaaagatatttagagtatagtagagctagatataggaagggagaaagaagcttttccttccctggatgaggaagacaacaacccatttttagacataggaagaggagccaatgaagagagtaagaatgaaaatgagcatgaggaggagtattggtagtcatagaacgtttcaccgagaagataccctaatgttgtactagtccagtttcttattatagataaagaaactgagacctggacaggtaaatgacctgcctcaaatcacaagtcagagcaaagctgagactttaactcaggccttctgacatgcagtttagtgcaccttccactatccatgctgctttctacacagcacccttcctcctttgcttcctaactgaaggaaccaaatccagggattgatggatgagaagcagagcacaagtggtgtggccatctttgaaaaagaaaagaaaaatacctcttttgagagacaaggagaatgacagagggaggggtgaagatacagagatggtttgtggtagaaagaagatggatgagggagtcaaagagttcatctgcttagagtgagccatatggaaaatatttgggatatctagggttgccaagcaacaacagggtcaacgtgacattaaatggtatgcatatttttggagtcagttcatttttgacactcatatcagtaattctcattaacttctaaaattctctgtttgctctcataacaatttacttctggtataacatttcttattttcttgttatttctctgtttgctccaatgcattataggctccgtgaggacggggaataagatcttaacatttcaccttcatctctcataatgaatggtcctcagttggcacttaataaatatttgctgaaataaattgataaataaaagtggtagaagtggaggttgctgaagtgtttagggtactggagaaagcagcattgaaatgcctgtgtgtggagctagaggaagctggggtgggggccttactggcagggtttatgagaagaattgattagctagaagtctaaatcaggacaaaaagtggctttggttactatgatagaatgaaaacgtggacaggtaagaacagtggattcaaagaagggcagggagattactagagccgttcttggtaacggtaaagtccaagatgtagctgtgcagatggccaaggtagggaaaaacgaaagtcatcagaattcaaaaggcaggcaatttgtgcagatagtgtaatatttgggatatcaatataaatgctaaatttccaggaaaggtgatgatgaggcaggaaaagagaataggagctaggtagtgaggtcattgagaaaaaggttagcagagattggaaggtggtttggccaagggaggtagacttcacaatgaaaggggaaggctgacagaggtaggactgaggaatgtggacttggctggtactggtaacccaccaactgtcaactgttagtgattagaaaaattgaattctcggggaggggacaggttttcccacttgcatcctactcccaccgtatagaagaggagaccaagatacagaaaagggaaagaacttgcccagatgaatgtcattgtaagggagaaatgaggcctccatttgagaaggtcactagggtcctctggagacacacaagtttcagttcagtagaagagataaagggaggacrgctgaaggacactgtgtcgcaggactctgagggtatgattgaggaggctaacagaggtgaagtagaagtagggtggtttgcccaggacactcccagttttaaagttccacgtcccaggaaattcctccgttcccagcacactggggcagtaagtcagcctgggaagagggtgtgtcagggcacattgagttgttgggatgagattttaggagtaaagcaggtgctgcgggaggcatggcaggtatggatatctgtgacaaagatgggataatggaggtgagagcaggccaaagactggtgagggaagagaggcatctctcttttctgtctttctctctcagaaccttaagaaaaaaaaaaaaaaggcaaagaagaaagaaatcttggccctgatggcaataaaaaagtgacccacaataccttgtgcttgcgaggttgcttttctggtgagaaagcaaaatggcgtagctactctgatgacttcttataaagctaatcatatatcatataacccagcaatcccactcctaggaatataccctaaagaaattactgtgctcacacaaaaacctgcacatgaatattcataattgccaaaatctagaaataattcacatatccttcgatggatgaatgggtgaacaaagagtagcatatctctataatggaatactactcagcgatcaaaaggagcaaactgttgattcatgcaacagcttggatagggatctcaagggcattatgccgagtgaaataaaaagacagtttcttttttttttgagacggagtctcactctgtcgcccaggctggagtgcagtggcacaatctctgctcactgcaagctctacctcccaggttcatgccattctcctgcctcagcctactgagtagctgggactacaggcacccgccaccatgcccggctaattttttgtatttttagcagagacggggtttcaccgtgttagccaggatggtctcgatctcctgacctcgtgatccgcctgtctcagcctcccaaagtgctgggattacaggcgtgagccatcgcgtctggccggcagtttcaaaatcttgcatgctgcatgatcccatttatccaacactctggaaaaagcaaaacaaggaatcaggatcagatcagtggttgtcaggaattaggggtgagagtagggtttgattacaaggagggggccagcacaagggacctttttggggtgatgaaactgttttgtggtggtagttgcatgaatctatacatgtgttaaaactcatagaactgtacaccaaaaaagaaatcagtttaactgtaaatcaataatgaagtgatgcaaaaatttaatcaaaacaaaaagtcctagagctctgagccgtgcttttatttctttttcaggtgaaactagtgaatattcgcaatgatgacatcacagatggcaaccccaagttgaccctgggtctgatctggaccattattttgcatttccaggtagggcatgtgaagtttggaattcctgttgctttgtttggacatggcctagaaagttgcactgccttccacagacagcattgagccttccttctctctatttgtcagtgaacaaaggtggatgggagttggaaaggaaaattaagattgatctgcagacaagctgttgtatcgtaaacgcaaaacttcctaattatttgcttaattaaatggagggayttttttacccatttgtggtttggccctgtcctcagcagtctggttattagaggtctgtttgctcagctgaatcaaaatgaggctcttgaaggactcagaatatgagggttgagaaaagctgttggtgttgatgctttagaatggtggagtgaaggttcatagtcctgctctaatgtagactttttctcatctctaataacctttaaacaagcctcgttaattagaatactttagtatctgggtttgtatatgtgctggcaagcacaaccttgcagcggccatcacacccaagagcatcttgaagaatattcacatggtcacatggccttcctcttcctaagaaggcaaatcctttttagatctgaattgctattggaaaagtacagccctatttttataaaaaggctgttcttttacatcccttttaggtcagccaaacaaagctatttctcagacagctctctctgatacacagttgctgcacatgaggctgatggattagaggctgatagctagtgggaatagaaggcagggtgccgacttcagggatgaggccaaggtgacatcctagctggggagttggcgctacctgctggttaaagatagaacaacaggtgtccccgaattcctgagagaaaaatctgagtgcttaggcttgtttcttgaggctctagtttggaagcaatgctggcagtcaccagcatggacagggctaggattgtgtggtggtaatgtatttttgtggaaccacagggtatcctcaggcaagctttgggcatagggataaccaggaacatgaacttggtaggtgtgctctgtctggcaggatgggaaactttgttgagctttcatggaggactacagttatccctttggaactcttatgaacagaggagcttttagagaaatttgtttgttttttggtcacaaacctgccctcactgtgagtgcccaatgtttgtctcataggtgggaggtaaggagaatttattcactgtctctattcaccccaactactacaactaaattaatttcctttttttttgaccgagttttgctcttggattgcaatgatgtgttcttggctcactgcaacctccgcctcctgggttcaagagattctcctgcctcagcctcccaagtagctgggattacaggcacctgccaacatgcctggctaatttatatgtttttagtagagatagagtttcaccatgttggccaggctagtctcgaactcctgctctcaggtgatccacccacctcggtctcccaaagtgttgggattacaggcgtgagccaccgtaccaggccataacaaatgtttaaatagagaaaacattttcttttcttttttctttttctttttctttctttctttttttgttttttgagacggaatttcgctcttgttgcccgggctagagtgcaatggtgcaatctccgttcaccgcaacctctgcctcccgggttcaagagattctcctgcttcagccttccgagtaactgggattactggcatgcaccactacacccggctaattttgtatttttagtacagggtttctccatgttggtcaggctggtctcaaacttccaacctcaggtgatccacctgcctcagcctcccaaagtgttggattacaggcgtgagccaccgtgcccggccagaagaaacatttccttgaagcatttaaaaatttcatttctttctgtttactagttttcagaataattagttggttcgctaagattctccaaaggtgaccaataatagttcctttgttcaccattttttttttagtatcactgtgacttgtggatttttaagcagacttaatgttccaatcaaatacagttattattctttttaataaaatcaaatagctccatctttggctgtaaagaggctttcaagttgactctgagtcctttggcatgaccacagtggtctttgataatttcctttatttcttgtgcgatgaggtattccagactctttttttatattttctgtcccaggcctgaaattcttaatctcccctaggaactggttctctatttattgaccacagtctgaatgctcctaggttgcccattatttctttctttttcttttctttttttttttttttgaagcagatttcgctcttgttgcacaggctggagtgcaatggcaccatctcggcttaccaaaacctctgcctcccaggttcaagcgattctcctgcctcagcctcccaagtagctgggattacaggcrtgtgccaccacgctcagctaatttttttattattagtagagacagggttgttggccaggctggtctcgagctcctgacctcaggtgatccacctgcctcagcttctcaaagtgctgggattacaggcgtgagccaccacacgcggctggttgcccatcatttctaggctttttctgtgggcagagctaggcaatacttgtattatctctaaaaacaacaacaacaacaacaaacaaacaaaaaaccccatgaatttttactgatatttctaattcaaatttaggattgcagggttttgtttaacctctttgactttatatcattttttttcttatactgaaaatcttgatcttaacaacagtaatgtggttacttactcttttcctacacacacagagatctgtaaaatcatatatattatttgtaatatatatgaatccaagtgacaatatgaatgttattgttagcagtatgattactttgaagtcacttgaaataatttctctctattgttgttaagccacaaattcaatacacarttaaggttcatttgtttttatttgctttcagttttggggggttgcttttttcctttcaattttaccttacattatgtagatcatttatattgttccaaagggaaattttaaaaagttaaatacaaattgtgttcagagaggtctagcttccatctctgctccctccattctgtatcttcccattctctgtagttagctaaatgttttaaaacacctttttggttataatttctattgtttgtttattttaggaaaatgcattcataaaaaaaactttactgaggtgtaatttacataccatcaaatcaactaatttaatgatttttatgagttgtacaatcatcaccataatctagtttggggacattttcatcatccaaataagatccttcttgttcatttacagttactgcacattttcatcaccagcctcaggcagccactaatttattttctatcttgatagatttgcttattctggacatttcatataaatggaatcctatgatagatggtcttttgtatctggcttttttcacttaacataatattttttggttcatccatgttgtggcacatatcagtacgtcattcttttttattgctgaatattctgttgtatggatatatcatgtattttgtttaaatattaagccagttgatagacatttgagtggttttcactttttcactgttataaataaagttatttgcataccagtctgtgtgggtttatgttttcatttctcttgtgtatacatgtatatacctaggaatgggatttcttaattgtacagtaagcatgtttagcttttaaagaaactgccaaattgtcttgcaaaatggtgtatcattttacattcctaccagcaatgtatgtggtttcctgtgtctttacatcctcaccagtatttattgtctgttttagattatagctatcacagtgagtgtgaaattgtatctctttgtggttttagtttgcaggaaaatgtattatttaattgaattccacaaacattgactgggaatgttatgagcaaggtcttagatagagtgtatggaagatacacggctgagtgcaatggctcacacctgtaatcccagcacttcgggaggcctaggtgggcagatcacttgaggtcaggagttcaagaccagcctggctaacatggtaaaaccccatctctactaaaaatacaaaaattagccaggtgtgttggcgcactgtagtcccacctacttgggaggctgcaaagcatgagaatcacttgaacccgggaggtggaggctgcagtgagctgaaattgtgccactgcactccagcctgggctacacgagactccatcacaaaaaaaaaaaaaaaaaaaaaaagaatctactacagaagatacaaaattgaactagatacagaccatctagttggactcttattgtttaggagagtgagaacagacataccataaaataacttgacagaggtttagagaatgagagaggtatgggttaggatgatggaacacagtatgaactcaacagtgggcagcagttactagtaacaacttattataattattaattgaccttataacttccagggcttttgacacagcccactgttctttttcctgttaccaattttacagaaaggtaatagcagctttggcctagtctgtcttctgcatgcatattggctgcctgcttttctctgttatttcagcacagccaaatgcctatttatttgtcttcttgtaggtgggagcaccgctcccagaatattttctcagttttaactatggattccttttctttgccgttctgagggcttggtatttgcctatactagctaagtgttctggtgtgtggggaaaggttctctgcttgtgaagcttttgattgactactgaaggatcatgtggagtgcccccccaccccccgcctcgtcttgcatcagatttggcatggtatgtcttttgctagttatctgtcattgtggttttctagtctttcattattgagtatctattagctgttctcaccaagaacatatgctatgtaaagccaaatggaaatgcagagtagaactgttacatgttagggaatcagcaaaattgttattatggtcagtctgtgttattggtgttaatgaagtagaataatgatgtacctgtagacatggatggtagttttcacctcaagggaatattcagttgaaggagaagggagaggctggatccagattaaagrtttgtgactgctgatgaggctggtaatattgataacttcatgcagaggtttatggtttctaaaatgctttaacacattttttttaatgtgctaaatggtagatgttctttttaattttaatttgagtttttagttttgaaaatctcaaatactcggaagagtatataacagatccttatgtgtgtagttgccttcagaatttaacaggtgttccttttgttatatttgcttcagggttttttctctctcttcctctttaaagtaataaaacatctcagatacatccaactttctttgccctctctgctccccaggtaaatattatcctaaagttgatgtgtatcattcccatacatgcttttgtacatttacagcagatgatctattcataaacaatatgtactgttgcttgtatgtctttatatttgacacacatagtatctttggtatatcctttctttcatcttttttcttttttctttttttttttttttttttttttgagacggagtctcactctgtcacccaggctggagtgcagtggcgcgatttcagctcactgcaagctccacctcccaggttcatgccattcttctgcctcagcctcccgagtagctggggctacaggcgcccgccaccacaccckgctaattttttgtatttttagtagagatggggtttcaccgtgttagccaggatggtcttgatcttctgacctcatgatccgcccacctcagcctcccaaagtactgggattacaggcatgagccactgtgcccagcatgatttgttcattttaactaatttaatgtaagtggtgacccctgcagctgtgtaacacatctattatttgtaacgtattatttaattgtatgaataaaacattcattgctacagtgaacatctgtgtatatgcatccttgtgcctatagcaaagagggttttgggattgatacctggactggaattgctgggttatatactttccttcagtttgcctatattttgccaaattgctctcaaaggtactgtatgacttacagtattgtattgggtaacatttactactatttgacatattacatgtttacttgtttatttgctgcctggatgcctgcattagtatgtaagcttaacaatggcagggatttttgtctcttgttcttttctttgcctggcatagaataggcagtcagtaaatatttattaartgaatggattgtttcatgaatttgatcttctcaaagctttggagtaggtagaccaaataaataggctgtaatgtctgttttcttatgcccatttctcagataaggaaactgaaacacagagaccgactgacttttttgggttacacacccagataggatttcttttttttttttttttttttgagacggagtctcgctctgtcgcccaggccggactgcggactgcagtggcacaatctcggctcactgcaagctccgcttcccgggttcacgccattctcctgcctcagcctccccagtagctgggactacaggcgcccgccaccgcgcccggctaattttttgtattttttagtagagacggggtttcaccttgttagccaggatggtctcgatctcctgacctcatgatccacccgcctcggcctcccaaagtgctgggattacaggcgtgagccaccgcgcccggccaggatttcttgtcttttggctttgtccaagcttgttttaaggtataggttaagatttatagttcttctaaaagatactataaactctttataggcagaatctgacaaaactagttttccaaccctcaaatgtttgttaaatactagtgtatgcctagcattttgaaattttcaaaaaatgggaggtcttagctggctagacttgaggtttacagttttgtgcactttatggcacttggtgcttggcatatagatgaggcaccatttgtgtttttggaatgaatgaatgaatgagttcttttgctttggagtctttcactctggctgtctctgtgggagacctgtgggcagtaaacagttatctacaaaaagccaaaggagaaggcataaagaatgtataggcctcaaagtgtgctttcccagaaggcagcaagtcttgtgttaagagaccaggttagatgagaaaaggtcttggggaaaggtctcgtaatcagaattaacttagttgaaaatacatctratatacctactgaaaactatagtttagcctatcttaaatgtattccgaacacttatattagctaaccgttgagcatttggccaaaatcatgtaacacaaagcctgtttgatagtaaagtgttgactagctcatgtaatttattgagtgctgtactgaaagtgaaaaacggaatggttgtgtgagtacttgaagtacagtttctactgaatgcatatggatttctcaccactggaaagtcgaaaaataagctggaccattttaagtcagggaccatctatatcttaggatccccccgggggctggggatgtctcataacttttagttccagtaataaatgggaagaaaagaaatttactgtaggtcaagtactgagccaagtacttyatggacattatctcattaaccttgtctacaatcccagtaagtaggtggtagtatgcacattttacaagtaaggaaactgaaccatctaataaactagttaggttacttaacttatgagctgggaagttgaacctaggtccaccttactgaaatctctgctccttccctagaccagtttttctctggagcagaaggaaatgaaggtctgattggtctgacatatgcagaaattttaaaaaaagaataggctcacagaagtaaattctcagagaaactctacagcagtagtagtcatattaagcagctatttctcttgcctctaagtttattagtttcaggattttggtttgcttgtatgtcattcataaaattcaagtgcatcttaaagttcccatagttccaggtttcttcactggaggagtgaaggcctggtacctgcctagagaacttcatattgtaatgtcagattctttgttaattaaatgatttgcagtagcatgagtttctctcccatgctctctgcttatttcttactatagtttgtgatggccataagatggtgctgcagttttgcagtcagccttaaggataaggcttaggggaagaacacctactgcagttgtgaggcagatgggacatcaggagggtcttagaagggattgtgtaaaagccgttgctttagggcttcttgttgctttccttttgtggtcttttccttttttttttttttttttttttttttcaggtctccaggaaagatagttaaggctatgctagtgtaagtctttatggcttgcatggaaccaggcaggctactgctttctgctgtgtggcctggatccttttgttgtagaataaataactgcaataggaaagaaacacatatataattttattctccattcacagccctttgggttatagtcttttcccatatagcagatactatactaaaaaaaattggggtggaggaatcttcactgacatcacaaggtgatttttgaatccgacttttacagtctgaaattcasacttcctgccctactgcaatgggagtaaaaaccacctgaacctctttttggcagcttcttctcttactcccaaatggcaacaagtgttatctctttgattgagctcttggtccatgcagtctaattaccaattcagaacagtgggggaacttcttattttacacaactggcaactgagtacagatttccactactgcagtagttagaagagagtagttggggttgaaattaaaagtcttaaagttaacagaagttcatgttctggctttgtcacttactagctgtgtaacctagggctattaatcaactttcttaaacctcagtttcttttttcttttttggagacagagtcttgttctgttggccaggctggagtgcagtgacatgatcttggctcactgcaacctccacctcccagttcaagcaattctcatgcctcagcctcctgaatagctgggactaagggcgcatgccactgtgcccagctaattttttgtattttagtagagacggggtttcaccatgttgcccaggctggtcttaaactcctgagctcaggcaatccgcctgccttggccttctagagtactaggattataataggcgtgagccactgcgcctggccaaacctcagtttctttaccgataaaatataaaataatagttttgacctcatatagtgactgtaagaattaaatgagaaagtccatgtaaataactttacacagtgcttggcacacagcaagtgcaaaaaatatattagatgttagcagtggcagcatcaataattactattgaacatttttgtcaaatattgttcatcagagaccctgttcatctgttgtatttagaagtggtattctttttaccaagcactcatttactgtactcaaaaccaacttccagatttttcctgtckgtgtcattggctggcagaattaacagatctttcttttcttttataggaaaaaggagggaaataaatgctccagaaggctagatctttaaagtctgtgttccttttcttaactgtaagaagaaggctctggtttcttcaggttataatttcattaaaataattttattgttttctgacctgaaaaaattcagaatatgtatatctgcttgatattttcttttgggcatcttggtacaacacttaaaatctatttcattttgtagtttgggagccataattgcagcttcaccaggcttggttcttcttggcccgggcccttcccttcccttgctggttagtaccagccgagctggtttgctttttccctttttggtactattctcctcctccttcctccacgttaccttctgccacggcctctcttctttttccctccattttcaatttacacttacattttccctcctcctcctggccctccctagtttttcccctcccctggtttctagctcctttttgctttctgtttgtgttactgagggcagtgctccaattacctcatatttggagagaggaagctgcagccaatccggtttctgtctgcttttaggtcaagtgatttctgaactgcagtgagatgctttgaatttgtcttgttgcagctctgagcctgtaagatggctgtctgaatcggcagcggctggaagagacagagagaggcggggagggagggagaaagaattggagggattgccggcatagtgcatgtttttaaatgtgcatcgaatccgatgaggccaaggttgggatttctgtgggatcccaggactggcttagctgcgtttttgctgagattaggagaggaaggaaatgggaaattcactgggctgttttaaggagccgaaagagtcaatagctattcctgagaaggctcccatatctcctaagaaaagggttcggttcaaaaggaggtggagagggaagaaaatccctactccagaggcatctcaccaggaagaaacctcagaaggaactggagtcattgaagagactgaaaccctaacgaagttaacagagagtctccaaaaggaagacggagtgggaggggtagagcatacccccccagatattttgctgcctggggactcagcccccaactcacgggtagtcgatcgggggatgatagtacaggtaaaggagagattccaaggggaggtccagaccgcccaccttttgttagagaatgagtcatcagttgctggaggggtctgggattccctggaagaggggatgactgtcattgctcacctgcttgataacccagcagaaaggaactgcgagaagtcagtgagccaactggtggaatttcctaggacagcatcctgcagcagcagggctgtgttgctgcctttgcaaggagagactgcagtggagaaaggaaatattcagcgtgggtttcggagctgtgctttgcctaggacagactaccccactgataaaggaaatcaagaacaattttcagagggctggagtgtggaggaaggaaccaagagtgtttcaggtgcccctcagacagcttcctggattatagaatgttctgtttcttcattactactggaccagcctggaggccaaagacgcacggagccttcccatgtgggtcaagtgcccccccaggattccagactgcctacttctcagagtgatttgtccatcagtggtgtgactgtgagcattttgccctcctcctctggctatggcagtgatgggccacacatacatgggatccagcctaaagatacagaacctgaaaagagctctacttccttctcagaagaggatggcactctttctctggaggcaagccacaccccatcatggggtctggaagaggtaggtgggcatgttcaagagataatcaaactgctgtttggattcttggccctcaaacatattaaagctgagtgtggtgagcagtgaggatgttggtgcctctcaaacttacccccatgtgggttagtatctgctggagctcagcaagcagaatctatttcaggtctgccccttgatgcttgaaaccaagacttgtctctggggaatccctgattctgagtagccaagtggcgtaattgctcaagctatctggtgggatgatctctcaaggtgcaatgctagatagtacttactctcaggcaggtctgtttaccagcttccctgctacgagaagttgtaatgtagcacaagagacgatggggaagggcctaactgaatctctggaatgaatctctggaataaatgtggaaggggtcaggcagctgttgtcagtgtacttgctcttcctcacaggagagtgatattcttactagagctgatgcaatcccatccctgttgggaaatttctgacggcagcactcattcagtatttgtataggtggagagggctcatccttctttggttcctaattccaggattagaggagagggacagagttatctggggattagttgagagagagagagggaggttagggcaatttgaaggtttaaggctagaaaagtttgttttgtgactggatgtatttagggctttaacatgattttgttttgaggaatatattgaggcatggatggtgctgctggtggtggtggtaatggcagtttctgtgaatgttttaaaggtcaaggagcaagtgagaattcagagatgtgaacactgagataaggactcagcaagaccatgggtagcacagcatctggcatgtaggtgtgtgattgtgtgggtgattgaagttataattcaccaatggctaaagaacttttactgggatgttggcstctgcagcagaagaaataaaaacattaggacttcaaagtgcaaaatttataaaatgaggtagggcactttccttgcctagatgggggccactgatactgtacaggggccctgatgtttgcagagcagggatatggtctacctactggtgccctgcctatcactagcagcataaggctgaggatagatacaaattctgagcaatctgtgcctagaatttcctctttggggatacattttccccacagacagccccatcttagtgccctctgttattagagtttggagactcccaacaggttgaagaaaaagtggccattgaaaaaatatctattttatggatgggcaagaggtttcttgggcctcatataaacatggatatgtgtggtggggagtgtgatagttgtgttatggtaggaaggaaggcagtgaaactactgggatatggggcgcatgaatgtattaagctattcttgcattgctataaataaatacctgagactgggtaatttacaaagtaaagaggtttaattggtatacagttctgcaggctgtacagaaagcatgatgctggcatctgctcagcttctgaagaggcctgaggaaacttacaatcttggtggaaggcagaggagcagtaggcatgtcacttggctacagcaggaacgagaggttgtgggtgggatgtgccacacacttttaaatgaccgaatctcatgaaaacccacctaccctcacgagaacagcaccaaggggatggtgctaaaccattcatgagaaatccactttcatgattcatgatccagtcgtctcccaccaggtcccacttccagtattagggattacaattcaacatgagatttggtagggacacagattgaaaccatatcaacaagtatttgggtttcatcagataaaaaagaatgtcaaagtcaacttttatcttgtaaaagttggaacagatagagtagttgggggtaaaaccagctgtggaactgattgttgtacaactggcattaaaattgaaattgtgtagtcatcataacattataggacacatgcttgtaactgagtgtgagattttcagaaatttggcatataaagttttaggaactcctagtaaaatcaatcctagataatagaccatagatagcaatggcacctttgtatgggctggatctccacactggcaagggaatgttctgcatgagtctgtgaggagtcttaaagaaaagattgttaggagaaacctttggaccatgatctgtagtgtgaccatattggcaacagtatgattcctttgctgttcagtatgattcaaattggtgtgtggcattttctgggtagccaacctctgcatctattccttctaccttttcactgcagacacagtcatactacttatgtatagccaaggctgaaaaactaagtgaccgagtctcagctcagacacctggcatatttccaggttttgtgtccatcatgtgatacagggaccacagactcaccatcctatatgacagataagaagtaacttatcaagataagtgtgacattccttcagaatgaaagtccttaaggccaagaggctgcaactctcactggtccctgaaggaactgtcttcagggagctgctcccctccctaacaggctgttcacaggcttgaggacagtagcagccagagaaacagagagggcaacgcatactgaaaccgataggcagggcaagagcatctctgctaaagtgggaaagctgggagggcaagggtcagaagagcagctgctgctgttcacacaccaactcctgtctaaacaggagacagctggcagtccaattgagttgttttttgcttgcttttttggtggtggttttgtttttaatatgtcagagtagtaactatcctcagaaaataatttgagttccagccagactgtctcctctgttgattagtccagggcttgttgatgagagtgagaccaggctatggatagacataaacttcaccatgggttttgttgctttttaggatggagagaaatgggaactgattgtgcttcttgctagtgtagggtttagatagtagaatatacatgatctgcttttctattcacctagtacagttaatacttcttttgtcaagaaatagttaacacagaagcaagatgacaagggtcagctgacaaatatgttttcagaatgacaagtagactaggatttggagctggatgggaacaggctaatagcaatcgctctttgatgtcagacaaaggccttcttctctggcccatttcttctctcaggactccctattcccagctgctttcaatatccatactactaatacctggcttatttcaacaaggaacatttttgaaaatcccttcctcctccccatcttgacttctgctgccaagctcctgcccaccttgttagcgaatcccatttaatgaagcatttacctctataccaatttttttttttttttttttttttgacacggagtctggctctgtcaccgaggctgcagtgcagtggtgcgatctcggctcactgcagcctctgcctcccgggttccagctattcgcctgcctcagcctcccgagtaactgggattacaggcgcccgcccccaccacgcccagctatataccagtgttcttgccacaacccttcgagtctctacaattttaggtgaatagtcagataacactggggcctagaaatgrtaagaaagaggttggttggtgtattatcttctgggctcagccttttcagtttacaagtatccctctcccagttttcctttttaattatagggagagttgttttactaatactggctttgtactgaaagaagaaagcaaaattaaccagatgacactattgggggaatgcagaaggtaaagttatagtttagaactttaagaaaggattttgtttctttttctttttttttgagacggagtcttgctctgtcacccaggctggaatgcggtggccctacctcagctcactgaacctctgcctcccgggttcacgccattctcctgcctcagagtagctgggactacaggcgcctgccaccatgcccggctaattttttgtatttttaatagagacagggtttcaccgtgttagccaggatggtctcgatctcctgacctcgtaatccgcccgcctcggcttcccaaagtgctgggattacaggcgtgagccaccgcgcccagccttgtttctttttaaaaaaattttacttaattaaaaatgttactaaagaatcattattttttaggtgtaacaatagtgttgtggttatgttttaaaaaaggccttttacagatacatactgaaatgtttttagagaaaaacaggagatttactttatcataataggggaagggtgaagtgggtgggatgtagatgaaacaagattagctatgagttgataatggttgaaactgggtaataggtacatagggacttattatactattctgtctccttttgtatatatttgaaaatttccatttcaaatagaaaattaagaaaaaaattgtataaaaataaaatgaaattaaaaaataaaattgtataaaaataaaatggaaagttaggcaaaataagttgtataaaaataaaaatgtaataatactggtaaaattatgatataatacatatacagttggctctctgcattgtgggttctgcgtctggggattcaacccataacggatggaaaatattctgaagaaaaacattgcatctgtaatgaacatgtacagacttcattattccctaaacaagataacaactatttactaacatttacattgtattaggaattataagtaatctagagattatttaaagtagctgggaggatgtacacaggttgtatgtgaatactacctcattttgtatctgrgacttgagcatttgtggatttcagtatctgcggattttggtatctgagggaggtcctagaaccaattctccatggatgactactgaaaaggggttactatcctatagataaagtgattaagagcatggagccagattggctaggtttgaatcccaattctgcaacttactagcagtataacttggaacaggttactaaacttctctgtgctacaatttccttatttgtaaatggaagataagaatagcatatgcttggtagggttgttgtgagaataatatgaattaatacaagtaatcacaataaatgctagttaatattattacttaaaagaacaagaaaatgaataagaaaaagacaaacacccttgtagaaaaataggggaaagcccaggaataagcaattcacaaaaaaaggaaatccaaatgcctcatatacataagaagactcctttttactaataaggatatacagatcaaacaacaataagatactttttttttttttttttgagacagagtctcgctctgtcgcccaggctggagtgcagtggcgcgatctcggctcgctgcaagttccatctcccaggttcacgccattctcccgcctcagcctcccgagtagctgggactacaggcgcccgccgccatgcccggttaattttgtttttgtatttttagtagagacggggtttcactgtgttagccaggatggtcttgatctcttgacttcgtgacccgcccgcctctgcctcccaaagtgctggaattacggtgtgagccactgcgcctgtaattttttttaaagagatgaggtctcagctatgttgcccaggctagagagcagtggcgattcacaggtaccatcatagcgcacagtagccataaactcctggactcaagcttgtagctgggactgcaagcacaccaccatgcctagctaagataccattttatacccatcagattggcagaaggtaaaaattctgaaaataccaagtgtaggcgagratgaagagtgatgggaaaacctcttcatagcacttaagtggaagtataatttgctactgttctttagaaagtagtttgacaatattttgtagagttgaaaaatgcccatgttctattacctagggtttccattctaattatattccctagtgagacctccaggactctgaatgtgaatactgaaaggagcactcccttttacctaactctaatattggtaataaacaccttctttatctctgttcctcaccatcatagctgccattagatccctctagctgggcatttgtagaaccactgcattgtgccttcatctgcttcttcttcttcttctttttttttttttgagaaagaatcttgctctgacacctggctggagagcagtggtgcaatcatagctcactgcaaccttgacatcttgggcttaaacgatcctcgtgcctcaacttgccaagtagctggcactacaggggagtaccaccacacccagctaatttttaaattttttgtagagacaatttctcacagtgtttcccaggctcgtcttgaactcctgggctcaagtgatcctcttgcctatgcctcccaaagtggtgggattacaggagtgagccactgcacccagccctcatttgcttcttgaaagttttcaaggtctgatgctttatctttagtgggtgatgaggtcagctagaaacttgaggacatartaatcaagtacttacttgctcagaacaactcgtctcatccactgagagacttaccaagtccaaactcctcagctgggataagataagataccaagtcgaaactcctcagctgggataaagataagatagattaccagttcctttgtaatctatcttatcttttctatcggttcccaatttaaaccttctcattttaacagatcagtcccttaactactatttctgtttcaccttatctcagtttgtttacatccactttctacgtggaattcctttcttccttggctttcacctgttctgtaacacccttcaaggatgagtttatatggtacttctagaaatcctccagcccacagtaattttccattctgctgagattctgtattggatattactataattattggtcgtttttggctataaatttgtttaactatttcatgtgacctaccatagatatgagatttttttcgtccagaaattaaccttcagaaaagagatattctctttatattttacttcttataaagcatttcttgttattaggcttccagggagcttatagtcagttcatgaaaaagggtgaataaatctatgtcaccatctgctagttcaatcactatcatttttttgtagagatcaactgacataattgattaaacaaaaaagaggaatgaaaaatctaagaaagttttagttattgttcctgggaatataatctcctaatttgaagtgttgaaagtaattgtatacaagccttaacattaaaatttttttttgaatcactcacattgcatatgaaacatacacatacattatggggatcacaaataaacacagcagaatgaatgaaaaaaaaaaaaccctaatccagtgttatgtaactggactcgtgtggtttgaaatgaaatacccagagacaatgtagattcagaaaagtgctgttattaactttaaaatcttagaaaagtagacagtattttctagaaaattcactaaaaagatagctttattgaaggaaaaaacattgatgttaaagatgcatgtgaagtttgaataatacagttttttgaaattacaaaggcagaaaatacattaatactaaatgcttaaatatactgcttaattttaaatatgtgtatatgtgtaaataaatttctaaaagtttgggtattcaggaggactacagagcttcccttcctgtattcctgttttaccttcatacatctgttgttatctgggaaaatatttgggataatcatatgttagttatggcatgtctcaactaagttcttgcaggccaagcatgtcttctttttttgttttccacctttttacctggccaacttctacttattaaaactcagcacagatgttgttgttgctgagcaatcctctggcattgctagtttggattacttgcttacctctgtcacaacattgatctctttgtatagtaaattgtctccctgattaaattgcttgaacttgaggcctgaggctgtgtttttttattttgagatatcaagaatttaagcacagctcctagaatataatggttgctcaaaaaatattaacagtataagtaagtggtgtgtcttttcttgttcttctccatggtgccagtcatagtgctaagatgttgttcagtcaatacttattgaattattaggaaaacattcagcttctgggaatacttcagagaagcaattaaccaagctttgggaagtgtgagwtgaaaggaaattcaagtggaatttgcatattctcaggcatactgttgaggctgttctccctctccaaatggcttcctccttaaaaagcccagatgagggagaaagatctctgaaactaaagctggatttctgcatttgggagattaaggtaaaagcttctgcatagcccagagcacagtactgtgcacacatatcatgtgtgagtatacagaaagarattgatgaaagccaaatttaattactgagatggttgtgatgataatcccatttttctcatccagtttccagtctaggtaatggccctaatccaaacaggtattttatttttctttcccttagggatccaaacatctatctcattacaactatgtttaaaatctgaagtaaagctgttcattgaagtagttttagtgcaatatacagaaatactaagaaatgagagatgttattagaaagattatggctgtaatgaacatacaatatcaattaactaactggaatttcatttttgggtgaagaacccaaatactcagattttgttttgcttattcaagttctgtcttgttttacatcaacaaatctatttcctgttcccaataatgttttactttaatatgtacgtgaagcagctacagtgaaggcagtgggatatatcaatgttgcatttagccagtgaaataggtagctagaaatgttaaggggaactgaaatagaattggtactaggaagaagctgtttataggaagagccgtgatccattattgtgtccttggctctgcagctccatagcttctctccccactaccgcccctcccccagccccaggtagatctggagttgattaatagttttagtaaactgactcacactgatcacatttgcttgagattggtckatgtgaatttrttaatttacaaaataaattttaactgccaagtgattcaagaatttgaattggccacttactgcttttgttgctttagaatatctatatgggaagcaaataataatctgaaggttgtcaggtgaacatgcagtcagagcagagaggtggtgagtagagraatratttgtaggatgggcttattagctggcatcatcaaagtagaatagtctgatttcttctgtagaaatgtacctgtcaagggcataagatcctatgtcccttgaatctgctgggtagggtacagtttcaccttcacaggcatggaggcagtacttcctggcttcccttttctgtactcaatgcaagcttcccatactcttctattctcacggtctttcttcagacatcttagtaatatttagtagcctgcagctttcttttattctaaatatagtgttaaagttcctggcccttttttttttccaattttaaaatatcatctgatatttaatctcatctattatgagtttgtaaattcagacacttggagatgacttattattgacttctcccttgtattgatcacaagggaagctactactttcatggtactgcacctgatagagacgactaagagacaggatgttctattgacatgccggtgttttctctgccccaacacccagaccaaaaattgtgttgggtatgctgtcttattattatgggaagggaatacatgtaccctcggcactatctacatcatcttatttaatccttataatgatcctttgagaaagttattatcctattttaaatatggggaaaattgggccaggaggcttacatggtttgcctgaggtcacatttctagtaaatgccttctttcaaacacatatctgtctgaatgaaaggcttaacatttttccttgttaacaaggattgtttttatactttttattataaaaataaagtgtggtcattactcgaagtctgaaaaaaagaagagtagcaagaaaaactaaagtcattcatagtcccactccagaggagacaaatataaacttgtttactttacacagtgctttgaattagctaagtaacctgtctacagattctaggtgggctttatgccagaatactttttttttttgagacagagtcccgctctgtcacctaggcgggagtggtctcgaactcctgacctcaggtgatccacctgcctcggcctcccaaaatgttgggattataggtgtgagccactgtgcccagcccccaaaatacttttatttgcttatttttattatttcattttatttttattatttcattcataaaccaagttattattaattaaaacatgttaaggtcccaccatacaaccagcacaacactaagtgcaatgggcaatgcaccaaaggactgtgatcaatgattctcagatttggaagttatttcgttcacagcatcttagtttctgcttgacacgtccagtggcgaggagctctcccacatagggtttgctgttcagttttatattgctctggttgttaagatgtggtgccagcccccctcaggaaacgtgcagtctaggggagataagattaaatatatgaaataatagtccataatgcaaaataacatttatttatttatttatttttatgtttttgagacagagtctcactctgtcgcccaggctagggtgcagtggcacaatttcagctcaccacaacctccacctcctgggttcaagcgattctcgtgcctcagcctcccaagtagctaggactacaggtgcgtgccaccatgcctggttaatttttatatttttagtagagatggggtttcaccatgtcggccaggctggtctcaaactcctgacctcaggtgatctgcctgcctcagcctcccaaagagctgggattacaggcgtgagccactgcacacagcccaaaataacatttaattagatgatgatacagactgtcagtgctgtgggagttagacaagtaagaatcgaaggaagaccagccttcaaataaggaagagataagggaacccttatttgttgagcataaccctgagtttgggttaggtgctttaatgtgtaatctcgctgattatcacagcaaccctgaaaaggtggtattagtcccactttgcacacatgagacatgcactttttcctcacctgcattatgatctccctaaaataggtcttgtgctgtattttggagatttcttaaaatagcttttttcttattataaaaatgtacaggatgcagaatatttggaaaatataaaaatcccctgtaatgttactccatagaggtaactatgattattagtttgctgtatttctcacatacgtacagtatttgcacctgtattgcatacataggtgcgtgtgtatgccttgtacatatatatgactgtatacttaaatgtatattttgtatgtcttttatacaaaataatcaagattactatattattttgtttatattctttttcttaaatttggtaatcattgtcctatgtcattaaaattttctttgtaaaacttttttatttacttttttgagatggagtctcactctgtcactcaggctgcagtgttgtggcatgatcatacttcactgcagtcttgatctctcggcttcaagtgatcctcccacctcagcctcatgagtaactgggactacaggcatgagccactgcacctggtgtgaaattttctaaagcataactttttaggtgctacaaagaattctattctgctataattgtgctatgatttataaccagtcaacccctcattagaatttaagctttttataactttttgctaagtcatgtttattatgctttgataaatattcatgcataaaattatttgtttatatttctgatgacttcctatcaagttgtatgtatgttttaagacttgattcaaaactgacatccagagaagttatgccattttatactctcactagtggcggtgtatgatgatacccagttgtagatcttctctccartcgtgaataatatcattaaaaacaaacatttcctagtttgataggtgaaaaattacctctcatggttttaatttgcatttatttgactagcaagagggggaatatatgttggaatagtcctctaaagtgcttccagccttggmccttcrttttactaagagccataatgtatggagaagagaaggctaaaagactttgtcttatttataatgaattattctgtgtcccatcttttggcagatctctgacatctacattagtggagaatcaggggatatgtcagccaaggagaaactactcctgtggacccagaaggtgacagctggttacacaggaatcaaatgcaccaacttttcctcctgctggagtgatgggaagatgttcaatgcactcattcaccgataccggtaagaacagtggaatttctgtgctcctgcagggctttttctcatctcttgtttgtaattagttataatactgtttccatctcctcaatcaaaaatcaaagctttgattcatttgttcatttgaaaaagaaacatttatttaactacttttctaggaactgggtacaagtagcagtgaagaaaacagcgaaagttcttgctctcatggaacttatctttcagtarggagaataggtaataaatgtatgccatcaagcagtggtaaatgcaatggcaggattagaaagtggcagaggtttgtggtactttggacagggtggtcagagatggcctttttggtgagcgtgttaaagcagagccatgagggagtgagtcatccaggcttctggggtcagagtgttccagtcggaagaaatacaaatgcaaagggcctggagtgagggcttgcttagagtggtttagggacagcaggtggctgaagtgaggtgaggamgataggaattctgaatgacaaaaataaaaattgttgagttcttagtggtcataaacatgccccaattttcagttctaaccgacgatatttttcccatgacattcaacaaacctaaactgtatgtttaagtttagcattagggagcactgggcccctggtgtatacttaaaaatggaatttgtactcttctaaacctcctgctttttctctaactcacttagtgtttttcagctctgggaactttcaggaggttttctttgtgtaaactcatgtgtgatgtgtagatggtggcgtttcatgtgccttgctggacttttacagacccgatctagtagacatggagagggtgcaaatccaaagtaaccgagagaatctggaacargcttttgaagtggcagaaagactgggggtcactcgcctgctggatgcagaaggtgagagggagtttactgaacttgagtaaggaacacgtattcagtattccttcttctggcaagttcctttgttctgactaagaaatttcttgtccattctctctcagatgtggatgtgccatctccagatgaaaagtctgtaatcacttatgtgtcttcgatttatgatgccttccctaaagttcctgagggtggagaagggatcagtgctacggtaaaagaacattttcctagaaggccttctgactttgattcatttgggtgaaatgcattggttagacactttcttaagcacttatggtatactcatggtatcaaactatatatccagtatctttatcatacatggacattatccttggccctggaaatgagtctagatattgctaattttgtaacaattagcatagactatttggtgctaaatgccagcaaagaatgtctctttcatccccagctgtaattcaagatgaggaagtgttttatcagtcacttatgtatcagcttgattaggtagatcatggctcttttcagaatatttttagtagcttggtttgtagcctttcttagtgtcaggaaattgaaccccatcctgagagcccttgaggagctttgaagctagtactgtgagcattaaactgagcagcatctaggcaattaaaggaaatggattttatatagtttggagtggcctgagctactttctcttgtgcttgttttggatattgctaatcaggtgtgtgatgtttaccttctggcaataggaagtggactccaggtggcaagaataccaaagccgagtggactccctcattccctggatcaaacagcatacaatactgatgtcagataaaacttttccccaaaaccctgttgaactaaaggtaaagtcaaggacttaaatttttttkgtaaaatctttctagggagtaagtctccaagcttatcactgctggcttctaggtgaggtggtatgaaaaattgggtcctatagtttgtgtccatttattcaccaaatattaattttataggcactttataaccaatatatacacttcaaagaaacagaaattctggccaaggagagagaaaaaggaagaattgaggaattatataaattactagaggtaagtgagcttatcctttgctgagacttggggtttgctggtctgtactgttgttgcttcttgattatagattccttgtattcttttcccaaactgcrttaatagaagtactctcctggtgacaaataatagcaccactctcaggctggtcttaaaatgttgtggtaaaggggcaatgtcagccatctctgttttttaaagggcttattgaaaaatgacatgtatttattcagaaatcttgagttttgtggacaaatttttctgcttctcagagggaagctaaatctttccctagggtggaaagaagagagacttctattcagaatttgattcccagagaatttgaagttgtagaaatgagaatttaaccttgccagaataaaagttattgaggggaaaggaggatttatagaaagtgtaaaaggaatggaatgacttagagtaggtagtccctacattctagaggtgacttttctgctctttaactcaagggtgaagaacctgatacatatttgattgtttttccatgttagacaataggaaaaactgctgaatggctgggtaaagaagcaagaagtgatgtgcaaataataaatcaaaactgggacaagagggcatggctgtgtttttggactgaaagagtatctgtttcaggtgtggattgaatttggccgaattaaactgcctcaaggttatcaccctaatgatgtggaagaagagtggggaaagctcatcatagagatgctggaacgagagaaatcacttcggccggctgtggagaggtgggtccagatcctgagagtggtctgacattatttattgagctgctgtgaaccttgcacatgactatggttttatcttatttcaggctggaattgctgctacagattgcaaacaaaatccagaatggtgctttgaactgtgaagaaaaactgacactagctaagaatacactgcaggctgtaagtctctgactgttttgtccaacatctgtgtcacatgtttcctgcttctcaccctctgctctaattgttgaagttagcaatcgaggaatccagatgtattatttccctttttttttttttttggaattgcagtagacttcttggctccctctgtcctagtgagtggggcaatggaagttttcccactgttattctctcttcctgtctcaggatgctgctcacctggaatcaggacaaccggtacaatgtgagtcagatgtcattatgtacattcaggagtgtgaaggtctcatcaggcagctgcaggtggatctccagatcctgcgggatgagaattactaccagctagaagagctggcttttaggtgaggaacaagggactcaaatggagggcttgcttgcttactgctgaggctcatggatcaagagtwgagcaagagtcaggcacttaatcttttaacctggacatttgaggtcagtgtctcaatggggatactacaggtctcttgggcaggaatgttttgtcagtagaggacagtttccccttattgcagctccatcccactaagtacctataggattacttcaatcattgtggccttttgtaacatcccacatactttattttaattaatcaaagacagggtctcactttcgttgcccaggctggagtgcagtggcacaatcatggctcactgcagcctcgacttcctgggctcaagcgatccttccacctcagcctcccaagtagctaggcctataagtgcaggctgccatgcccagctaatttttgtatttttagtagagacggggttttgccattttgcccaggctgatctcaatctcctgggttcaagcgatcctcctgcctcagcctcccaaagtgctgggattataggcgtgaaccactatatctggcccattctcatatattttagaacgacctgcagggttgggacacaacacaacttctgatttagaaacattggtgatccatcacattctttttataggggggaaaattgagacccacagaagatgaaaattatgtaaagtcatgtggctagttttttttttycccttttttttttgagatggcatcttgctctgtagcccaggatggagtgcagtgacacgatctcggctcactgcaacttctgcctcctgggtccaagaaattctcttgcctcagcctccggagtagctgggagtacaggagtgcaccaccatgcccagctaatttttgtatttttagtagagacggggtttcaccatgttggccaggctggtcttgaattcctgaccttgtgatccacccacctcagcctcccaaggctagttttacagagccaagactaggacccacatctcttgacccctaatccattgtttattatatttgggagttatataaatagtattgttagcttccctccagttaacactgtaatttggcatttgtcttaaaaacaattctgaactagatgaagatgttcataatatcaccttgtattcatataacactttctaaacacttttccttctatgatctcatttttatttttatttttatttttatttttttgagacaaggtcttgctctgtcacccaggctgggacgcagtggtgtgatctcggctcactgcaacctccgcctcctgagttcaagcaattctcctacctcagcctcctgagtagctgggactacaggcatgtgccaccacacccggctaatttttgtatttttagtagagacggggtttcaccatgttgtctaggctggctcatttttatttttatcatatctttgtcaaatggataaggaagattttatttttaaaaactatactatagatttaaatcctttccttttttctcttcttccatttcagggtcatgcgtcttcaggatgagctggtcaccttgcgtctagagtgtacaaacctgtaccggaagggtcatttcacttcacttgaattggttccaccctctactttaaccaccactcatctgaaagcagaacccttaaccaaggcaacccattcttcttctacctcctggttccgaaagcctatgactcgggctgaacttgtggccatcagctcctctgaagatgaaggcaatctccgatttgtgtatgaactactgtcttgggtagaagagatgcaggtgggtgcatatccaaaagcttatgcagtacactgatgtttactggatctggaagcttatctaagaggaccaaattgctttgtgttccctgtgcagattcccttaattattattattmttttatttgagtgatggggtcttgctatgttgcccaggctggactggaactcctgggctgaagtgatcctcctgcctcagtctcttgagtagctgggacaataggtatatgccaccatacctggcttgactttcttaattattgatgctgcctgagacccaagcccccttctccttaaatcttgcatggatgaggttggcacaaattctcacagtcccgtactgaatagcatacagttttctcatttgaaaccctttggaatcttttccctcagctaactgtactctgagtgagagcttggtgaaaattgcaatgtctttacatctgttayctttttttttaattaaaaaaattttttgtgggtacatagaaggtacatatatttatacgatacatgagatattttgatacaggcatgtaatgcataataatcacatcatggaaaatgaggtatccgtcatctcaggaaatttatcctttgtgttacagacaatccagttatactcttttagttatttaaaaatgtataggctgggtgccgggtgcagtggctcacgcctgtattcccagcactttgggaggcctaggcgggtggatcacaagctcaggagatcgagaccatcctggctaacatggtgaaaccccgtctctactaaaaatacaaaaaactagccaggtgtggtggtgggcgcctgtagtcccagctacttgggaggctgaggcaggagaatggcgtgaaccagggaagtgaagcttgcagtgagctgagattgtgccactgcactccagcctgggagatagagtgagactccatctaaaaaaaaaaaaaaaagtacaggctgggcgtggtagctcacacctgtaatcctagcactttgggaggccgaggtgggcggattgtgtgagtccaggagttcaagaccagtctgggcaacatgcgaaatcccatctgtatggaaaactaaccgggaatgatggcgcgcaccggtggtcccagctacttgggaggctgaggtgggaggatcacttgagcttgggaggcagaggttgcaagtgagccaagatcgcaccactgcgctccagcctgggcaacagagcaataccccatctcaaaaataaaacattaaacaaaaaaatgtacaactaaattattttgactatagtcatcctgttgttctatcagatgctaggtattattcattctttatttttttgtacccatgaatcatccccacctccctctgatcccgtaatactcttcccagcctgttttgatttatacatcccacagctaagtgagaacatgcattgtttgtctttctgtgcctagcatatttcacttaacataataacctctagttccatccatattgttgcaaatgacaggttctcattcttttttatggttgaatagtactccattgtgtttaagtaccacattttctttctccattcatctgtgatggacacttaggttgcttccaaattctggctattgtgaatagtggtgcaacaaatgtgggaatgcagatctctttgatacactgatttcctttcttttgagtatatacccagcagtgggattgctggatcatacagtagctctattgttagtgatttgaggaacctccaaactgttctccatagtggttgtactaatttacattcccaccaacagcatacgaggcttccgttttctccatatcctcaccagcatttgtatattgcctgtcttttggataaaagccattttaactggggtgagatgatatcacattgtagttttgagttgcatttctctgataattagtgacgttgagcaccttttcacgtgcctgtttgccatttgtatgtcttcttttgagaaatatctattcaaatcttttactcatttttaattagattattagtttttttccagtagagttgtttgagctccttatatattccagttattaatcccttgtcagataagtagtttgcaaacattttctcccattctgtgggttgtcctttttttttttttttttttttttttttttttttttgagacagagtcttgttctgtctcccaggctggagtgcaatggcgcaatctcggctcactgcaacctttggattctaagcaattctcatgcctcagcctcccaagtagctgggactacaggcacgcgccaccatgcccagctaattttgtatttttagtagagatggggttcaccacattggccaggctggtctcgaactcctgacctcaggtgatccacccgtctcggcctcccaaagtgctgggattacaggcgtgagccaccacacctggcctgtccctttcctttgttgattcactgtgcagaagcttgttaacttgatgtaatcccatttgttcattttagctttggttgcctatgttggtgtggtattattcaagaaactttttcctagactagtgtcttggaaagtatttctggtgttttcttgtagtagtttcatagtttaaggtgtttatccattttgatttgatttttgtgtatgatgacaagggacagggatcaagtttcattcttctacatacagatatccagttttcccagcaccattaattgaagagactgtccttaccccagtgtatgttcttggcacatttgttgaaaatgagttcattgtaggtgtatggatttgtttctgggttctctattctgttccattggtctatgtgtccatttctaggctagtactatgctatttggttactatagctctgcagtataatttgaagtcaggtaatgtgattcctccagttttgttctttttgctcaggatagctttggttattttgggtcttttgtggttccatataaattttagaattttttttttatttctgtgaagaatgtcttgtattttttatagggtaaatctgttttttttttttttattctctcattgacagaggagtttattcttcrtttttcattgttgatgtaacttttttttttttttttttgagatggagtttcactcttgttgcccaaactggagtgcaatggcacgatctcggctcactgcaacctctgcctcccgtgttcaagcgattctcctgtctcagcctccctagtagctgagattacaggcgtgcgccaccacgcccagctaattttttgtatttttttttttagtagaaatggggtttcaccatgttagccaggctggtcttgaactcctgacctcaggtgatccgcccaccttggcctcccaaagtgctgggattacaggagtgagccattatgcccagtctcaacttttttttttgagacagagtctcactccgtcacccaggctggagtgcagtggcgtgatctccagtcactgcaacctctgactcctgggttcaagccaagcaattctcctgcctcagcctctcaagtagctgggattacaggcgcccaccaccatgcctggctgatttttgtatttttagtagagatggggtttcaccatgttggccaggctggtctcgaactcctgacctcaggtgatccacctgcctcagccccccaaagtgctgggattacaggcgtgagccactgcgccyggcaatcgtaactcttaagtttaagcaaggctactgtattccgcagttccaaggggcactatttacatgtgttcaatgatagtggttcaaatttgatattgcccttatctttctaacccttttgttttatattaaattcttcctatgtctgcataatatattccccatgtaacaataaataaaaatatcccaaagtaacctgttttaaaattatcttccattggccagtagttgatgtcatgaaatgaagctaaatattttcagatacttctttgttatatcagttatgattgtgaaatgaaaagactccataaagagaaatgcctaaactgtaaagttaagcattttaagcctgtgaagttccctttcccttttggttgattactccaggaatgtatactaataatgcagcagcaaaaggctgctctgttgtataattggtgggctctgttctcctgcttcttagcggtgatgatggcgtaatttttgtgtaagaggctgtagattgaaggagatggcctggatgtccttttgctcagtcctctaccccttggttccttgtcctaacattggttctgaccattttcctaccaagccagcagtaaattatgtcatatatatattttttctttttcagatgaaactggagcgagcagagtggggcaatgacctgcctagtgtggagttgcagctagaaacacagcagcacatccatacgagtgtagaagagctgggctcaagtgtcaaggaggccaggttgtatgaggtgcgtagccttcagaatccacattacaggagggacgtggttggaacggatgaaaggacagtacacacaataaagctgtattgaaggaggagggtgctctggaaaagaataatgatgatgaagagcggtttatgacaaattcccttttcacatgaagtgtatctgttaatctttgaaataaacttgtgagaaaagtatttttattaacccctttttactaaaatgaaaagtgatactggaagctgaggtcagaattagtaagtagtggatgcagcatccaaactcaggccctctgcctctataaattcaggcactttttacttccccatctgcctgcagttgagcgctggtttagagaaactattcacacagtttcctctctccttcagtcactgttctatcttcccagtttatatttcaactcttcccttcaaaaaagcagttgagtgggaatcaggcattggttttgcttagaagcctaccagaattgctggaaacacaggatagtgaggtctgttgtttgtaattaccctgctcaactgttgctcacttartgctgctccaagttataaaatatgactcagaaatttgttgtctaagcttctgttttcttagagcaaccaatccatatctctatctagacataatatttgcatagttgcaaccataacaygtagtttacttactctttctctaatgtatttttatttcattcttttttaatcagggaaagatgtcccagaatttccataccagctatgctgaaactcttggaaagctggagacacagtattgtaaattgaaggtgagtttctgccgattctcttacattctgctcatagagtctggttccccccartcaactctcttccgtaattcaraaatctcctggtttggccctgttttggttttctgcttattaggttatatcatttactatgcacttattcatatctattataacattttcccaattttctaaatgggtcagaaactactgttcttgaacgttttaaataaatagaacctatcctaggtattgtgcttcaacaaacgtgtggctatatgtgctttgagacaccaaaactaaaagtttgagatttgtagagaggggactttccctctgatctgttgtttttcatccctgtttatcaagattgtccagagtaggacagcccaggaccattctttatccaaggagcaccacaaaggccttatgaattctgttttctacttaggattgaraagagttctgggagtcttatatcaaacttgtacaaaasttgaatccatggggaaaaatccagagattaagagcaaattaatttcctgagttattctctcctttgatgtcaaatgtgctatcttctacagatacaaaggctgccagtctaatcttataatccttgctttgtctaggaaacttctagcttccggatgaggcaccttcagagcctgcataaatttgtttccagagctacagctgagttgatctggttgaatgagaaggaggaggaggaactagcatatgactggagtgacaacaattccaatatctcagccaagagaaattacttctctgtgagtctagcacagtagcaggcctgtcatacttatttaacagcagcagaaggagacagggcctagtctgctgaaagcttgggtggctggagttgcactctgctagatagaaataggggccctactcaatgcatccatgcatgtgagaagtgtaaatggagagagggacagtagaaccctagagttaatttatctagaatgcatttagaaaggcagtgtcttgggtgaatagagcagcaacctgtaaattgagtcatttcagaagcaatacarcattgtggttaagattataggctttggagtgcctaagttcaaattcttattcttctactaactagctctataaccttgggaagtcatttaatctctctggacctccataaaatgagataatagcaccacttcaaagctaccccctcccctaatagcacgtattccccaacggttgcataaaagattaagatttaataagctaatctagacaaagcatttagtctagtattgttcaactgggatatactctggactttccacaaatttctgaattctccttaattcatttattaacttttttgtttcaatctcttcgtttgtaaaaatgggaagggaaatttaacattggacaataggacactgctttttattcttttcaatgaaagatgtagacaagttaggattagtttttgctacttttagtattttcacactcagaagatttttaaagattttgtaaactatgcaaatagggagtttcttgtttttgtttttaacatgcactttagacagtttaattctattgatttagggttcttaaaaaatataggcttcttctgattggagaatggcatatgattctactgaattaaagaaggaagattggatactataatacaataaacaggctgtgtgagaactgaaattaggctataacagagatataaagaaagtgctctgaaagcatagtaaggatcagtatccagcttcacagaagagctatttaaattgagtcctgcagttaatagaatttagagtcagtggaggacattgtaggctgaatagtctaagcaaagccaaccagtcattgatacccatgtcctggtgtgtcatgtactggtgtgggtactgacgtgcaggaactgtccactccagccaagttatctcttgtctctggtccaatgcttattctgtgttcccccattttactcacatctgggtcaggtcccatgtcctttgtgaatcattttccaataattccagtgtttgtgcccttctctgcaatcctctggcatgcactgtttatacatctcattttgccaccaattctatattgtaggttcctttaaaatagggaacacagcttttatttatgctatccgctccccactgccaagagtgcttatgctgtaaaattgaattccattttcaggagttgacaatggaactggaggagaaacaggatgtgtttcgttctctacaagatacagcagaactactttcacttgagaaccacccagccaagcagacagtggaggtgtgtgacttgagaatgtgtgaaggtcaaatgctgagaggttgttgttataaaagtattcaaattagagactttgttccactgaaagacttggaggaagtgtcagggaacatttgycttgggtcttctctcttttcattcctgactgttcctatgtccctcaaaagcctgcaaacatttttgttagtctaaggaaactactaagagaaacaatagaaggggcattggctcacagctttcagaggaaaagtgacttggaccatatttcttcaaataactatccagacagatcctgacttgactcttgttggtgtggtgcctttgccaaaagaagagaaacagtggaagaattccagaggaatttatttatgcctgggttttgctgcctagatcatttacttacaactgagtgtggaagagaccttttctatgtaaccccctctaacaaaaccattttggattaaaggaacacctcttactcgtgggaagcattgagcagatgccagtcaagtatctccacatcttttctgttggcttctctatcattagcagagttgtacttggaaaatagtattgcgcatatatattgagtctgttaaactcaagcccttctgtctgtgtgcttgtttattgcaggcttacagtgctgctgtccagtcccagttgcagtggatgaagcagctgtgcctgtgtgttgagcagcatgtgaaagagaatactgcttattttcaggtgtgatggatttctgtgtttgtgtgtgtgtgtacatatgtatgttaaaggtgaggttacaaacacatctgcgttagtgtgcttttgttgtataaaccaccaccttaaaatttagttgcttaaaacaatagtcatttagatagctcatgattcagtaggtgagcagtttgggcagggctcagctaagtggttcatcttatcttgcctgtcttactcatggctgcagacaggctgggggctggttggtcccaaatggcattgctcatgtctgagagttggctaggtgctgaagcaccaacccatgtgtctctagcatccagcagctttcttcacaaagtggctgtgtttcataagcagcaagagagagcgagtcctagagcacaagtcctttttttctgcttgtgtcacatttattaatgtgcctttggttaaagccagacatgtggctgtgcctggcttcaaggtgaggagaaatagactccacctcttgatgggagkagctgtaaaatattatgaccttttttttcttttttcaatctgtcagaacatgaaagagtgtactgctggccgggcaccatggctcacacctgtagtcttagcactttgggaggctgaggcaggcagatcacctgaggtcaggagttcaagaccagcctggccaacatggtgaaaccccttctctattaaaaatacaaaaattagctgggtgtggtagcacacacctgtagtcccagctacttgggaagctgaggcaggagaattacttgaacctgggaggcagaggttgcagtgagccaagatcacaccactgcactccagcctgggcaacagagcaagtgtctaaataaaaagaaagaaagaaagaaagaaaggaaggaaggaaggaaggaaaagaaagaaagaaagaaaggaaggaaggaaaagaaagaaaggaaggaaggaaggaaggaaggaaggaaggaaaagaaagaaagagagaaagaatgtacttcttattttcaggtgaggtgggaggagaaaataagctgttacctctgtttttgccctagatttttttttgagacagagtctcactctgtcgcccaggctggagtgcagtggcacgatctctgctcactgcaaactccgcctcccaggttcatgccattctcctgcctcagcctctcgaatagctgggactacaggcgcccaccaccacgcccggctaatttttttgtatttttttagtagagacggggtttcaccatgttagccaagaaggtctcgatctcctgacctcgtgatctgcccgccttggcctccgaaagtgctgggattacaggcgtgagccaccgcgcctggccttttgcccctaaattaaatagtttccgtgattatttcatagtatgaattgaaacatttgatcactcagccttaggtttttcatgaaatacaccccacagccaaatgctgtacctagccagaagtcaagaggaaagagcagtgatttctgagggggtgaaacaggctaacttttcggtagggtagggtttggggtagtcagcactaatattttgctgcatggctttttaagcccttcggtttatgtttcagtggtccttgtaataaactgtcactaatgcagtagggtgtaatcagctttgctaagctctgcacagtaaaattgttctttcttagttaatattccrgtgttctaatgttttgagcagaaggcatccttactttgtattcccatagttcttcagtgatgcacgagagctggagtcattcttgaggaacctccaagattccattaaacgaaaatattsctgtgaccacaacaccagcttatcccgccttgaagacctgctccaggactccatggtgggtgttgcctcagtggggatgattacttctgagaaagagagtaaaccatatcagctgctgctgtttatatccttgaaagctccagggcaatgggccattgttgtaataaagtttggcttacattcaaatagagtttaatcgatgttgttctgtctctttcctttttttccttttcttttcttaaataagttgctaataagatttctttgggtatgttattgaagtaaaggcctagtcttctcctctgagccactttgagctcattgtactttctttgcatttttcttattttaatgtaatagttggagccaaggatgaggtgttgagcatgaagaaaaggttgaaggggattagttgatatcaaattcttttttactctcttatgcaaaaaaaaaaccaacaacaacaacaaagaaatacacctgagtcaaaattttcctccttggtagttttcttttggatgataattaaaattgattttaattcaaagaaacattaaaatcttatttagatgtaatatttgtgcagttatttatgaagcaatattaatttttaagaaatagttttacatttagtatttagttcaaatcaattttatattctttttctccaatgaattatttcttcaggagtgctggtaattaaattagcagraagactacttatatttagtgaatgtatattacacagagttggcaagacaaggctcaagctacatctcaaattaaaatagaaatgtatatgcaatagggaacttacttttcctttgtgagaagtaaggggaatctcgcatttcaatagaaaagtctgaataagagaactagaataacccaaaacagttcattttttttgtcggtaaaatttgagcatttgtgaatttaagtttttttatttttatttttttacactttcaggtattgtaaacctatgagtggttttacattcacctgggcaaataatctgttaatttaattaatttggaatgaaggatgaaaacctgacttttcagatgttgtctctaaaatgtctctctcagaggtactgcaagtatgaaggaggaatataatcattggctattatctcctccctcccacagagtaccttctgtcatagggtaactcctctgcagtggttgtcatatcttctcttctcgagggtcgctgctctgttccctcctctccaggtcagggtcatcgggttggcggcgtcatcggggcatggagtcacctgggtctgctcctcagcttgtccgtcaggttcgggagcatctgtcctggcttctggttcttttcagaacttttaccacgctgagcacttggtctctggagcttgagctgtttggctgtgggttagacagaaattgacatcttattgcaaggaaactgaaatgggtagaccagctctcaagtatggaaatgtggctgtctccctgatatattccattcctctttcttaactaataagttaaagttgtatttcttccaatcatgctcccggggacaggcacaggtagtttatttaagcatttctttttctttacttgcatattcttagttctttaatggcatttcctaacattattaactctttactctcatcgcatctacatccatcctaagaaagccctcttctggggagacttttatacctcaaaatgggcttgaaacatccgggttaatggacaaagtttatcttttactctttaatggaattggtaatggtttactaccaattttgttaacaagaagtttattcatttttaagattattggatttgcagagatttgagagtttcaattttgcatgatacttctttctaaccaatcaaatttatatgaatatagcacagcaaatactaagaggtaaaccctaaatcatttgtcatgataccttcaccaacagcattgttggttgaagagctaagatctttctctagaaagcttgactcaatttaggaaaataaaatatttggagtagagcttgggagatataattatttttaaaaatttaaataagtataactagcttctcctaagcagaaagggaagaactggtttctaccagtgagaaattgactaataataatatacctattattgattttaactttcatgttctctgaatcatgtttagatagattttttattagctttgtagctgtatttggaagctagaagtatttgtttttattttgatttttgcatgtgactttatggttcattgaaagtggcacagggagaaagctgcaaagtttgagtgcgaaagcacttggtagaagacagaagcattctctccttttttctttatcattgtctaagtctttaagatggctccaccaaccatccctacttaactgagagatgacattctctgagggagtggagtattcagttttctttgttgacttagtcaccctgagtagcagcattaatgtcattttgtttttcttatcattttgtaggatgaaaaggagcagcttatacagtccaagagttccgttgccagtctcgttgggagatcaaaaaccatcgttcagctaaaaccacgcagtccagaccatgtgttaaagaacaccatttctgtcaaggctgtctgtgactacaggcagatcgaggtgaggrggtagaaagggtayctctgggccacagggggaaggaagaaagaagggaagccttcagttagggttatgatgataaaagatcaaattacagcgtttttaaaattagaatttaaacatgctgaagtctctcctatcatttaaaaaaaaaaaactaaactaaaaacttcaacactataatcttgacctgctccctgcctcagtgattggcatcattatctactcagttgcctaagtgttgacagagatggtactttgtagcacttgggagatatccttgactcccccacccctcttatcctccacagctaataggaccatcaagtttgtactaatttgtaaatatcccttaaacgtactttttctatccctgctaatattaccctaagagcataagtggctgggtggagaggctcatgcctgtaatcccagcactttaggaggctgaggcacatggatcacttgagctcaggagttcaagaccagcttgcgtctctgcaaaatatacaaaaattagccaggtacagtgacttgcagctatagtctactcgggaggctgagacaggagaatcgcttgagccgaggaagtggaggttgcagtgagccaagatcacactgtttgcactctagcctgagtgaaactctgtctcaaaaaaaataaaaggcataagtttctttcacttggattattgtgtcagcctccccatttagtgcacaaaggatcctaccaccagcatgttctttttttaattttaattttatttatttatttatttatttgagatgaagtctcgccctgtcgcccaggctggagtgcagtggcacgatctcagctcactgcaagctccgcctcccgggttcatgccattctcctgcctcagcctcccaagtagcggggactacatgtgcccgccaccatgcccgcctaagtttttgtatttttagtagagatggggtttcactgtgttagccaggatggtctcgatctcctgacctcttgatccacccaccttggcctcccaaagtgctgggattacaggcgtgagccaccgcgcccagcctattttattttattttttgagacggagtctcgctctgtggcccaggctggaatgcagtggcgccatctcagctcactgcaacctctgccccctgggttcaagtgattatcctgcctcagcctcccaagtagcagggactacaggtgtatgccatcacgcccagctaattttttgtatttttagtagagacggggtttcactgtgttagccaggatgttctcgatctcctgacctcatgatctgcctgcctcagactcccaaagtgctgggattacaggcataagccactgcgcccagcgtttgtttgttttttttttcctttaaataacaatcctatgcttaaatcttataataattactcattgctcttgggaaaaagccgaaactccttaatgtggctttaagttcttgagtaatctgtctttacctctctagccaagactgggtcatatcctttattgcctggtaaattgcatttgtcacacagtattataactacatacaccaccagaatatgtggaaatacagactatgcttgtctgcttaccactgtacctatttatttatttatttatttatttatgttttgtgacagggtctgactctgtggcccaggctggagtgcagtggcactatcatggcttactgcagccttgacctccctgggctcaggtgaccctcccacctcagcctcccgagtggctgggactacaggcatgcactactatacccggctaatttttgttattttttgtagagatgaggttttactatgttgcctaggctggtcttgaactcctgggctcaagcagcctgcctaccttagccttcagaagtgctgggatyataggtgtgagctgctgtgcctggccaattgtactgtttttatctccagtgtcctagcacatagtagacactcaagaaatatgtattatacaaaagaatgaatgaattaagaaatggaaaaaaaatttaaaaatgggactgtgcttttgtgtgtctcgatatttctgcctgtaagttagggataatagtcttgatcacttgcctctaagagaaagacttgataattccaaaatgcttaaacattttcaggggtttgggtgggatgataggaagtagggagaggaaatatcataaaaacaatgttttgattattcaccttccattagtttttactctagtagatttttgtgctgagatcgctcttgagcctttatagtcttattataactttcatagtctgggttacttgacatgtaacaggtatttaatacatacttatttccttgatttatttggtgtcacagtttttcctgtgttgtagatttatacccattatcttttggcaaaaatcagaagccctcactaagtgatagcagatcttttcttaagcagatttttttcttaaggatttgatagctttgggatgaggcaccaggaaataatgggttgttggtttatccattagcaatcactggtaaatttatctcttcagattactatttgcaaaaatgatgaatgtgtgctagaagataattctcagcggaccaaatggaaagtgatcagccccacagggaacgaggcaatggtgccgtcagtctgcttcctcatccccccacccaataaggatgccattgagatggccagcaggtaacttggctcagctgccactggtacacccacctctgctgttggcctcggtgaaccagtggagggatgagtgtgcatttgtgatgtttttgaacacagtggtaaagttcctcctgggagaggcttctcattggagatatcaagtctcctactaccagccacatagtagatcttcaataaatacttctgttcagctggagtatcttcagtgatatttcttttttaaagaactcctggttataaatagtttactctcagaagattgatttttttaccagcctggtcaacatggtaaaacctcatctatactaaaaatacaaaaattagctggatgtggtggtgcacgcctgtagtcccagctacttgggaggcttaggcatgagaattgcttgaccaaggaggcggagtttgcagtcagctgagattgcgccmctgcactctagctgcctgggcaacagagcgagactctgtctcaaaaaaaaaaaagattgggctgggcacagtggctcatgtctgtaatcccaacactttgggaggccgagggaggcggatcacttgaggtcaggaggtcaagaycagcctggccaacacrgtgaaactccatttctactaaaaatacaaaaaaaaaaaaaaaaatttgccgggcgtgatggcaggcccctgtaatcccagctactcgggaggctgaggcaggagaatcagagaatcgcttgaacctgggaggtcgagtttgcagtgagtcgagccgagattgcaccactgcactccagcctgggcgacaaagggagactccgtctcaaaaaaaaaaaaaggttgatttttttctgggtcattagttatcattagtttattataaaagagatatggaaattatttacatgatgaaagatttcagaacttcagtggaatgggcagcttcacgttgatgccatttctttcttttttttttttttaattatactttaagttctagggcacatgtgcacaatgtgcaggtttgttacatatgtatacatgtgccatgttggtgtgctgcacccattaactcgtcatttacattaggtatatctcctaatgctatccctcccccctccccccaccccatccccccaccccacaacaggccccggtgtgtgatgttccccttcctgtgtccaagtgttctcattgttcaattcccacctatgagtgatgccatttcagtagtgacttatttcactctacgtgctttccaagaatgtcaccgtctctaaataggaaataatccttgtcatctagaactactttggtgcctccatattgtgggagaagaactttatctccaactttcctgctaactggttgaccctctccaccctttcctttagaacctgatccaacagcgactactgttgcttgaaatacttttccttgagatttttctggaagcataatgcctcctttggttacagtttcagcaacactcctttcaaattttcttttctttctttttttttttttcttgagacagagccttgctctgtcgctcaggctggagtgcagtggcactatttcagctcactgcaagctccgcctcctgtgttcacgccattctcctgcctcagcctcctgagtagctgggactacaggcgcccgtcaccatgccctgctaattttttggattttagtagagacggagtttcaccatgttagccaggatggtctcgatctcctgaccttgtgatccacccaccttggcctcccaaagtgctgggattacaggcgtgagccactgtgcccggcctgagtggaagaaactttctaaacgtttgtcctgccatgactgtctctgtctcagactctgaattttttttttttaatggcagctgattttctttaatttttattaaagtaatatatgggccgggcaccatggctcacgcttgtaattccagcactttgagaggctgaggttattggattacttgaggtcaggagttcgagaccagcctgagcaacatggtgaaactccgtctcactaaaaatacagacaattagcctggcgtggtggtgcatgactgtggtcccagctacttaggaggctgaggcaggagaattgcttgaacccagggtgtggaggttgcagtgagctgagatagtgccactgcactccagcctgggtgacagagtgagactctgtctcaaaaaaaaaaaaaaaaagtgtgtgtgtgtatatatatgtatatatgtacatattttagaaagttgggttatactgcaaagtttattataataaaaattagctatcacctctcctttcccaaagttccacattccagagtcaagtgttttcagctgttttagcagattttgctgggttataaatccacatttccaaatgtaattttttcctgctatttccttgtttgttttcaacttcagaaattatctattaacttcttactctaggaaattaacatttagctttctatgcacacatatatgcaaacacttcttccgttttccaaatgtggttatgtcacagtttttgtttaagttgctatttttgttttattagtacatgtgttgtttaaagctgagccacatcttactctaggggactattgtgaggcgactgtgccttacctctctgaactcatcctctgctactctccttgcttgtacttagctgcagtcactctggtctttcctctgtttctcacacacagacagcatattcttgcctcagggcctttggacttcctgcttgcctctgatatttacatgtttcactccctcactttgttcagtttatcttagaaccctcatggaccaccatccccactaactgcatgccactctctgtcttctttactcattttatttttcttcagaactcttaatactgcctaacagattgtgtgtttgtttmttctctcctattagagatttttgtccattttgtttacctctgtatctttagcacttagaaccattcctagcacatagcaggtattcaataaatggttattgaatgaaagaatgaatgagtaggtgagtgaatatatttatgaataaattattttatttactttctttacttttttttttttttggtttgagacggagtctccctctgtcgcccaggctggagtgcagtggtgcaatctgggctcattgcaacctttgcctcccgagtaagtgggattacaggtgtgtgccaccacgactggctaatttttgtatttttagtagagacggggtttcaccatgttggccaggctggtctcgaactcctgacctcaagtgatccacccacctcggcctctcaaagtgttggkattacaggcgtgagccactgcacctggcccctgttttatttactttcttatataatttttgtttccttggagtgggtaattgttttgttttttagtttgcttagttgtcyccaaactctcctacattactgtaaaaggattcccaatatggccaaacaccacaggcaattttcatttttcttttggaaacatttattctggaccattctatctttttttttttttttttagtcyggacctgttctgtaggcctgattcagtcagtactgtctctgtgatacgtggacccactaattactagattccaagtcttatttattagtgtactccctggtttggtggattacactctccaatgccttactgaaaaaggctgagtaggaggtaaattttttgaaacctcttatatctgaaaatgtctgtcttcttcttcctctaactggcaagatacattttttgaaattattattattattattattattattattattgagatagagtcttgctgtgttgcccaggctggagtggagtgcatggtcttagcacatggcagcctccacctcctgggctcaagtgattctcctgcctcagcctgccaagtagctgggatcacaggtgcatgcccccatttccggctaatttttatatttttagtaaagacagggtttcaccatgttggccaggctggtcttgaactcctgacctcaagtagtctgcccgcctcggccttccaaagtgctgggattacaggtgtgagccaccatgcccgcctggaaattatttttactctgaactctgaaatcattgctctattgctttctagctttcaggatttcttgtttagatgtatagtgccattttcattctttctcttttttttttttagatttacataatagtaaaactcatcttttgtcataagcagtactattggttttgacaaaggcttagaattgtttatcgttcaccactatcatgatacggaacagtctgatacttttaccttttgaaagaaatctttatttctctgcaagtgtttaagtgcttctctttgtctctaatctttaaaagggatgctgtacctttgagtctttttgcattcattatgctaatgaacacaaactagaaactcgtctttcaggtctggagaagttttttcttggatgatgatgattattattattattttgagacagtctcgctctgtcgcccaggctggagtgcagtggcgcgatcttggctcagtgcaatctctgcctcctgggttcaggcaattctcctgcctcagcctcccgagtagctrggactacaggcacacaccaccacacccagctaattttttgtacttttagtagagacggggtttcaccatgttggccaggctggtcttgaactcctgacctcgtggttcacctgccttagccttccaaagtgctggaattataggcatgagccaccttgcccagtctggattatttctcttttctttctttctttcttttttttttttttttttttgagatggagtctcgccgtgtcgcccaggctagagtgcagtgacgcaatctcggctcaccgcaagctctgcctcctgggttcactccattctcccgcctcagcctcccgagtagctgggactacaggcatctgccaccacgcctagctaattttttatatttttagtagagacggggtttcaccatgttagccaggatggtctcaatctcttgacctcgtgatctgccctcctcggcctcccaaagtgctgggattacaggcgtgagccaccacgccagccttatttctttaattatttcattctccttgtttttagttcttgcttttaagaattcccatttgttgaatgttggacctcctgaactaattttctaatgttctcttattttctattttttttgttgttgcttttttatatttttattcttctttgggatttcctgaactttgaatttcaactctactgaaattttagtgggagttttggagagagggaagattaaacttacggatttaatgcctcctatttaactgatgtcctggcttctagttttccatcctgttctttatatctcacatttttttctcaacttgaagaaattcaaggtaacgtggtgggtatgtaagagagtgtgtctgtgtatttgtgtatttgtaagtcttcctgaaatcaagattgaattagacatgagatgcttgggaaagaaatctcaaacccttcatacttcagttttcttttttttttttcttgaaatggagttctgctcttgttgcccaggctggagtgcaatggtgcgatcttggctcactgcaacctccacctcccgggttcaagcgattctcctgcctcagcctcccaagtagctgagattataggcatctaccaccacacctggctaatttttgtatttttaatagagatggggtttctccttgttggtcaggctggtcttgaactcccgacctcaggtgatctgcccgcctcagcctcccaaagtgctgggattacaggtgtgagccatgcagttttcttttatataccaggtgaatttcttaagctgctattaatttctcaacattttagcatttttgtaaatatttggaacacagcaaatcagtttttaaacattgatataatcctttttcaacaattctggatgggatgttgtttatgcctttccctattattgttctctctggttatttcttctctctggcttgtaatcatcatattatatccaggtaacatttatgagattactaaatatgtgctaacgttaatatgcataatgctgtagcaaatccaagttgaagatctcaattaattaatgtagtttagtttttttttttttttaaatagagatgaggtctcactatgtcgcccaggctgctcttgaactcttgggctcaagcagtcctcccaccttggcctccaaaagttctgtgattacaggcatgagctaccacgcccagcctcaattaatttagttctaaaaattcctgagatgctagtatttgacttgttgcctttctctgctcaacatataagctcaattctgctaaggcaatcacatttttccttagaaggtctctaatgtggagctgaagtcttacaaaggtaatagtcaggttctgtgttatttctagggtcgaacaatcttatcagaaggttatggccctttggcatcagctgcatgttaacaccaaaagccttatctcttggaactatctgcgtaaagaccttgaccttgtacagacctggaacctagaaaaggtaattatgaaaaccttaccccaggcttacattccattggcaagattttttcagaaggagcttttttcattactgtgagacttttccccacccaaatggagtaaagtggactcaggaataccattttagagttcgagacctgaggttcttacaagctagaagcagcaatttgaatggtaaaggaaattcctaattagaataagtaacatctttggtcttcttggcaagggtagaaggttgcaggctttttctcactctgtaagacaatcatgtcttttgcataagaatatgtagtaggtgaatacttgtgaacaattattaagagttatgtccagtggggcacaaagggtggttctggggtgctggtaatgttctgcttcttaatctgaatgctgactaaatggaggaattcarattataaaaatcaacatgtttacgattatggtttatgcactgttttgtatatatgttacttcagtaaaatggaggaaaagaggaagtgttacatttttattctgttgcaatttcttctggctttttctttctagcttcgatcctcagcaccaggggagtgccatcagattatgaagaaccttcaggcccactatgaagactttctgcaggatagtcgtgactctgtgctgttctcagtggctgatcgcttgcgcttggaagaggaggtggaagcttgtaaagcccgcttccagcacctgatgaagtccatggagaatggtgtgtgcactgggaagagggaaagagaatagtagaatgagagcctttcaaggggttgctgtgaaacccttcatataaatgagagagtaacatcaccacttttttccatttgagtagctacgaacttgagatagagaagaacttatagatgaattctcaaaatcagatcatggaagaagtctgttgatatttcagtcattactgctcatcaacctatcacattttcttgtggctgtaacatgtttggactctcaaagattagtatacagtatgtgaaatttaggatcaggtaggattaggcagaagattccctaaataaagccttgctttcattagtaggatatcaggtctgcttatctctgatgtcgagcttactggtcttttgtgtttgttcattcacagaggacaaagaggagactgtggccaagatgtacatttcagagttgaagaacatccggctacgcctggaggagtatgaacagagggtggtcaaacgaattcagtctctagccagctctaggactgacagagatgcctggcaggacaatgcattaaggattgcagagcaagaggtaagccctaagagccatgtggatgctggttgtggagtgaatgctttcagagttcattggatggcaagagtatggcacctaagaaatgaggcaatagactcaagacagtccttctcaggagttcttcttgcagtctataaatgtcttttacccgtggagaagtgtgatttcagctccatgtgtattgctaaatgttgattagtttcctacagagttgagaaggcaaacagactagtaaatttttctaagcagtatatttgggctatgtattttgaaactgcttagtagagatgctactcttttattctatcccttatgtgcctgtgttactttaaatgacttggttaccttcagtcatatgaccaataaatataaggaatgactctgatttgaatgtgggctctgatacatgctctgtctgtgactttgagcaagtgagctctcatccctagtttactttcttgtaaaatggagatggcaatgcacgatatagggttattttgaaaattaatggtatagtacatataatgagcttcctgaaaaagtaaaatactatgaaaatgtaggatagtattcttgaagtaaaagtagcaaatattttttgctttattaagtcctctgaggcatacaaagaaaagtaaataaagatccttgttttttggcttatagtgtagtgaaaggaaaataaaaagtcgaagttacaattggagacttcagtataagatataagaaatgtcatgaatagtaactagtgtatttccaagcaaagattgctgtaggaacttagagtgtttctagaacatttctaattagaatggtatgagagagctctatgaaggctattaaatttgatctgggagcttaaaggggatggaaaggaatggctaatgaggaggagtgatttttctaactttctattttttccccccaaacctgaagagaagagtgagagggaagtatgatttttactggtggagagggaggtaatatgaggcatatcatatgagcctgggaattctcatgtggaagctttttacttttctatagggtgatacaaaatctatttgtccctgaaaaatagaactcactaagaaataaaggttgactgcatgctttgggaggccgagatgggagaatcgcttgaacccaagagtttgaggcttcagttagctataactgcaccactgcactccagcctgagtgaaagagaccctgtctcaagatacatatatacatacatacatctaaaatacctcttcctttttaaaactttattttaaaataatttcagatatatagaaaagttttattctcttatacctttcacccagagtctccaaatgttaccatttttgtgcatttgctttatcattttattctatatattatacataataacattccttttttatcttgagagtaagttccagacatgaagctcctttattcctaaatacttcagtgtgcatcttcaaaaaacaagggcagcctcttacataaccacagaacaatgataaacatcaggaaattaacattgatacgggttgagtgtggtggctcacgtctgtaatcctagcactttgggaggctgatgtaggcggattgcatgagaccaggagttcgagaccagcctggccgacatggcaaaacctcatctccactaaaagtacaaaaagtagccaggtgtggtggcaggtgcctgtaatcccagctattcaagtggctgaggtatgagaatcacttgaacccgggaggtggaggttgcagtgagccgagatcacaccactacactccagcctgggcaacagagcaaacctgtctcaagcaaacaaacmaacmagcaaacaaacattgatataatactgctatccaagctcacgcctcattaaaatttcatcagttgaccaaataatgctctttacatcctcataccatccatccctagctaccccaagaaggaaggtccaggattcagtccaggattacatattgcatttggttgctgtgtatcttcagatttctttaacttgaaatagtttctcaactttccatcatctttcatgaccttaacattttttttatgagtgcagcccatttattttgtagaataaatgtagaatattttgtccttctgtttgtggttacctgaggtttcttcctgattagtgttaggtcttacaattttggcaggaatcctgcagaagtgatactgtgtccttggtatattagtgtgtcatataaggatacatatgacattactggtgatgttaattttcatctctggttcctattttccctttgtaattactgagtatcctatggggaggtactggagacaatgtaaatatcctatttttcatcaaattttcaccaactagttttagcatccattgttaattcttgactgaatcacttcttagtatcatagttgccaaaagctgcttttctaattctgtcgttccttctacataaaaaacatgtacattctatggaaaaggaaaaaccaggccttctttccttttctgtagtttgtcttccttctctccctccctccctttttttttcttccctccttcccttgctttcttctttcattatttatttatgtcaatatatactcatggattcttattttattcaatggtgtgtaatttgttactgtcattgttttcattgttttgatgctcaaaatttcccaaagttagccaatggaagccccttcaagctggcttttttgtccttttaacatgtccccatcattttttgagttatttccttctttctcttttttttaaatagagatgaggtctcactatattacccaggctggtctccaactcctggcttccagcagtcctcctgcctcagcctcccaaaagtgctgggattacaggcatgggtcatgatgcccattgaagttctttctttttgacaaaataagatcttccaggttcatcttgctttttccagtctcaaccctggaaatcaactgtttctccaaggagttctgattcttttgggcagagaatattatttagaaactaagatctgggtaccaaatgtattcattgttgttggagtattattgcttataggcccacttagcagacagagctagaaaacataggcygggtgtggtggctcacgcctataatcccagcactttgggaggccaaggcaggtggatcacctgaggtcaggagttggagaccagcctggccaacatggtaaaacctcgtctctactaataatacaaaaattagccaggcatggtggcgtgtgcctgtaatcctagctacttgggaggctgaggcaggagaatcatttgtacccgggaggcggaggttgcagtgagctgagatcgtgccattgcactccaccctgggcaacaagagcgaaactctgtctcaagaaaaaaaaaagaaaacatatatttacaaatatatatatgcatacacacacacacacgtgttacatatacacacatatacatgtacgtaagtttacagatatagatcaatatatttattgatctctcaatttctctttctctctctctctctctctcacacacacacacacacacacacacacacacacacacaaattcatatgtatttgtctccccatccagttcccaacccatagcacagggattattctagcctctttccatatttttaacccccttccccaagagagaaaaacctgctttatgttatccacagtatatttacttattgttcagtcctagcatttacagatagtagtttcagaattgttaactcactgcagtaaacaaacctaccaaactagagtttaacatttatttatagttccttatgtctttagcctaaaggtatatctatagttcgaatactgagttcagaaattgcttgtgtgtgttcttaccctttcttccccttcagtgtgattatgttatttatctgaaatacagttaggcttatatatttctgttgtgttccatttgagagccacccttaaattttccttatttatttctttacaagaatgtaaaacattaacatggttctaaaagtcaaatctatacaaaaagaagtgtattcccctctagctagtccttttatcccctttgccttccttygatcctttcaattccatccttttcatctcattagtttctggttatcctttctgtctgtctctttgtataaacatatacacatatattttctcattttcccttcttttatatacaaaatataacatgctatagatactctgttgactttgctttttctgcttaaaaatatatcctaaaaccacttaattcacagaaatctttctcatttcatttacagctgcataattctccatcgtatgtctgcttcatagtttattcaaccagcctcctatatatgggcatttaggtggtttccaatatttagctattacaaatgtggacttctttctaccttttttgttcaattctgtctccctctttatgtgtgtcttgttcctggcagcacacccaggaggatttacagcaattgaggtcagacttggatgcagtttctatgaaatgtgacagctttctccwtcagtctccatctagttcaagtgtcccaactctgygctcagaactgaatctgctggtggagaagatggaccatgtctatggtctctctactgtatatctgaataagtgagtgagctgaggttttgggtccaagagcaatattttccattgggataagaaagagaaaggcttaaagtatttcatgaataatacagagagattatagatcctgaagagcatatactgataatgagaggtcttggcttcagttcctagtaacattaagtaggttcatttggactgcagtgaagaagtgccagtgatatgaaaggggaattaatttgcagtgttgggactatgatttacctcacttctgtttgattaaatatttctgaaaataatacttaatggcataaagacaaaggaagagacactaaagaataaaaagaaaagtttttagttacactaggtattagactttgaaggtcttcmctcttcccacccatctctacctatgaccttgaagagtagcgcatcttaaactcttcatagtgtaaaatgggtttctggcttcatgcctttcttccatgagtccaccacatgtatgcatgttccartgccacttagaactttattttgaattggcttaaattggcagcataaaaaccacatttacttgttttcacaaaaccctgtcaacatctaaaaatggtgacattgattttggttattatgttttatgaacctctctatagcactccaggtatataamcctggctcctaaaattcatgtgttaatgaaggaatgtgtatttgtccccacaggttaaagacagttgatgttatagtacgtagcatacaggatgctgaactcttggtcaaaggttatgagattaagctgagtcaagaagaagtagtactggcagatctctcagctctggaggcccattggtcgacattacgggtgagttgctctgagtttcttaggaggttgacctaacatattcattgctttgggttagcagagaaatgcaattttggatggcatgacactgatttaaatttgcatttgaataaggcagaatgtcattaaatatattttaatatgtattcaaagaagaagggactgagaagtatgtctagctagaaagggaagagaaaggactaggtttttctatttattttttcccttttcaccttaataaaatcatggattaattggatacagtcagtggttgtgccataagtttataaatcacttagctgttatctaatttgattctcacaagccactctgtgaggtggacaagaagagatttttctctccatttacagatgagaaaaccaacacttactctggctaaatgacttattttggtttcatatgttataagtggtgaagccaggtttcaaacacaagttctatgcacatttctctatagagtactgcctgtccttggcatcccagtgtgtatcaggaaagcagagaccatgacatgtggaggcagtcctggcacaaacattccagggcacaatcacatatacaatgtggaaatagctgtagaccgtgtccttgtttcccaccttagactgactcctttttagcatggaaagtatacaacctgtttctgtacttatgtttccacagcactggcttagtgatgtgaaggacaagaattcagtgttttcagtcctggatgaggaaattgccaaggccaaggtagtggcagagcagatgagtcrtctgacaccagarcgaaatctggatttggagcgctatcaggaaawaggctcccagctgcaggagcgttggcaccgagtcattgcccagctcgagattcggtsagtggtggccccacctttttctyctattagagttcagggactaggtcttaaacaaaaacagagttatatctgtacatttatatttaaaggtggaaatggatagggaggggtggaaatttaaaaaccacataaattctggacaagtaagtgacagaaaggtgagaccggcaatctcaaagcagatgtaatgcctctcctgtgtcccaggtcttttctagttaagccactgatgacaatggcttcctggaatgtagacttgaaaggtccctggtgatcttttctcaaggacaaaacctatactctagttcttgttttattagctttgtatccaaatatgagccattttttatgatggagctttacagaatttcttgytttcatctcatttgctaattcagtaatttttcatctctgttactagaggtcctgcttctaatgacagatgtaaataggaaggacagaaactgcaccttttggaggctaagctggttagggaaatttgtagggagaggagcttaacaactcataagttttcattctaattgaagtcttatcacaaagctggttagactagagaagtgatatgacttattggaagtagcaggaaataatgactatttttcacttctctcccctctctccttgagaaattatagtgattcataaatcatagctgtgctgtactgacaggtactctgtcatcagggaatagaactgtacagccaatactaccttattggtcaccctggtaattcttggcaacctaggtgaaaaatttgacaaggattattgtgggatgctagaccacaaggcagcatccagggctagcaggtcacaactggtttctactcacttttttgaccatagggcactggtacatgcataggtctcactcagccttgcatcgctgttccccgtagataaagatggatcgtttgtggtcaagcccagctggatacatgggttaaagagggaattacctcatttactttattgtatttgtaccaaggtatctgatagcagtttccctttgttcttctagccaatctgagctagaaagtatccaggaagttctgggagattaccgagcctgccatggaactctcatcaagtggattgaggaaaccactgcccagcaggaaatgatgaagccaggccaggcagaggatagcagagtgctttcggagcagctcagccagcagacggtgagtgtggtagtagctctggcgagaagagttagaaatttaaattttctttatcataaaagaaaatgatrtactggcaattaaagcttcctccaaatggaagatatccaaattcccttttctttgagtggtttgagcaggatcgtcccaagatactggttttgcatttagactagagaacctgtaaggtaccttcagttctgagtttctgtaactgtattgaaaccactagatggacagattaaaattatctttattttgtttttttttatattacattttattttactaggattagatatggggttttgaaaaccaagggaaaattgtaagtagaagaaaatgattcttttttttttgaaaatgatttattttaagcattttttttttgttggtattttgttttgttttgttttgtttagcattatggttaagagtatgagatctggagttgtattgcctggattccaattctggctcacttacctactataagcctttgaagaagttatttagcttctcagtgttctacttccttatcagtaaaatggacatagtttgttatttatttaacctaccttatgagattatcgktgctaggattaactgaagtgatacatgtaaaatacttagaatagtggttctcaaagtgtggaccccagactagcagcatccgtatcacctggggacatgttaggaatgcaagttcttgggttgggcacagtggcttctgcctgtaattgcagcactttgggaggccgaggcatggggatcacttgaggataggaatttgagaccagcctggttaagaaagcgagaacttgtttctacaaaagattaaaaagacaaaaaagtgcaaatttgtgaacccaaacccactgaaccagaaactctggaggtgaggcccagcagtatgtgttttaaccaccctttccagcaattctgatgcagctaaggtttggaaactactgccttagaacatagtaaatgttcagctctttcaatggtggtaatggcaatgataatgttgtgatattttgcttcctaggccctatttgcagaaattgagagaaatcagacaaaactggatcaatgtcaaaaattttcccagcagtactctactattgtaaaggtaactttaccacatcccaaaaagaacatgaatcatcaccagctcaggaaaacctacatcttcactgtaggttctgtttctagacaaattaagcagagttcttatgctacaagctggcctgatccttcagttaagcagatgtgtatttcctgcaaccccatgtttggggttgcttggagaagtagcagacgttggctgtgatttgaggagtctccatttgcrtgaccgtaggccctttaaacttaacatggcaaaaacagaatgtttgagttttcttcttaaatatgcttcttacttgtctttcctatctcaggaaatagtatggccatttttttctaattgctgaggcaaaaaacccaggagtcatcctaaactgttctctttgccttaagctttatattctccgttggctcttgtcttcaaacatgtcccacatctgactgcctgccgttatctcccctctatttccctagttcacattccagtgaagaatcttctttagactactacagtaccctctgagctggtctcttgcttctgctctggcccccacaggctattttcccacagagtagccaaaatcccctttttagaacatattgcatgtcactgaatcttagactccattgattacaagctacaccataattttctgcatgccaaaaagaggaaaaaagaagaaactctgccagttatgtgacatgccattgattctaaaatatgttccaatttgaaagactaaaatgtggagaaaatgtgtaccttagaatagatgaaatacagcaaataagatcatgtcactctcctgctcaaaactgtccaatggcttcatatcatagtcgtaataaaattctaaattcttacatggtttataaggccgtgaatgatttagctctcccctatttctcttagaatatctttaaggaaaaatgacttgaggccaggtgtggtggcttatacctgtaatccctgcactttaggaggccaaggcaagagggttacttgatcccagaagtttgagaccagcctgggcaacatatcaagatcccatctgtaaaaaaaaaaattttaaattagctggatgtagtggtgtgcacctgtagtcccagctcctcaagaggctgaggtaggaggctcacttgagcctgggacattgaggctattgagccrtgattgtgtcactgcacttcaacctgggcaacagagaaagactgtgtctccaaaaaaaagaaaaaaataacttgagattattacatatttatttgtttattctgtgactcttactagaatgtaagttccaagggagcaaagtttttcctgacttgtttctcagtgtgtgtgtatagcactcaaaacaatggcaagtacatagaagatgcttaacaaatactttttgaatgaaggctttcctttagttaataacagaacactcactgtaagaaagaattgagttcaaacccttcaccattttccaggcttactttgagtatgcacttagmctatgtttctgttactgtatctataaagtgagaacaataatacctcactgagtgattgtaaagattaaatgagataatgtatacataggaccatgcctcaaacttaaagtgcactcagtaagtggtagcaattgctttgattatattttaatgttcttactactatttttttatgggttccttcacaaattcattccttgttttccttctacccagagtttttttaagtagacagcagaaggacgttttaggcaaaggaactgcataatcccaggcagagaagaatgaaaatacttgattatatgaggaaatagagagtattctgatatagctagaaggcacaataaggagcagtgactatggaaaattagcggtgagattggggccaacccatgacaggccttgttccattgttgtggctttatcttctattcttgcttctcaaagtgttgtctttgaaccagtagcatccgtagcacctgggagcttattagaaatgtagaatctcagacctgctgaatcagattctgcattttaataaattatatggggatataatttatatgcatgttggtgtttgaaaagctctattctagatcattgaaagctttttaaggagaagagtgatgtggtcatctttgggttttagaaaaagtattctggtggaacaatagagaataaattgagattagactagaagcagtgaaagtacctaagaggctaccgcacttataaggctacttcatgtgagagaagaagagagtggactagagcagaacttgcagggttgcagaggaagtggcagaatagtatggtaaaatgagaatactggttcagggattagaaatctaagattctaatcctaactctgttaacacttacccacttagttaattagggaaattcacatcccctctctgggtttcactttccccacaggtgagatgaaagggttggtcagactgcaactaaggcgtgagcaaactatgacccacaggccaaatcttgtccacacacctgtttttgtatggcccatgagaaaaggttgaaaagaaaatcaaaagaataatattttatgatgtgaaaataatatgaacttcagtttttagtgttcataaataaagttttattctamcaaccacaccctttcatctatatattgcctatggctgctttcacttataatgagagagatagtatggcctgatattttctgtctggccttttacaggaaaagtttgctaacctccagcatgagtggtcaccaaaacgcttccagcaataaaaagctatgatttattacatgatgtatgtgaattataaaaccctgagtaactgtagcgaaattcatcctttcctaggactatgaattgcaactgatgacatacaaggcctttgtggaatcgcagcagaaatcccctggcaagcgccgtcgcatgctttcctcttcagatgccatcactcaagaggtgagagggtgggggaaggaaatacaccactgtcttcccttaaggaaagattcatttgcctgggccttacattttgatttagggctcacttttctggtgaacatgtgactgcatgaacatttcctcttattttgaactatttaaatttcattttctggcagacgatttatttaaattgttcttttgaaccacagttcatggacttaaggactcgctacacggcattggtgactttaacaactcagcacgtgaaatacatcagtgatgcactccggcgtctggaggaggaggaggtgaggacagttgggtccaaagtcatcttgaaagtacagtaaaacatcttagccagcacggtggtgtgtgcctgtagtctctggtacccaggtggctgagttgggaggattacttgagtctaggagtttgaatccagcatgggtgacatagggaaatcccctctctacaaaaaatatttaaaaattagctgggcatggtggcacacacctgtggtcccagttacttgggaggctgaggtggaaggatcacttgggcctgggaagttgaggctgcagtgaccatgattgtgccactgcactccagcctgggcaataggctgtctcaaaaaaaagcccaaaatatcccacataccccgtaaatatatacacctactatgtacccacaaaaattaaaaaaattttttaaaccagcaaaatatatgctatatatgtaacatataattaaattattatataatatatattttatttgagagacaaggaagttagaatactatgtataattatgatttcattaaaaacaaaactgtgtactacaaagacatggcatagaaagaagtttataggcacctataccaaatttctggggaaataacgttaacttacataattatgtattttagacttgtttgaatttattgtaatgagcatgtcatctgtttgtaactgtaaaaatcttctgtctttgtaaaataagtttctgcatattcagcctctcttataaaaaaaaagctgttaaaacattaaccataccatcttttgctttttaaattagcaagactttctttatatccatacctacataatgtaatctcagtaggcttcagtctcttctcttcttacagattcacctgtaaacctaagaattatgaaaatgagtaagatgctatatgtgaagagatttttttaaaaagcatcaaataattattgagtgcctattatatataaaacagtggtttgtatttttcagaaaggtattaaacctaggtataataaatttagctcacaaacacctgtgagcaatactgtaggctgggctaaattatacttggggttattttcacagcccacttatttaggtaactgtatctgtttttaggaagacttcatttaagaaaatctgaagtcgtgccagcctaataaaagacattgctagcatattgattttctatttcctattctagaaagtggtagaagaggagaaacaagaacatgtggagaaggttaaagaacttttgggctgggtgtctaccctagcgaggaatacacaaggaaaagctacctcatccgagaccaaagaatcaacagacattgaaaaagctattttggaacagcaggtgagaagaaggtccatctctgtttacctgggtagaataatatgtgataatacattaggtggaatagtagaagtcacatgtgggccattccagaagtgattgctacctgagtaaatgttaaagaaacttaagaagccatcttgtttgttcttgtacctttttatcagctgtagctcattggtgataataatttgacctaagctgcatattttctctaggatttaaaaaaataattttaaataatttttgactcttaattcttgggttttgaagctttttctctttatttctaccatgtaggttctgtcagaagagctgacaacaaagaaagaacaagtctctgaagctattaaaacatcacagatcttcttggccaagcatggtcataagtgagtattaaatgagagattatggcacatctggggcacctggtctatcagtctaaaacttacagccataatgagatttcagaatggagaattcagagcagcaagagccagattatggggaccctgtagttcatacggaggagtttgcatttaatttgttggctatgggaagagattttaaatgtgattgtgttttacttttaaaggttgctagaacagttatatgaagaaaggattgacatgtggtgagaatagaggctgagaggcctgttaagaggctattctgataatgtagacaagaaatgacgaggaatggaaacaaagagactaatattcaagagatgttaaggataatgaatctatgggtgtggttacacatgaaaattatcgcataaagtgacagagatttgaattatcagtgtattagaaaccatgtgggtagattactcaaaagggctttttggggcttctcagcctgttaaggaagcctcagagaaggaaaaggaaaattatgagtgataactcagaacccaagaaagaacagagttccaaaaaggagagaagttcagaagtcaagaaaagttgagaaatatctgttacatttggcaagttagaagtctttggtgcctctggtgacaagttgtgggatgaggtcagatttagtatggtgaggagcacattggaggcaagcaaggcgaaacagaactgctctttcaagaagccaggacataggagcaaaaaatataatagagtcaatatttaaaaatgaaatatatggtcaagaagggttttgttttcttaaaagatacaatggacttaactatgttttcgagtaagtctcaaggacaaaggggaggagataattagagaaaggtcccagtggacatgcaagaggaggaaactcattgatagttagaaagtacaaccttaaacaggaaattgggaccaccttttttctgaggtggagatgagggaaaggagattaagaaaggtatggatagaggtaaatttgttaggaccgaagccagaaagtaagagaattagtgcccagtggtctgtattttctctttgaaataggtggagaggtttgttgaaaggatggtgccgaggagaaaggaagagggacttggctgggaatttacaagaggattgtcaggaagtattgtgacccagttgagattggaaaccagtgggctctgtctatgtggttgtggaatttttttttctctaactggatttacctagcagccttagtgtaggagcagaagagactggtggtttgattgatttggggttgggcttttatcaggttagcgagtggagagtgcaaggataatggtaaggaactgatcaagaatatggattgtggggtctggcctctgaagaaaagaaacttaatagagaggactgatagaataagaggaaatggaggcattaaggaaggcttaggacatatccatgagttgatggatagatcccatttgaatcaacagagttcattctcagaaacataatgtggaatgaaaaaagaaagttgcgggattcatcagattcaagaggtggttacctttgggaagaaagggaaaggaatggacttggtgacaaatatacagtgggctttaattatatctgtaatgtcttatttctaagaaagggtctaaagcggccaggtgcggtggctcacgcctataatcccagtactttgggaggctgaggcgggcaaatcacctgaggtcaggagttcgagaccagcctggccagcatggtgaaacccagtttgtactaaaattacaaaaattagctgggtgtggtggcgggcacgtgtaatcccagctactcgggaggctgaggcaggagaatcacttgaacctgggaagtggaggttgcagtaagccaagatcgcaccactgcacttcaacctgggtgacagagcgagactccatctcaaaaaaaaaaaaaaaaaaaagagagaagaaaaagaaaaggccctaaagcaaatatgtaaaatagtaaattgtgaaatgaaagctggatagctagacaacaggtaaataagaatgtgttacattcttctgcctgtttaaaatattttattttaaaaagaaaataggtatagaaggagtaaagaaagataaaactgaaaggtagagttataatcatatagtggattcttgaagtctaagatttcagaagcagaataatttcagatgataggatctaagtttgacatttgggggtggggctaaagtggagatgaggtcatttgaactacaagcataggggtgacatagcattgacatcatcaagaaccatgacttgatttgagataaacagaagaactgactgaaatgccaaagtctccgatgaatatggaagaagatcatccatccaagatgaagaagtagcaattttgaagcaatagagcagagtttggagattgtttttttttctcctaaaaaagctttaatgcttcatcttccaggctctcagaaaaagagaagaaacaaatatctgagcaattgaatgccctaaacaaggcttaccatgacctttgtgatggttctgcaaatcagcttcagcagcttcagagccagttggctcaccagacagaacaaaaggtacttttagttttcatctccaaatattgggtggataccttttgaatggtatgaaggcagctttgctgattcagagtcatgatcactagctttccatgaccaatgtgacttaatttttaacctcaccttagcagccatttgtcttgtgtttctttactggggttccatgatgtgttggtcagtcaaaagcactagaagacacttacaactaaccctttagacctggttcaccttttttgtcttatgccattttgtggcagacagcagtctaggagaacataaattctgtattatatgtgatcacagggcagtaacatactcccttgtggcattgtcactcaaaagttgatagccaaaagttctggatattgggaagaaaaacctgtgaacctcttccctctatactaaggcagtaagaaatattaagttccaaagcaaactggtagagtagtttcactgactaagacgctggttcccctcacccatagtcatctcatcatgtggcatcttgaccagttcccctccatattcatttcctggaccatgtgaaagtcatcatagttcctactggttgtcctaagttcttcctggatacttgtgcgtgtgtgtacacttaccatattatatacatgtgtctctgggatatatatgtgtgtttgcctgcttatttcctatgttgtgaagcaatggccaacttatgtggggcaggccaaaattaagctcacgtgatagtcaaatttggtccagatgatgctcaaaatgatattcagacaaagcatgtcttgattctgatccttggatataaattttgtgcaacaggagctagagttgtaaaaaccacaagacaaaaccagctatgatttgatggtgtatttccaaaaacaaagtgctggtgtaacattctccatttaaggtagcccacttccagtggcttgttgcttcaccatataagggagtatgtgaaaagttttaacaattgcttgctgagaacatccggttctcattttgaaaggttaaaaaagaggggggaaaaggaaaaaaagaaaaaaagaaagacaggacaggctgctgagcaccactacattgagcatgatgtgtctcctgtatgtgtgtttcatgtgaagtattgttctgattaactgacatccttgcttacaagtttcactaaccctttggagtttaagcacaaatgcacaaagggaaaagaggacgacctgtttggggttcttttttgcaaaaacaaacagtcgcatgctggacgctaacaccaagcttacactgtgtgtgtgatacggctgagctgctccataaggctctatcttttatctgcccaaggcgtgccctgcaactctggtaagtagaagccttttatgttttctttcctcctctccttctatctcttaatgcttgtttaggtcagaatgtccatgtttggtaggacagaaatgagtttctctggattttttcccagctgagtatttcctgcctatccttcaattatatgagggtgttggaagtaacagtgtagacttttctctttggctacactgcaggcctttcttcaatgtcagcatttttgagactccatgaatctcacaaaagaaatgaaaagttctcaaagggatgtttttctttgtcatattgtctgttctgaatagtctttcatggattttctaaaaggaatttttaaggtatcttgaaatttttcagttatcacattccagtgaactttttccttcaatttctttaaaacagacacatagtgagtttgtataatatatatgtttaaattatatgaattggactttctattcttggtcagaaaacatggggatagggaataaataatactttaaatagtgtagagaagtctgtcagttattccattgattgaacacatatgtagaaatggagatgagaaccaaatatactgttctttcatttgctatccattctgtattcttattgtatgcacctcatcaagcttgaaatcctcagtgcgtgtttctaacacctgaggggaaatggcttaatgattttaagggtttccttattatttatccatattcatcccatatttattaaatgacagctactgttcctagaccttcatggacaatggatcagctcttacagaacttactcactgagataaaatgaaatgccattatttaggaggcagggaaataattggaaattgcttccacaagatcctctatcaataagatagagagttaaataagtaatcagaaagtagcactgaccaaagagggacagataaaattatatacagaaaatgaaaataatgaacatgaaaagaagagctgaaaagttggagagtaataaaaatgatgaagtgttgtaagtggttaaacacttaaataatttaaaatctgaatgtattattctgtgataaaagatctcaaaaatgagaattctttaggagctgtttctaggatttgcaagggtaattttgacagcgtatatgccttattcactgaccttcggacctaactcctgtgttaagatgtgactctactgtacttgtcttttacagttttctgggtctgactctgggaggacaaacaagatttagaatcagaccttgatttgtttctggaactcactagttttgtgaccttggacaagttacctaaactctgtgcctcattttcatttcttcaaactaaagattcaaacaattgttttcataggattactgtgagaattaaatgtcagtgttcagtagatctagtaataagtgatagctgtagtcatggttattgtactacccattctagcctggatcagaagaaaagttactagtggttccataggcaagggtccccaatctgtttcttccttgacttgctacttccaagacctagaactaacttaatttagagccattgccttgggagaagctagcattgtccaagaatatgagtatcccacttgctaaatagttgcttgagtagtatacacaggcctgtttactgggatgcacaattgttctggagcttctgggctgcataaatctctcttattctatggaccagtcctgctgtgctcatcagcagggaattgctacttctagagtcttctgtgtggtttgcaacaccaaaaacttgttgtatggcgttgaattctcactttgggggaactgttacgtgtctttaagaacatttatgatgatttagtcttagaaataagattaaatcctatcattttcactgcttaccaccctgtagagcttgtcactcagatatgcttaatgccactatctctcaagtaatctaggaacttctgacctattaaacattctgcagtttagaaaaactcttttttagtcttaacaccgggtggcttgcttcagaatatttcctacatgttggggcttatcccatgctgggttttccttgtggtcagaattttatatactgtagtactttttttttttttttttgagacagagtctcgctctgttgcccaggctggagtgcagtgatgcaatctcagctcactacaacctccacctcccgggttcaagccattctcctgcttcagcctcctgagtagctgggattacaggtgcgcaccacacccagctaatattttgtatttttagtagagacgggtttttcaccatgttggtcaggctggtctcagactcctgacctcatgatttgcctgccttgggcagattataggcgtgagccactgtgcctggcctgtatactatagttctttgaatgactcctttcaatagttgtgctttgccattggctctgattcagttttctttttcttctcttttcctttttttttttttttttaggaatgcagagcagttgctggggtgattgacctaggcacagtggagatatttcccatcttcaaagccatgcaaaagggcctccttgaccaagacacaggcctagtgcttctggaatctcaggttatcatgtctggcctcattgcccctgagacgggtgaaaacctctctttggaggagggcatagccagaaacctcattaatccccagatgtaccagcagctccgggagctacaggatgccctggccttaataagcaggcttactgagagcagaggccctctttctgtggtggaagcaattgaaaagagaataatcagtgagacagttggactgaaaatcttagaagctcacctggcaactggaggtttcagtctttcccctagtgagaactgtattaacctggaagaggcttttcatcaaggcctcatttctgcatggcttcattcagtattagagtcttatcttagaacatccaagaatttgatagaccctaacacagctgagaaaattggtttgctggatctgatgcagcgatgtattgtccaccaggaatcaggattcaaattactgcctgtcaaacaattggcaggggggatggtgagcttgaaatcaggccggaaggttagcattttccgtgcagttcaggaagggctaatagataggcaggtcactgtccggttgctggaagctcagctttttgctggtggcatagtagatccaagaacaggacacagacttacagtggaagaggctgtaagacataatctgattgaccaagatatggcctgtgctatcctcataaggcagcttcagacaggaggcatcatagacactgtcacggggcaaaggctaacaatagatgaagcagtgagcaatgatctagtagctgctaagatcgcccttgtgattctggagtccctctggtcattcatggggttgctgtggcctgaatctggagagatcctcccaattacagatgccctagaacaaggtattgtgtctactgaactagcacataaaatccttagtaaccgacagcatattaaggctctgtttctaccagcaaccacagagattttgtcctggaagaaagcaatagaaagtggtatcctggatagagatcttgccaataacttaaaatcgatttgtatacctgatgtgatgccccacatgcaactagcagactctgcagaacaaaatattaatcctggagcagcagttctaccgtgcagcaagagccaccctaaggccacagcaagccagagtgagaatctgttgttccagctgatgactcacagctatattaatgtgcaaaatggacagaggctgcttctgttagataaagagctgatggagacactaacatccagagatgagtatcaaacaagtcctccaaaagtggttgaaattgggcatcaaaggcaaaaaactcctgagggattgcaagaatcagctaatgtgaaaatctcaggaactttcagcagtgggtggactgtgaggctgcctgagttccagttttcttctcagaacaaagaatatcccgatcgggaagattgcaytacagaaaaaggcaaaaagaccactgtagaaacagaagattcttctgtagagaaccctgaacaggatctgtttgtagaacaaaaagagagaaatccaaacattgatgctttgaaggtaataaataaagtcaaattagaggtacaaaggcagttgataggtacccaaagggaagaccaaacagcagtgtctgtcagagaaaatgccagcaggggacacctcctgaccatacctcctgctgaggcggaaggtgtgccgttggtggttgacaaagatgttttttctgttgaaacaccaaagaaagaacatcaacctctaagaaacacttcctttacatgtcagaatgaacaagcacacactcttgagactgaatatattcatgatgaaactggaggatctcacataaaaccccaaagcaaaaagttacaagttcaggtaaagaaaactctaggtataaagttagaactaaagtctgaaactgatgggaatgttcatcctctggacaaaaaggaaatgttaaagaaaacatttctggctaaggatgaccataaagaaagtcaagaagcacagaacatcgcaggtggtagtatgatgatgtcagaaaagaccgatgaggaagatagtggcagggaaatttttctgtcatgcagtcatccattagaattgcttgaagaagctaccttaaatgtattatctgcacagttactagatggtggtatctttcatgaacaaacaggtcaaaagctcttactaaatgaagcaatatcccgaggcattgtgccaagtcacactgccgtgaagcttatggagaagctgaacatgtttcaggggttctttgactctcagacttgtgagtctttgacaactgaagaagtcattaatgaaggtctgatggatgagaaattattacataatgtcctcatggcagacaaagctataagtggtgtcttagacccccgtacccagacactgtgctctgtaaaggatgcagttacagttggacttcttgacaaggaaacagccaccagaattttagagaggcaggtggtgactggtggaattattgatctgaaacgaggcaaaaaagtttcagtaactttggcctcaactcttggcttggtggacgttgctgaccagccagaacttataaatctggagaaagcttccaaaggtagagatgctgaaaaaacagttagggagagattaattagtttacaaatggaaacaacaggacttatagaccctgatagtaaagcacctttaacagttgtgcagtccattgacagaggtcttttggagagagaggaggccgttcgtttgttgactaagcaagtggtagatggaggtatcattcaccatatatctgggatgagactttctgttgataatgccttcagacatggcttaattggtgaagatttagccgagaaactcaaaagagttgagaacttaaacatccatcagatttttaatcctgaaacgaaggaaaatatttccctccctaaagccataaaattagatcttattacctcagacctgaaaagagaaatccaggaggttcaggcctttactggaaactttgtggatctcatttctggtcagagattgaccttggcagaagctaaaaaagaaggactgttaactaatgaagcagtattgtctccaggaatgatgcatggcattgtagatcccgagaactgcagaattgtcccctactcagaattagtcaagaaatgtaagattgatattgaatctggacagagatatctagaagtaattcccttctcagacattaaagatggggtgagcgacaaagtgcttacattgtctcaagcaattcagcttggaaaagtagactttgcatctacgctgaaggttctagaagcccaggcaaatactggtggaatcatagatactgctactggaaaaagactgacattggcatcagctttggaagagaaactggtggatgaaaacatggtcagaattattgcatctcatcaggtgttaaatggaggaattgttgacatatttagtgatcagagagtgactttagtagaagctattgagaaaagactgatcagccctgaactggcaaatatgatccaaatagatagttcagagttcagcgatcacagggctcagattgaaaagcaagaagggattgaagtgtgtgcattacaaaatgaatttctaggaaaggatatgttaattgcttgtaatcagactgctgaaatgagttgtaataaagtagaagagagtgagagattatttcaagttgaaaatcagtctgcacaagaaaaggttaaagtgagagtttctgatggggagcaggcaaaaaagagcagggaaatttccttaaaggaatttgggtgcaaggatcaacgtaagccaagaatgtcttcagatgctaaagaatttatcagtatcataaatcctcataatcttaaaggtaaatccttgggccaagtgtcattgacacacccttactctgaatgtgattttaaacttaaagaagtggctagaaataacatgggaaatgatacaaatgaagagcaggaaaaagcagtgacaaaaatagaaattatttctcatatgaagcagtctacctcatgtctagattctgaagaaataagagaaaatcaaggggaagtgattttggaagtacaagaaacatattgtgaaacgtcaggcaaattgccgagtgagcaggttttgcagcaaccaatgaatgctcgggtgaaaagtaagagagagaagagggaggtgattgtagaagaaagtatcagaacatgcaaaccagcatttctttctgaagaaaagttgtatcaggaaactgccattagagatgagcatgactcccatataaagagccaacctagggaaatgacctcaagtgaaaaagggaaagaagctgatacagaaatgggattttctattacttttaaaattgaagagtcctcttcccaagtggtacctcaaggaatttctgtaaaacatttagatgctttaacactcttcagctctaaacaggccaatgaaggaaaagtaaacaatttaagtctctgcttgactttaaaaccagaagaaaacttatctcgagaaattgcctgtggggcccagagtgaaccattcccttgtatgaccccaagacctgaaggattgcactaccaggaatcagatggaaaagcccaagtgacaggcccatcccaaatttccaaaacagacaagtctttccaaggaaccaccagacaggagaccaactatcaagattcctgggttacttcgaaaactaaggaaaccaaacatcaaatttcctcatctaatgaatgtaaagaaaagtcataccaagaagtatcttttgacccagcaagaggtcttaaattggaagaaatcacagtttctagaccagattcaaaagaagtcaggtatctagaattctcagacagaaaagaccttcatcatcagggcagcaaaagtgatgataaactttgtggaactctcaaatctgaaatagcaacacaggaactaactggagagaaatttctagaaatggcaaaccctaatgttgcaggtctagaagcaggatccattgaggacatagtgactcagagaggttccagagtcttgggatcctttcttycagagaaactgttcaaaggagtgtctcaaaaagagaatacagggcaacagaatgccatcattagtcctactgttctagagaccagtgaagaaaagacagtgtccctaacagtatgctctgcagtgaagacagagaagacaccacaggaaaagctcagagaaagccctggcagtgaacaaactcccttcatgactgcacctgaaggaaagggaaatggaggtgtaaacccagagcccttcagagcaactcaggtcagtggtgtgcttttttttttttcttcctaaagatacaattagtttaatgctaaaattcttaactgggtacagagtttacatatgtgtaattgtatgcctctatacattttaaggcactagatgattctctaagatataacttagtttatcatcatctgtttgtagcaaagttgttggaaaattaggcattggctctgaatgtctttctgaaatctgcaagggttttaaatagaaacgagctaatagaaatactaggatgatgctacctgaaatcagaatagcttttggaaattttggtaaaatgatgcttgtagattgatagctctgagcttctgctctctgaggaaattggtaaaatcacctttgtctattgatttgaaatgacttaaacaaagtgttttattttatcccactctatgtgcagtaaaaattgcttctatttgtctaacaaaaacccctgcctgctttaaagctgacttacaggagaacgtcagaactgagtcagctttctttttggctccacagaatgtatttacccggcaactctgtttagaacatgatgaaaagctagtatcctatctgtctctgttacggaacattgaaatgaggaccaaacagattcaacctttggagctaaacctggcagaactacaggatctgctgtgtcaggccaaggtaggttcccagagacttccaccacagacaccagcttcaagatagctgcctccatcttccttgaagatttcaagacttactagaacctgcttgcactctattctagggtaaacaatctcagacccttgtcagataattatgggatgggctacatttggatagaccggataaaatttatacaggataaacttgaacagaccttggatttggctatcaatgtaattactaccattttttttttttttttttttttttgagatagagtcttgctctgtcacccagggtggagtgcagtagcggtgatctcggctcactgcaacctccgcctcccgggttcaagcaattcccctgcctcagcctcccgaatagctgcgactataggcacctgccgccacgcctggctaatttttcttgtttgtttgttttttgtgtttttttttgtgtgtgtgttttttttttgagatggagtctcactctgttgcccaggctggagtgcagtggcgtgatctcggctcactgcaagctctgcctcccgggtttccgccattctcctgcctcagcctcccaagtagctgggactacaggcgcctgccgccacgcccagctaattttttgtatatttagtagagacggggtttcaccgtgttagccaagatggtcttgatctcctgacctcgtgatctgccctcctcggcctcccaaagtgctaggattacaggtgtgagccaccacgcccggccctaccaattgttatctgcgtggttttggattgatttaggtaagttcaaaggcagagtgattggttaggaaactattgcagtaattcaagcaagaaatgttggaggcttaaaacagtagattagatatgtaagttaatctctcttacttcctaaaactatactaagacatcaggaaaaaggttttttgggtttttttttttagtgcataaattcataaaagggcaagagaggagaaaacagcagtaaaattttagaagttagaaagcagctggatgaggcgataactaccttagcaagctagagtaaaccagatcctcaacttaaagtggaggaagctaaggaacaacctgatttatactacagaactccccaaagcctcaaaaattgggagcaccagaaagagatgaaaatggatatgcaaacgggcttataattggtttaaagtctgtttaagaagcaattagacctttagattttcaacttacttcacatagcctggcaactgcttgtgctgtgctctaacgaaaggctggatgttcattctctgaggaaagtaattcaaagtrtctcttgactagggagagcagccatttattgaaggtaaatattccatacagaaatcagtaggattaactggaagttcacatacatactgaattttgagctatatccttgctcccgctatggtttgaccagcccaagggggaagacctaatggtactgatataagtggtttcccaactgtatggcccagctccatcaccctcagtgaagactacagccagcagagtttatagtcagctttttagggcattacactccacttcagcatccagaaagcttctgatacaaaaggagaggctaaaacaaagaaaaagaaacttggacaaaatacagactatttaggaaaaaaaacatactgagggccagtcacagtggctcatgcctataatcccagcactttggtaggccaagacaagaggattgcttgagcccaggagtttgagatcatcctgggcaacacagtaagaaattagccaagcctggtggtatacaccctagtcccagccactcaggaagctgaggcaggaggatttgcctgagcccaggagtttgaggttgtattgagctatgaatgcatcactgcactccagtctgggagacggagtgagaccctgtcttaaaaaaaagaaagaaaaatatattcaaaagcactgccatttaaaggaccaacaaagaaacaacaacaacaaaaatagattgaaaaagtctaactggagatctctgaagaagacctggaaacactcgtctcacagaaaccaaaggaggaggagtcagccctagtaactgccacagggagattgagtacaatgaggactgaaggggagattcagctcctgaaagttattggtgactttgaacagtttcagtggagtgacgggatataaactaacttgcagctggaagaaatgggaggttggaaagtagagacaattaatatagatccttctttccagaagtcttaggtacaggcaaggaatgaggtgggacactactygaaggagatggattgaaaggaatgttttgaatgggttttggactgaggagaaagaaccaattaaaagggagaacttgaagttagaagagagaggaagtgataactgatagaaccagtcccctaaaaacgtagaaagacagccttgagagggaggaagagtggctatttcactgaaattggaggttaagagttgtcataggattggagtcaccatgaagacarattgtagtggtttactggttctctcaatatctagtgtgtggccttgggtagggtggctgaaccggggctgaggatgatgccccaaagaactatgtcaagttcttccacagcttatttccggcttatctgttgaggaccagaatattacagactagatgagtggaaaagctggttggggttagctttgtattctttggttccatgaccctggaatttagagtggaagagtcatccgttcggtttattttgtagcacattaattctgcacagctgctccttggggaaaggcataatgacactctcagagaggcagcaagttacagtggagggagcacactgcactgagtgagaaaacctgaatccaagtcctggctgtactgcttaccagctgggtgaccttggacaccattcacattttttttttaagcaatgaggcatctcttctgtaaatccagaacagtaacatctaccttgcctacttcatgaattagtgattgtgagaaccaagtaaactaatgaatgtacataaaaacattttctaagccctaaagtgtgtgtagacatggggtgagagagaaatgtgttcacagctgattcccagagggtttctagtcttgcttttataggtaactccactttattccctcaggtattagaaagggagttaaaggatctgaccaccttggtcagtcaggagctggagtgtgtgaatcagattatcatcagccagcctcaagaagttcctgctcaactgttgaaggctctagagaaagatgccaagaatcttcagaagtctctcagctctgtgagtgacacttggaattccaggctactccacttccagaatgctgtggaaatagaaaaggtagcattttgcttttattcataaaggctcacaaagtctgggtggctgggagattttcataatgtgattttccatttatttcttagactaaagtgttaaatcagcacacacagctagaaggccgacttcaagatctgagagcctgggttggcaataaaaatcttattctgaacagcaagggatctaacagtgaaatagatgttgacagcctgaacctctgtctccaacagtatgaggtaaactcaagcacattttctttgtcctttgagttgtatcaattttatttccctgctaggcaaaccaatatccatatttatcttttttttttttttttgagacggagtcttgctctgtcacccaagctggagtgcagtggcactatggatggagctggtaggccattatccctagcgaactaacataggaacagaaagccaaatatggcatgttctcacttataagtggaagccaaacaagaacacatggatactaggaggggaacaacagatactggggcctacttgagggtgagggggtgggagcagagacaggatcagaaaaaatacctattggttactatgcttattaccccggtgataaaattatctgtatatcaaaccctcatgacatgcagtttacctatnnnnnnnnnnnnnnnnnnnntaggtgtgagccaccacacccggccatttatctttcttagaaagtctgattttccattttataaataaagtcagctatgtttaggtttataattatcatatccctggccggccatggcagctcacacctgtaataccagcattttgggaggcgaggcgggcagatcacctgaggtcaggagttcaacaccagcctggccaacatggtgaaaccccgtctctattaaaaatacaaaaaaattagccgggcggtgtggcaggcacccgtaatcccagctacttgggagcctgaggcaggagaatcgcttgaacccaggaagcagaggttgcagtgagccaagaccgcgccattgcactccagcttgggcaacaagaacgaaactccgtcttaaaataaaaaaaatcatatccctggagcttcagtgataatgatcatttctcctttcagctattctctgagagaccatctactgaatgccctgttattatcaatctcatcctctctttataaatgagcatctaggatccgtcctttgtttcttttttgaccacgatccaatcctacgtgcacacacacataccagtttcaggagattttttgttgttgttttcaggggtacatgtgcaggtttgttatataggtaaactgcatgtcatgagggtttgatatacagataattttatcacctgggtaataagcatagtaaccaataggtattttttctgatcctgtctctgctcccaccccctcaccctcaagtaggccccagtatctgttgttcccctcctagtatccatgtgttcttgtttggcttccacttataagtgagaacatgccatatttggctttctgttcctatgttagtttgcttgggataatggcctccagctccatccatattgctttaaaggatatgatctcgttctttcttatggctggatagtattccataaaatgtggtgtccacattttctttatccagtgtaccattgatgggcatttaggttgattccatatctttgctattgtgaatagtgctgtactgaacatacacacacatgtgtctttatgatagaatgatttacattcctttgggtatatacccaataacgggatagctaggtcaaatggtaattctaagttcctgtgaaatcgccgcagtgctttccaccatgactgaactcaggagagtttttgattggttatttacagcatgggttggcaaacttttttttttttttttttgtgacagagtctctctctgtcacccaggctggagtgcagtggtgcgatctcagctcactgcaacctccattctcctgccgcagcctcccaagtagctgggattacaggcacccaccaccatgccaggctaaattttttgtattttcagtagagaggggtttcaccatgttgcgtagagtggtctcgaactcctgacctcaggcaatccacccaccttggcctcccaaaatgctgggattacagacatgagccaccgcgtctggccagcaaactttttaaataaagggccagataataaacattataggctttatgaaccatatgcaaaagacctatttctgttgcaatcactcaaaattaaagcagccataaatagtacataaacaaatggctatggctatgttccaataaaactttatttacaaaaaaacacgtgacagaccagattttgcttgggggccacagtttgttgacccccctgctctagagagttgcttttctycttcttaagccccagattaattgattctttttattagtcaataagagaaaagaccatgagacacatgtgagccagagagttttctccccaatattgttctctttttttgttctatttaagattatttgaggtattacagtggtttatcaaccctctgctatagagagatacccctctccttcaactttttagaatgtcagaacggaactagaaatgtcccctccttctattctatcttctccctcttccccaatcttaagagaagcagacataaaagtttgtccatgatcaaccttatacacaatctcatccctctttatcacgcaagagttgacctgcctcctctttttataccctttatccaaagatatcactgagggagagagtttcagactttattcagcctttatctgtttgctaagatattacaaagaagcaagcatgaaaaaaattaccatgacatagtgtgagatataaaaacatagagacatagagcatttcatgcattggtgccctcccctagttataacatatgaatcctcttgtagcagagaaygacagtctgagccttgtttttctagtgatagtttcctaaattatcatgttcacagaggaaggaagctttgtcttattgttagcagtggcaaatccatgtgagtctgcagcagctcggttcttgcctcctcaggcgaaagaatttgaccaaggggcataaggcagggggagagactgaggcaagttttagagcaggagtgaaagtttatttaaaagttttagggctgggcacggtggctcacgcctgtaatcccagcactttgggaggccgaggcgggcggatcacctgaggtcgggagtttgagaccagcctgaccaacaagaagaaaccccgtctctactaaaaatacaaagttagccaggcgtggtggcacatgcctgtaatctcagctactcgggaggctgaggcaggagaatcacttgaacccgggaggcagaggttgtggtgagccgaggttgcgccattgcactccagcctgggcaacaagagggaaactccatctcaaaaaaaaaaaaagaaaaaaagttttagggccaggcgtggtggctcatgcctataaatcccaacactttgggaggcgaaggcgggaggatcacctgaagttcaggagttcaagagcagcctggccaacatggtgaaaccccatctctactaaaaaaaatatataaaattagctgggcatagtggcaggcacctgtaatcccagttacttgggaggctgaggcaggagaatcgcttgaacccgggaggtggagattgcaatgagctgagatcgtgccactggactccagcctgggtgacagagcgcgactctgtctcaaaaaaaaaaaaaaaaattcagagcaggaatgaaaggaagtaaagtacacttggaagagggccaaacgggcaacttgagagatccaagtgtgctgtctgtcctttgacttggggttttatatgttggcatgcttccaggggttacgtttctcctcccctgattcttcccttggggtgggctgtctgcatgtgcagtgacctgctagcacttgggaggggtcgcatgtgcagtgtgttkactaaagttgtatacatgctcacttgaggcgtttttcccttaccagtcgagcgtttttagaggaagttcatataccagtttaaactctgccactttgcctcttagtgcgcatgcttgagcccactcgcccagctcctgagatcttacctggaagctgctaatcaccagctttaggtgttttctatctattgagagcctgcctttctctgctgtcgctgcaaccaattattattttagagagatggttgaacaaccacctgaccgtcacctgatggtcacctgacattcttggaggtgaccatcaggtgatgtggaggtgggcagggcctctcatgccctgctcatatctgcctaactacctactgtaacattatgataaatattcaagaagccctttctgcctgttctgcaggattgactactctcaattgatctactctcagtttcaaagtgatggagatccagtataacataattgataatcactagatgtgggaagattacttgtttttaatagtctgaaaacagatgattttagtgtttggacagtttttactactttaagggaaaaatataactataacaagaaagtctgagtgtaatctttcagtttaaaaaatagtataaacagcatcatttactcagaaaatcaaaatttaggctgggcatggtggctcatgcctgtaatcccagcactttgggaggctaagtggaaggatcacttaagcccgggagtttgagaccagcctgggcaatgtggtgagacaccatgtctacagataacttaaaaaattagctgggcatggtggtgcacacgtgtggtcccagctacttggaaggctgaggtgagaggattgcttgagcccaggaggtccaggctgcattgagttttgtatgcatcactgcactccagcctgggtgacagagcaagatcttgtctcaaaaacaaaaattttagcgaatcataaacaaattatatattttctcagtactggcctaccagtaactcattgctggacagatacaaatagaaatttgaacctaagaaagtacaattaggtacatctcagatcagaaattcatgttatactttgcaaaacttttttaaaagattgatggccgggcgtgtggctcacgcctgtaatctcagcactttgggaggttaaggagggcagatcacttgaggccgggagttcgagacaagcctggccaacatggcaaaaccctgtctctactaaaaatacaaaaaattagccaggcatggtggtgagtacctgtaggcccagctactcaggaggtagaggcacaagaattgcttgaaccagtgaggcagaggttgcaatgagccgagattgtaccactgcattccagcctgggcaacagagcaagactctgtttgaaaaaaaaaaaaaggccaggcatggtggctcacgcctgtaatcccaacagtttgggaggccaaggcgggcagatcatgaggtcaggagatcgagaccatcttgctaacacagtgaaaccccatctctactaaaagtacaaaaaattagccgggcatggtggcgggcgcctgtagtcccagctactcgagaggctgagggaggagaatagcatgaacctgggaggcagagcttgcagtgagccgagatggcgcccctgtactccagcctgggtgacagagcgaaactctgtatcaaaaggaaaaaattcacagatattttggattaacaatagtataattatgctagcataaataattgagctgcttactgtatttggaaatcaaggtaggtccagtaaagggaacttaattctaatttatgaggagtttggagagactgaaagtgagagagacttttttttttttttttgagatggagtctcgctctgtcacccaggctggagtgcagtagtgcagtctcggctcaccgcaacctctgcctcccgggttcacgccattctcctgcctcakcctcccaagtagctgggactacaggcgcctgccactacgcctggctaattttttgtatttttagtagagacggggtttcaccgtgttagccaggatggtctccatctcctgaccttgtgatccacccaccttggcctcccaaagtgctgggattacaggcatgagccaccgcacctggccaagagagactttaattctaatttggccctagaatcattagtgccagttatgaaaatacaggaaattagcctctctgattctgttggttttcttcatgaactgagaaatggaagtatcatggttttttgtkttttgtttcctttttccatttaccttaggatttgaaacagcccatggctgaaaggaaagctcagctggatgctcttgcttttgatattcagttctttatctcagaacatgcccaggacttgtcccctcagcagaatcgacagatgctgaggcttctgaatgaactgcagaggtccttccaggacattttggaacagactgcmgctcaggtggatgccttgcagggccatcttcaacaaatggagcaggaagccctggtgaaggtcagactgaaccagcagctgggctcagtttgtctttggggatgtcctctgtcattgggttttctggccagactctgtgtatcatgattgcaggagcctgggtttaccaattttgaaatttcatgtcatgcaggccagtatggttctagtccaggaggcacttgttctggctgttgttcttgccatgtctttggttttatgtatgtgtgagagaatgtatgtgttgacatgtgtatacatatgcaagtgttttcttttagtgagacttttccttcgctgtatctcattgtctctgaatttcaaatgaaaatcatgtatctagtcctttccctactttactttctcctttagcattgttttgagggctcgtaagaacatctagataccctgagctcttgaggagaagggttctgaaatcagtttcattctatttaatctatttcaaatgatttaccataaggttccttgacaatccttaagtggctgacaaggaaattttattagaatcgtattaatttttggctctttaagaattaatattattttcttgcacctttcctcacagtatagtgcccagtgcttattcgcttattcaatcatggaaaacagtatgtagaagcaggatgatactaaaacaaacaaacaaacaaacaaaaaactaaccatcctaccatcttccatcacaactctcttcttgcaaagctcaactcaacataattacattaatagtaacatcaaaaccttagaatacccagaatgatgttcatgccatttctgctatttgaatagtaagttggcatatagcaagatgatattagaattgtcattatcaccataaaatttgtctcaagggctcctttattaaatgttgtgcaaaaaattgagcttttgagtcagactttaagggaattagggtagttggtgccatatgtcctgtattactgtctcattttttcaactatattgaaattgagatatattaatggaaagctttaggttacctttgaaaactgagcatgtgcaatgctcgcattcaggagtttatatagcatgatataacctttggataattaatgaagtaaaattcatctgagccacattaagacaagacccagcccagattcagggtagactcctgagctgcagcaggtgatagaactgcatgtgaacattctccctgagcatgtaattaattccacaatgcttattaaccttgttattgtcagaaatgctctgcttctctcaatatttgccttggatgtgtgtgtatgtctctgtgttaacttgtttgctttgcttttttcagattcagtctgcacccatcctaacccatgaagatcctgttttacagctgaagagctcttaggagttctcttccagagcccttctatttgtcctaaagagggggagagagggccaatttgggcacctgtttgtaagtgcaggtgactaaagcgccatcagaaggtagaaactggtggaaaatggttttagaaggatggtcaggagaacacatcatgctcaattgctcagtcaggtgcttcaatgtcatacaactgagataaaatctagagaaaggatcaggcacagaaacatattccctctctctccttgggcctggcctgttcctttgatattagtgtagacacctaaaggactgagccagttgctattcttgggcactttccttctcaaaatagccaaatctagcccttcatgcctggcgtgtaatcattttatttaatgagtctctggattgatgagacatttgatttataaagtcagctcaattattaagaagctcgattaacttatgaattatccaggtctttgatttttctttctactccaattcttctacttttgcatattatgtagcaaatctctggttctagtggagggattgatcagaaccactaaattattatcatcaccattatcatgtgtggatttcaagcatctgggctctttcttctccatttccaaagataataacagcagtctggtgaaggagctctcaaaccraaacctgaactagaaacattctcataattatcctgattatccaatccatagayccagatcaatggactgtccamatgaggggagctttccgaatatgatttctatgtcttttcctattctagtctcccaccaacttttccatccttgagatataaccttcctgttttacatttcagggagtttcttgtatttgcaaaatgtgaattacgaaatgtctcttgacccctttgcatttwaattagaccctgcagaaacaacaaaatacctgtcaccagcaactggaggatctttgcagttgggtaggacaggcagaaagagcactggcaggccaccaaggcagaaccacccagcaggatctctctgctttgcagaagaaccaaagtgacttgaaggtcagtgtgaatctgtcaattttgacacaaagtctcgctctatcrcttaggctggagtacagtggtgttatcttggctcactgcagcttcgatctcctgggctcaggcaatcctcccacctcagcctccccaggagctgggacaaagtcatgagccaccatgtcctaattttttaatttttttgtagagatggggtatcactatgttgccaaagctggtctcgaactctgggctcaagcaatcctcctgccgtggccttggcctctcaaagtgttaggataacaggcttgagccaccatgcctggtgattttttcattccttcgacaaatatttagtgctcaagggttagcaataatggtaaacagacatcatccctggccttgtgaagcacacagtctagcagggcatacagaaattatacaggttattataaaaatgaacataaaattattaactgttatatctgtgaaggaaaactcatatgagaacatatagcagagagacccaatctagtctaggatttcagaaaagattatcttgaagaagtgtcacctaaacttgagaaatgaaagatatgtaggcgttaatgcatgaagaggtaggaggaggaagagaacataccaggcagaggcttatatattggtcttgaggtgggtatggtattgagcacaacatattcaagaaccgaaagaaagctagttcgactggactgcaaaaaacaagaggaaaattagggaaagttgaagtwggaggggtaagtgggacctgtatcacactggaccccgcaggccacattaaggataaggagtgatacccaagagagtataagggcccatcaggcctcgactctgctaagatcatgttgtcaacacttctttatggaaagaatgatctctttgaggataatgcattgcaaaatgaaaaatctctcatgttcatgtttatggacaacctccttttttggcttcactaaatatttgcttagaaaacaaaatcaaatttctttgcattgatttaagcctaaacctgaagcaaattgtagttagggactatatacaggactatatgtcatcctagccattccatctttataccattagaggacttagaagcactaaagtcgaaggctctgccattcctattttcttgtgttaaggatttacaggatgacattcagaatcgtgccacctcatttgccactgttgtcaaggacattgaggggttcatggaagagaatcagaccaarctgagcccacgtgagttgacagctcttcgggaaaagcttcatcaggctaaggagcaatatgaggcgctccaggaagagacacgtgtggcccagaaggaactggaggaagcagtgacctccgccttacagcaggagactgaaaaggtaatagactgctatgacgcttgatatttttcaaaaaagaaaattttggtaccaacacaaataaaagacagtgaggggaaaacaggcttatagcatgcacagaatcatgaggaagggctacttcaggagctagtctggtttttgttttttgagacggaatctctgtcacccaggctggagtgcagtggcatgatctcggcttactgcaacctctgcctgccaggttcaagtgattctcctgcctcagcttcagcctcccaagtagctgggattacaggtgcctgtcaccacacctagctaatttttgtatttttagtagagatgaggtttcaccaggttggccaggctggctagtctgtgtttttacaagaatctttatttttacaagaaatgtccaggaggagtttaagtcaggacagttggtaaaaagtacatattcctattcctccccaaacccccaaacatcttgctrtctgtatactcagtcctctgactaactgaaaaatatcagaaagaacttagtgaggaagagtattattatggggagaaaaaaagcaaatggctttttttttttttttttttttttgagacagagttttgctctgttgccaagactggagtacagtggtgcaatctcagctcactgcaacctccacttcctgggtttgagtgattctcgtgcctcagcctcctgagtagctgggactacagatgcatgccaccacacccagctaatttttgtattttttagtagagatggggtttcaccatgtggacccagctgttctcaaactcctgacctcaagtgatcctcctgcctcggcctcccaaagtgctgggattacagktgtgagtcaccatgcctggccaaatgacatattttaatatgagtctagactggtgatctaagagtactagggaaaaatatctatgaagtcttagtgagccaaaagctgtccccgagctgcctctatagttacgatgggaatcgtggcactcggataaaccaaagagaagccaaagtctcaaatgaccttctgcaccccactcagcactggcagattgaatttgaattctttgtttagccttggatgccgacactaatgaggaaagtggagaacatggaaaagaaaaataaattacctgaagatgaattttgaaatagattaatatataacttggcataacctatttaatctattaaaatacatgtagagccagtaaatataatttcagaggcaagttgaagaattaaatgtttccctgtagcctcaggtgagagaaaaaatttaaaaagagctaaatgttctgtttagttgaggaaaggatgaaagaagtttgtctttcctttaggaaagagcagcccggtaactgaatgtgactgtgctatttcttaccctaccaagccagtccggcacttctgtgtacctcaaaagattctgtgaagcttgctggggtggcaggactaaatgacctctaaataaaatatttctgaatcctaggatttgttttgttttgagacagagtattgccgtgtcaccgaagctggagtgcagtggcacgatcttggcttactgcaacctccacctcccaggttcaaacgatactcgtgtctcagcctcctgagtagctgggtctacaggcatgcaccaccacacccagayaattttttgtatttttagtagagatggggtttcaccgtgttgaccaggcttgtctcaaactcctgatcctgaagtgagccactgtgtcctgcctctttttttttttttaaagcagtaagatataatgaaatgtagagatatttttaataatttttcaaaagattttaaaagatatgaattctcttttgtatgtgcaaagactgtttatacccagtcttagaattagcataaaattatctcctcccctttaccccattacttaacctgtggttgtatgattgagtatgtaaagccttctcactagactacctcggtggctttcagagtaaagcagcaaaggaactggcagagaacaagaagaagatcgatgctctcctggattgggtaacttcagtaggatcatctggtggacakctgctgaccaaccttccaggaatggagcagctctcgggagctagcttggagaaaggagccttggacaccactgatggttacatgggggtgaatcaagccccagagaaactggacaagcaatgtgagatgatgaaggtaagggtgttagcttatcctcactatgctagagaaatctctcctgccctgagcaagtaaccacaatcaccttgcccctaaatccagtgagcacttctcagtttgtatcttctttgatgtctcagcagctttgacactgttggccactcctcttgaaatactttctcccttggtttccataatactactctgccctgaccatctttcttactttcctctggccaggttttcaaatactgatgtttccaggtgtatcctaggccctctttttatctttcagaacatactttccttgggcagtctcatctactcacaacactgtaattgccatttgcactaatgaattctgtgtatgcatttccttccagccctgatttctgtcccgagcttcaaaacggtatataaatctgtctgcctatttgcaacttgggcccataagcacatcagcctgaaaatggaactcctatttcctatgatactcctcccacaattaaacattctctttcctttattcccacttcattgtctgaactggacatcatcctagattccattctctctctcactctcctatgtcaaatcagtcatcaaatcttatgrtaattatatttctttcaaagtcagctatacttcttcatctttattgagatattattgtagtttagaaccactgtctgctttcactgttattattatagtagcttctactggtcttcttgcctcttggtttttaccttccagtccattctccttactactaaggaatctttctaaaatgccatatccttgcttagccctttttatggttccctgttgccctcaagattacctggttaactctcytctcagcccctacccactgggatctagtctacttatttggccttatctgtcaccttcctttatacttgagcatctgcttatattgattcctttcagtttattggctaaactgtgctctcactttcctctgggcctttacatgctcttggaacttacttgcttctccattgcataaagtaacggagggggcccagctatttgttaatttttactcattcttcagatctcagcttagagttcacttcctctaggaagcccttaattcaccaccactcacmaaagttagggtatatattcccccatatgctcttctttcttttcttttatttatttatttatttattttttgagacagagtcttgctctgttacccaggctggagtgcagtggcrcgatcccagctcaccgcaacctccatctcctggagtcaagcaattctcatgcatcagcctcccaagtagctaagattacaggcatgtgccaccatgcctagctaagttttgtatttttagtagagatggggtttcactatgttggccagactggtctcaaactcctgacctcgggtgatttgctcacctcccaaagtgttgggattacaggtgcccagcctataagttcctcttataccctttcctactttgtagcatttctcattcgatattgttttgttgtctgtattgccctctagatgctaggcttgaaaacgcacactgtttcttacaggctgcctgttctgtaacaaaacaaaacaaaaaagcagaagtcacttcttactgtttatttctactcatttatttattcatttagtaattactgaatagctgccatatgccaggaattagaaataagccagtgagccaaccaagtaaaccatcttcaagggcatcaactggcatatacaggcacattctattgaatgattgaaagaagattacatatttaggacacttacaacacatggatcatatattttagtggtgacacctttatagaaaaaatattggcttagctggaatacttgtgttcagtggcctttgtggaccattgtcatattttatattaataggatttctgcctcttgcatgacgcttttcgaaggtccattatactgtgtcccccaaagccctggtagtcttataagaggacagagcaaaaatggttctgctgtcatagggckcctctgacaccttttgctggcagcagtcaacctaatsaagtggtatctccattctaggaaggaaactgccttataggtagatgagttggaaggtgagaatgaaggacacctaggtgatatacagacaaggttgtagtaccgctcccacttcactatctaattgagcaagatatatttgtcattccagctttctttttttcttctgctttttttttttttttttttttttttgagacggagtctcactctgtcaccaggctggagtgcagtggcacaatctcggctcactgcaacctctgcctcccgggttcaagccattctcctcctcagcttcctgagtagctgggattacaggtgcacgccaccacacccagctaatttttgtattcttagtagagacggggtttcaccatgttggccagcatggtctcgatctcttggcctcgtgatccacccgccttggcctcccaaagtgctgggattataggcgtgagccactgcgcccagcttttttttattttttaaagacatgaggcctcactttgccacccaggctgaagtgcagtggtacgatcatagctcactgtaacaggtgtggactcaccatgcctcattaatttttttttaagagacagtcttgctatgttgttgctcaggctggtctcaaaaacctagcttcagtgatactcctgcatcagcctcctagtcactcagctttcttgaaatgatgtgggaagctgaggctatcaggttgytgttgatacaggctaaaactagacgatgatctgtagtccttctctaagtagtggcrwaaacagtataggtagtaaggaacactgacaactcccactgtcttctagattcaggaagaacatcccaatatatgtttcaaaacaaaaactcacagctctcctcaaagaactcatattccattggaatagaaagaaggtctatgtataagcacatagacacagtacatacaaataaaaagtacaaattacttattattacccagaaatacagtttaatctctaattattgaattaattttccatggcttttcctagtagggacagtcttcatggacacatgartgacatatttcacagttaagaacttgcattttttttttttttgagatggagtctcaagtctgttgccaggctggagtgcagtggcagggtcttggctcactgcaatctctgcctcccaggttcaagcaattctcctgcctcagcctcccaagtagctgggattacaggcacttgccaccatgcccagctaatttttgtattttctgtagagacagggtttcaccatattggccaggatggtctcaatctcttgaccttgtgatctgccagcctcggcctcccaaagtactgggattacagacatgagccaccatgcctggccaaacttacaatttttatattgtcacatgtatgatttattcagctacccttccactaatgtagatgattattagttgtccatttgtacagtttagcgaagagagtcaggtttgagttgcagttctgttcgttaacaaactgcatgaccttagtcaagatatataacgtctttttggtattcacttactcttaatatgggtattatattgtctacctacattataggtcgtgccacaaagcaaatgagataatacatgtaaaatctctttgaaaaccataaagtcctatacgtgtcagttcagaggggattagcatgtggcatactgtttagagagtgactgatattggtgatttctgagcagttggaaaagtgatctattgagtagaggtagagacctctccctacttctagcttataggtagatggtccttgaagattataagtacaacttaagagtcagcatctaaattaaagggctatacctaaaacaaggggctgaactgaataaaatgaagttaacagggaaaaatgtgagatgcagcaaaactgagagaggtgtatgacttgacagcaatgtgggtgaaaagaccaaggctgaatgtaagcagacctcacatggagtatgaagtccagtcttgtatacctcaaattattgtggattgcctactgattgtcctttgtttggggggatttttttttaccaggcccgtcaccaagaattgctgtcccagcagcaaaatttcattctggccacccagtcagctcaggccttcttggatcagcatgsccacaatctcacacctgaggagcaacagatgctgcaacagaagctgggagagctaaaggaacaatactctacttccctggcccaatcagaggcagaactgaagcaggtgcagacacttcaggatgagttgcagaaatttctgcaggatcataaagagtttgaaagctggttggaacgatccgagaaagagctggagaacatgcataagggaggcagcagccccgagacccttccctccctgctaaagcggcaaggaagcttctcagaggatgtcatttcccacaaaggagacttgagatttgtgactatctcaggacagaaagtcttggacatggaaaacagttttaaggaaggcaaagaaccatcagaaattggaaacttagtaaaggacaagttgaaggatgcaacagaaagatacactgctctccactcaaaggtaagggggcagttcctggcatccttggtgaaacaatcatggcagccttcacacaatgtaggtagtgtctggggctcagaataagaactccaggacacagtaggagagctgatttatacttggaccatgggcagaaggtcttcacaaacaatgcacaaaatgtaaaatacataggtactagcccaaaggcctgatagctagctaatacctaatacctagcactggcaggagtatatcacactgatggtgaaggtggaagtattccccttcctgtatcctgaccagcagacttggactcccwagagacatagcacacaggggaaatttaaaccaattgcacagtctttatttctgtctttatttcacagagcatctagggtgaatccttaccttccttcctatctaaagaacttgctcgctcttctaaagtttagaatccagtcagctcttcttacctgtcttatgccttctgccaacacttctaatccccaagaaagaatactttttgcacttcttaacccctacctttgtctgcaaccttatgttcatttctttggaagcttgtcatacatctcattaaattttcctgggaatgtaagaaggtcaaggtgaatagtatggagcaaacaatggggacccacacttagagatcattgctacccatctatccatgggttctggcaatacccttatctgaagttacagtgagttgtctgtaacaaagccaggcctctttctttgggcagctgctgcctttggcctgaccttgcttaagtctgcttacctttctttctctggcwcagtgtacacgattaggatctcacctgaatatgctgttaggccagtatcatcaattccaaaacagtgctgacagcctgcaggcctggatgcaggcttgtgaggccaacgtggagaagctcctctcagatactgttgcctctgaccctggagttctccaggagcagcttgcaacaacaaaggtaagtcaggacacaggctgtgttgtggtgtcaagaccttgtattccatggcgtaaagtaccccaaaataaagcaaatgcttacataaaataaaggcagtggttgggatgccttggacaagatctgagtgctaaacacttgcttctaatatttatggctatggttaaacttasaattattctgtaaagctgttcagtagctccggattcctagaatcatctttgattacttagatgtttttcttttgtttttttcatggacaagcagcagttgcaggaggaattggctgagcaccaagtacctgtggaaaaactccaaaaagtagctcgtgacataatggaaattgaaggggagccagccccagaccacaggcatgttcaagaaactacaggtataaagcagcaacagtataatagtactcccttaattcctagtatgtacctctattctgcaatatgtcacattgtgttgtgcaaatatctgtggtgccaggctagaggctgagaatataaacatgaatagacatagattgtcatcaaagagcttatcctctaatgaactttattcttgcaccattgaaggaccttcacaatctggcttcagtcccttttccccagacatctatcttctagccacatctacttttctttcccaagtaaaccacttacattgtattacccctgaagtttttcctattgcttagctgataacatttattgaatgcttaccaagcgtggtgaaatcttgcccatgcttcaagatgtagccaagagtatatcatggtgactatagttaataacaatatatcgtatacaggccgggcgtggtggctcacatctgtaatcccagcactttgggaggccgaggcgggcagatcacgaggtcaggagatcgagaccatcctggccaagaagatgaaaccccgtctctactaaaaatacaaaacaaacaaacaaacaaaaaaatagccaggcatggtggcaggcgcctgtaatcccagctactctggaggctgaggcaggagaatggcatcaacctgggaggcggagcttgcagtgagctgagatcgtgccactgcactccagcctgggcgacacagcaagactccgtctcaaaaaaaaaaaaaaaaaaaaawawawatatatatatatatatatatatatatatatatatatacacacacacacacacacatatgtatatacacacatatatacacacacacacatatatatcgtatacttgaaaatggctgtgagagtatattttaagtgttttcaccacaaaaaaatgataagtatgtgaggtaatgcatatgttaaatagcttagcttagccatcccactcctcaaaagaaacgaaagataattattcttccttctgggcttctcgaggacagtacttctagtattaatataccacttaagatttgatttttatcattaattgtgatgcrtcttcctctgcctatgctctgttttaaagtcttaagttgtagatgtcagataagatacttaagtatctttagtcctcagcatctagtacaatttctggttctttgtatgcagtaaataactaatgcttattgaacttggctctgatactaatgcatttcaaacttattccttctattggtcttaatgtcaattattattacaattactatgttcaatgtaggactgggcatggtggctcatgcctgtaatccaggcactttaggaggctgaagtaggaagattgcttaaggccaggagttcaagaccagcttgggcaacatattaagaccacatccatataataataataataataataatttttattatttattawttaatawtattaataataaagtctttaaaagcataayacaaaaattgtctccactctttcttttcatggcctgatttttcagattccatactcagccacttccaaagcctctcctatagcctggctgagcgatcttctctgctgcagaaagcaattgcccaatctcagagtgtccaggaaagcctggagagcctgttgcagtctattggggaagttgaacaaaacctggaagggaagcaggtgtcatcactctcatcaggagtcatccaggaagccttagccacaaatatggtaagatctgtgtcccaagagctagcatagagggtatgtttgctatgtgccatcattacataatgttgaaaaagtaacaagagggaacctaatatctgtgaatcatctaataagatttagaaatgataactaatctatgtaaagatatttctacccagttgagctggaatgaaagtggagatagcaaagtcatgtggtagaaggggtggagaactaaggtgatgagatgtgtggtattctggaggctcggttgcagtcctccagtcccccttgtgagatagcatatagttattagtttgtggctcagatgtcctggaataagtgaaccaggagctgacagacgtgttcttcatgacagaaattgaagcaggacattgctcggcaraagagcagcttggaggccacccgtgagatggtgacccgattcatggagacagcagacagtactacagcagcagtgctgcagggcaaactggcagaggtgagccagcggttcgaacagctctgtctacagcagcaagaaaaggagagctccctaaagaagcttctaccccaggcagagatgtttgaacacctctctggtaagctgcagcagttcatggaaaacaaaagtcggatgctggcctctggaaatcagccagatcaagatattacacatttcttccaacagatccaggtgaggatatatctgccatgttagcagaataaagggaagagaagggcagggagagaaccagcatttgctgagcgcatactacatcagtcagtatactggaaactacctgcattatctttgggaattattacagtgatcccgtaaactaggtatcatttgtccattttttaagcaacacagtcaatatttatttttcactcttattacatgttcaacccaaatcagcagggccactcagttcatcatagtcactcaagggatgcagattgatggagatttcatcctgatataagctttcatgattactgcctcagtggtaaaagggcatattatatttatttacattttattagtcaaagcactttccacamaaccacctatacctttcaagagggtgaggaaatgtaatctcaccacttacctagaaggtgcaaagctagaaatatttggtaaaagtattaacagctaccacagatatatatccagaagtaaaactgccaagtcatagtatatgcatatattaatttaattcgactcagtagtggccaatttgagctccagaatggctgtaccagcacacattcccacctgtagtacttcagcattcctgtatctctgcattgctgccttcgctttatccagctttctaactttttccatattaaagtggaatctcattgtttggtttggtttgctctcctttttgctttgaatgatttcaaacttacagaaaagcagaagaaatggtccattacacaccagcatactcttcacctagattcaccagttgctaattgttttccctctcttataaaaatataaaagagagtatcattatgggcttctatatttgttattaccattattctttatgatacttaacgttttcccaaatgtggtcggtgggagcctcttcaagctgtctcctgtggctttttgacatgtcttcctcagcataagagcacttttggaacttaagatatttgtggcacaataatgtatttccttgtcccctatctgaaatcagctattyatccaaggagtcccacttttagtggggaatgatatttagaaaccaaatctggacactagatgagctactggagtgtcactacttttaggttctttttaatagatagtgttaggaaatatatgtgtatgtttcttatatcataaaatcatactgatagtctagtctcaacgcaacaccataggaatcttcctcctttccacatttgtatcttcctttcctgtagggagaaccctagttcccagcaactttaatatatttacttatttgttttattctacaataaatataagatagttttagaattacattagtatttctaccaataacaaacctgctaaataaaattgaagatttctttggatttgtttttgtccttagcctatgacccactatgtactgtgttcaaaaattacctgaattattttttctgtaatttcttatataattagatttgtttctatttgtattcaactttaggactttatttttctacctttgttgattaaacttatttttaaatatgtaaagcattaacataggtcaaaagttaaaactcttcaaaaagttatactcaaggtataggaagtgaataaggatatattctcattgtctttcctgtctcttccatcccattttcacccatccccatagtaacacatttcaggtttatttttttctattcctttttaccaaaatgaacatacacacacattcttattctccattcttccttacaaaaaagaagggtatattacgtaatcctttgcttttttacttaatatgtcttggaaatcacttaatatggattcacagagatctttgttttttaaaccatactttcattgtgtagaagagttacagtttaatcaacaagactctttctttctttctttcttttttttttttttttgagacagagtcttactctgcgctctgttgcccaggctgaagtgcagtggcacgatcttggctcactgtaacctcaacctccacttgggttcaagtgattctcctgcctcagcctcccaagaagctgggattataggtgcctgccacgatgcctgggtagtttttttgtatttttagtagagatggggtttcaccatgttggccaggatctcaaactcctgacctcaagtgatctgcccgcctcggcctcccaaagtgctgggattayaggcatgagccaccacacctggccaacaagactcatacgtggtggaaatttgaattgttgtttccgaaattgtgctattactactgaatagctgtgtgtattttttcccataatattggaagtgtatcctcagaataagttcctagagtggagttgttgcattaaagggtaaatacatgtatagttttgttagaaatagccaaattcccctccattgaaatttcaccattttgcattcccagcagcagtgtattagagtacctgtttcccctatagcctcaccaacaaaatttattatcaagcttttaatttttttctggtgtgattggtaaaacatgatatgtgaatgtggttttaatttttatttctcttatgagcgaggttgagtgtatttttacatttaagagtcatttatttgtgaactatctgttcatgtattttgtcattttttggtaaagatttttggttttctctcaatttttaaagtttttttttttttagagttcttatatattagagagattaattctttatctgtgatatgttagaaatattgtttcccagattgtgcttttgacttatggtgttttttgccatgtaaacgtggaatttttttttttttttgagacggagtctcgctctgtcgcccaggctggagtgcagtggcgcgatctcggctcactgcaagctctgcctcccrggttcacgccattctcctgcctcagcctcctgagcagctgggactacaggtgcctgccaccgcgcctggctaattttttgtatttttagtagagacggggtttcaccgtgttagccaggatggtctcgatctcctgacctcgtgatccgcccgcctcagcctcccaaagtgctgggattacaggcgtgagccaccgcgcccggccgtaaatgtggaatttttgttctacatagaagattttatgagtattttattaaatatgtatttttagtcatagtttgaaagatttttgtcacacccaggttatgaaaaaatttattcatgctttattctaaaacttgttttaatttttttttacatttgaatcttttaacaatttaagcttattctgaagtatgaatcatgttacctttttctgttatgtctatctagttgttcataatagaagttgagtgccccaatccaaaatctgaaatgctccaaaatctgaaactttttttttctttttgagacggagtcttgctctgtcaccgaggctggagtgcagtggcacgatctcagctcactgcaagctctgccttctgggtccatgccattctctgcctcaacctcccaagtagctgggactacaggcgcccgccaccacgtccagctaatttttttgtatttttagtagagatggggtttcaccatgttagccaggatggtctcgatctgctgacctcgtgatccacctgcctcagcctcccaaaggcctgggattacagacatgagccaccacacccagcccaaaatctgaaactttttgagagctgacatgacactcaagaggtcatgctcaaaggaaagactcattggagcacttcagatttcagagcttcagattagggatgttcaactgctaagtataatgcaaatattccaaaatctggaagagtctggaattcaaaacacttctggtcccaagcataaaggatatccaacctgtatcatttatttgaaaagtccatattttccccagatttaagaaaccatcttcatcatatacacaatttttatatgtctttgagtckatttctggattttcttttttttctttttttttttgagatgggatcttgttctgtcacccaggctggggtgcagtggcatgatcttggctcactgcaacctctgccttccaggttcaagcgattctcctgcctcaggctcccaagtagctgggattacaggggcctgccaccacgcctggctaatttttgtatttttagcagagacggggtttcaccatgttggccaggctggtctcgaactcctgacctcaagtaatccaccgaccttggcctcccaaagtgctgagattacaggcatgagccacctcacctggcctatttctggattttctattctgttttgctggtgtttccattcatgtaccagagcatactattttaattatagaggctttatggtatattttaatgtgtggtagagagctagtcctcctcaatttttttctttcaaagtttttcataggtgtagttgcacatttatttttctatgtgaatttaggaatcaccttcattagttctagagaagttagcatttttatgtgggtcacactaaatgtattcattcacgcaaacacatatacatacataagcaaatacatacgcatgcacttttatggatgtgtttccatctagtcagatctgcttttgtgtttttcaggagtgtttttgatttttttgttcttttttgttttgagatggggtcctgctctgttgcccaggctggagtgcagtggcatgatcatagctcactgcatcctcaaactcctgggctcaagtgattcccaggagtctcagcctccccagcaactgggattacaagcaagagccactgcacccaatttcagaagtgttttaaaatttagattttgtgtttcttgttagttgattactaagattgagccttttgtgttgctatagtaagttgaagttttcattattgatttttgtgtgttaattttatagcctgctaccttgtttaactacttcgttgtttgatttcgttttattgttgattatcttgggttttacaaatatacttttttttttttttttgagacagagacttgctctgttayccaggctggagtgctatggcacaatctcggctcactgcaacctccgcctcctgggttccagcaatttccagctaatttttgtgtttttagtagagacagggtttcaccacattgaccagactggtcttgaactcctgaactcaagtgatcctcctgcctcggcctcccaaagtgctaggattacaggaatgagccaccatgcctggcctttttttttttttttttttttggaggcggagtctcactctgttgcccaggctggagtgcagtggcacaatcttggctcactgcaacctcctcctcgcaaattcaagtgattcttctgccttagcctcccaagcagctgggactacagagtgcgccaccatgcccagctaatttttgtatttttagtagagacggagtttcaccatgttggccagcctgatcatgaactcctgacctcaagtgatgggcctgccttggccttccaaaatgctaggattacagacgtgagccaccgtgcctggccatacaaatatactttcatgtgacctacaaatacagttttatctcttcttttccaattcttactccacagattgttttctcttaattgcattggctgttttttttttaattattaaattaactttttttaaaaaatagagatggagttttgccatgttgcccaggctggtcttgaactcctaggcttaagtgatccacccaccttggccccgaaaagtgctgggattacaggcgtgagccactgggcctggctgatatcttaagtataatgttaaataatagtggagatagtgtgtttacccccattttatagaagagaccatgaagcttagagtagtttagtagcttaagatcacaagttggtaagtggcaaagtgtgattgaatttcaggtgaggtgtatttgactcctgaaactttcattctttacgtcctgtcatggtacctcccaagtctttgaacgtttgtttagaggagacaagactgttttgtaattcctagccactctccagtggattgaagttgtcctacatatttatcagattttttaattgggytttttaatacaaaaaataattagctgggcrtggtggcaggagactgtaatcccagctgctcgagatgctgaggcaggagaatcgcttgaacccaggaggcggaagttgcagtgagccaagataccgccattgtactccagcctggatgacaggagtaaaactctgtctcaaaaggaaaaaaaaaaaaaaaaatgtttgtttgttttttttaaacttttcactgagttgcatatttattgttttgatctagcatttgacctggcaagcatacctctttccttattcctttttagagtatatttataaggattagaggatttaatacatttccttgtttgcttgacaggagctcaatttggaaatggaagaccaacaggagaacctagatactcttgagcacctggtcactgaactgagctcttgtggctttgcgctggacttgtgccagcatcaggacagggtacagaatctaagaaaagacttcacagagctacagaagacagttaaagagaggtgagttatcacttgtgttggtcagcattggggaactattttttcttgttatggagtgaaatgatcttttctcttttcttcctttaccagaacagatggcatctaaaattctactactgagttgtaggagggtgaaaagtgcctttttttaggcaaagctacctcatctacttgatgcttagtggtttttcttttctttttttttgagactgagtatcactctgtcacccaggctggagtgcagtggtgccatcttggctcactacaacctccatctcttgggttcaagcaattcttctacctcagcttcctgagtggctgggattacaggcgcccaccaccatgctcagctaatttttgcatttttagtagagacggggtttccctacactggccaggctggtctcgaactcctgacctcaggtgatcgacctgcctccgcctcccaaagtgctgggattacaggcatgagccactgcacccagccacttagtggtttttctaatagtaactaatagaaagtagggatgagttccctctctttgtgatcagaagcctaggccacttggaccaaacagaacaaatttgaggcagcaagtaagattacagaataattttgaaagaagagaaaaattggaagagacttcctagacataattaagggtgatgttggcagtcccctggcttttttttttttttttttttwaagatatggggtcttgctatgttgaccaggctacttgtgaactcctggcctcatcgatcctactgccttggcctcccaaagtgctgggattacaggtgtgaaccactatgcccagaccccctgcttgttttgaccacatttaagttgctattttagaagagtatctggattcttctttcaaggcaaacaagggaatatatgacaaggctggctgattttggtccctgttgaaaagccatgattcctcactggacagcctcacatagatttaagagcatgaacaagacttcttatctaagtttagcgataaatatgatcttgatttagcagataactgccttagtgattagaagaaaagagttgctcaaaccaacattattagcagcaggttatctaatggagaggatggggacaaaggtcaagaaagcttttgtttttcttcccctatgctgagggcctttttactgtatgaggaatcaggatttctggattgacatctgtctgatagatatggccatttccaaaactttccttttgatttagtttattcattggcatcattaatctagaactaatcacctaacttctgtgagcctcagtttcggcaccttccttgctaaagcaatcagcacttgaattggtccttgaaagagtcaaatagctaaaatgtagcagggccggaattgagatccaaagcctgcattctttccattgtatcacagtacctaaatagcagcctccctttagtttttctcactttcactttagcctagagtaagattgaagacctctttccccagaaatgtccaaacaagggcaatatattcctgagtttggtacgcttcaaygttatatgcggttgttcagccaaacctgctatggaaaagattatgagaaagaaaggccatgttaggtaactgatgtctggagtcacagaatgaactactcttagctcaagttgactttataaaacttagtctggcaagtaacaaaactgcttcattgacagagagaaagatgcatcatcttgccaggaacagttggatgaattccggaagctggtcaggaccttccagaaatggttgaaagaaactgaagggagtattccacctacggaaacttctrtgagtgctaaagagttagaaaagcagattgaacacctgaaggtaggtgaacaaagggactccaagaattgggctaggcactggtttgaatacttgtattaactggtctccagctgtggtggggaaatgtatgagaaatccaagttgtcagtctgcatcagaacagaaattcctacgttttcttcatatgataaccatctacccatacagtccttgagaagcatacactctctttgtatgtttgagaattagacaaatatatttgagcaagtaaccagataatatgatcaggaaattgaggatagaagaactagtactacttcagctagtaaaggaaaagctagaatcagatggttggaaggtaccttcaaggatgggaccaaccttcctcccattccctgcaaaatcccttctgtactgtctttgatccgtaattatccagcctctgcttacacctctaacctatgtcttccttttgttgaaataagccaaatatgcctctgactaactgtcatgcacttatccttattttctcagtaaagcatacttcatcctgagcagatgaaagaaaagcgtttgattgctttcacagagtgagtgccaggagcatttgctgttgggaattccctaggacagagctttcccaacatttttgtttcacagtgcccatggtgttttaagaaatttgtcatggcacctcaaggccaaaaaaaacagaaacaaaaaaaaactcmtaatacttctacttgctaagaagttaggtccaaacaacttagtagttgttcatatggtgttcaacagatgtcactgtattttcctcaaaaatgtaaaatattctgtgagtaaagccatagtttggggactgtggctctttggaatcaagagtgattaatggccaggcgcagtggctcaacgcctgtaataccagcactttaggaggccgaggcgggtggatcacaaggtcgggagttcaagatcagcctggccaagatggtgaaaccccatctctacgaaaaatacaaaaattagctggacgtggtggcaggtgcctgtaatcccagctactcaagagggtgaggcagagaattgcttgaacttgggaggtggaggttgcagtgagctgagatggtgccactgcactccagcctgggtgatagagagtgagactctgtctcaaaaaaaaaaaaaaaaaaaaagagtgattaattaaagaactgacaagcagtgaccaagggtcagtttgaaattaggcaatatgagtagagctctgtgcctttctctgcagcttaaagtcaaaagcaaactaagtagattgtcagggatattcagtatggaggagggcaatgaaggctagaatggtgtcctttctctgaaaggagtaaaatcctacaactatggcaggagacatcttggagacttaacgtgatgtggtatttttgtcttagagcaaatgccattgtttcctgacggatttctgtggtagttggatctttgatttcaaacccaatataaagtttccttaataaaygcaaagtatagcctatgattctatgtatttttctgtatctcaatatctagctccttatttatcctctagttaccatttctttttttatctttatatgcatgttgttccctcttgtccatctggcaaactcttatctttctttgctttttttttttttttaagacggagtctcactctgtcacccaggctgggatgccgtggcatgatctcggctcactgcaacctctgcctcccaggttcaagcaactctcccgtctcagcgccctgagtcgctgggattacgggtgcctgccaccacgcccggctaattttttttttgtatttttagtagagacggggtttcaccatgtcggccagtctggtcttgtactcctgacctcaagtgatctgcccgcctcagcctcccaaagtgctgggattacaggtgtgaaccaccatgcccagccattatcttaattcagagctttccttcctctaggcagaattagatagaactcctcttatgctcttggaattcacagactgtccataatactgtaatagcatttatcacattataatgcaattgataatctgagcttctggttttagaaattgtatcataattctattttgtaccccagtgtttggcatggtgccagtcatatagtaaatgttcaatagatatttgataaatgaataaataaatcagaaggatggtctcttaatgcttttcaaaacactagggagtatatacagaacagatgtccctacttatgaggaaaaagccccagatactacatttggccattttcttctttaaacagagtctactagatgactgggcaagyaagggaactctggtggaagaaatcaattgcaaaggtacttctttagaaaatctcatcatggaaatcacagcacctgattcccaaggcaagacaggtgagtacaggctcttcaaaatatagtgaataaaaattgctctttgcttttggcctttggagatgcctccttatataattaaagtgaaaatcaaggttggatatgaaaacaaagggcatgcccaaagcagtcttcccctgcaacctgacctgtcaccccttttgctatataacattgctccattttgcaaaattccttcccatgatggaaaaagtaaatgaactagttgtcccacttagaactatcaaatgaacactgaataattaaaatgagattttcatcttgagaatttcccttttttgaatgtgtaaatgggatgggtaagcatcatctttaaacttgggcactggccagccacgaagtcagaagatcaaaaccagcctggccaacatggtgaaaccccatctctactaaaaatacaaaaattaggccaggtgcggcagctcacacctgtaatcccagcactttgggaggccaaggcaggcggatcacgaagtcaggagattgagaccatcctggctaacacggtgaaaccccatctctactaaaaatacaaaaaattagccaggcatggtggcgggtgcctgtagtcccagctactcaggaggctgaggcaggagaatggtgcggagcttgcagtgagccgagatcacgccactgcactccaacttgggcaacagacagagcgagactctgtctcaaaaaaaaaaaaaaatacaaacattagccgggcatggtggcacgcacctatagtcccagctactcgggagtctgaaacaggagaatagcttgaacctggtaggtggaggtttcattgagccacgacagtgcatgcactccagcctgggcaacagacagagtgagactccatctcaggaaaaaaaaaaaaaaaaaaaaaaaaaaaagttgggaaagcctgggtaggtatgattgtgatatccaggaagaagcaaggtatttagaagtcagtgttgggccaggcatggtggctcatgcctgtaatctcagcactttgggaggcctaggtgggctgatcacttgaggtcgggagttcaagaccagcctggccaaaatggtgaaaccttgtctctactaaaaatataaaaattagccaggcctggtggcttgtgcctgtaatcccagctatttgggagtctgaggcaagagaatggcttgaacccgggaggcagaggttgcagtgagccaagatcgtgccactgtattccagcctgggcgacggacggagaccccatctcaaaaaaaaaaaaaaatcagtacttcaaagggggtacaaagattgtgcccagatgtgtatataatctttcactgcaaattaagtctttgaagcaaaatctaatatgaaggccaggcacagtggctcacgcctgtaatcccagcactttgggaggccaaaggaggtggaacacttgaggccaggagttcaagaccagcctggccaacatggtgaaaccccatctctactaaaaatacaaaaattagccaggcatggtggcttgcgcctgtaatcctagctactcaggaggctgatgtgggagaactgcttgaacccgggaggcagaggttgcagtgagccaagattgcgccactgcactccagcctgtgcgacagggcgagactctgtctaaaaaaaaataaataaataaacaaaatctcatgtgagttcccagtcacttgctcgttgttaattgagatcacataagttttattactagtctgtgatagtgcactcctatagtcacttaacgagtaaaggaaaaatttatttgctttctgaaaatgtgtacttttctatagtattctaaagttaaaagatattttggaactatccacaagtgacatttcagggaattggtgatatatcaacctctacgttcagtgacttattcgtgtgactaaatcagagtcagcaaactttttctataaagggccagatagtaactattttaggtttgcagggtatatggtctctgtcacagtcatatacctctgccattgtaacaaaaacagccaaagacaatacattaatagaaatgagtggttgtgactgtattccagtaaaactttgttgaaacaaagggccagatttgactgatgagctgtagtttactgactcctagactagatcatttttttaaaaaaaaaccagaaatctcatatagaacagaaatctcatatagaaccctactacgtaaaacaaaacattttgttggctgccgggcgcagtggctcacgcctgtaatcccagcactttgggaggccgagacgggtggatcatgaggtcaggtgatcgagaccatcctggctaacacagtgaaacctcgtctctactaaaaatacaaaaagttagccaggtgtggtggcgggtgcctgtagtcccagctactcgggaggctgaggcaggagaatggcatgaacccgggaggcagagcttgcagtgagctgagatcgcaccactgcactccagcctgggtgacagagcgagactccatctcaaaaataaataaataaataaataataaaaattaaaagaaaccattttgttggtgtaagtttcccttatatgttattttatagcatttatctgttatgaaatccatcagtaagaatattgagactaacttaacgaatataaaaatttgaaaaggaagattattggatgacagcttcaccatctaatttctttctttctttttttttttcctgagacggagtctcgctctgttgcccaggctggagtgcagtggcacgatctcggctcactgcaagctccatctcccaggttcatgccattctcctgcctcagcctcccaagtagctgggactacaggcacctgccaccacgcctggctaattttttgtatttttagtagagacagggtttcactgtgttagccaggatggtctcaatctcctgaccttgtgatccacctgccttggcctcccaaagtgctgggattacaggtgtgagccaccaggcccagcctatctaatttatttctaaattttgtttggtttcattgtatccagaaaatatggttcacacagattaagtaactgcaaatgatgacaaatgtttttgaaagttgacttcacaatgtcagaacaggctttgattgaattgagctagaaacttgaaagtgatgtaataagaaattattgtttcaaagttaaatcactaagaatatttaatgagggcttttacacatagaaaacacttaagactracattgaggacaaaaactgtccaactgacttgaagtgttaagaattctattattacacaattctgccacaatgagaactgtgtagatgtacagagagcaagtcgtgttatatttttggtcgtgttatttaatgtattacacatgtgctatagatgtttttctttgtatagtatacatgagtggacatggacaggtttgaatatcataaattgctggtaaagagctaccacctttccaatcagggacactcaaaaataacttaaaatagatgcttagatgtgtcaggagctgctttactttccccagaaaagcagcataattggttttatctggtgggttaaggtgtagaattcagcataattgaacatgcatgttttattatcatttctaagtacttagaaatttatgtgaatattacatttaaaccaaacattaaacacaatccctaaagcacgtttttagggtgttttgaaaatcagtttgaaaattactatcttgagtgctctcaaagttctcctccaactctgaaaaaccatgtatatttcagttccttacatttatctagctccgtttcataaagtactttgatatacattcgctcatgatctcttcccagttaccccatgagagttaacaggataggttgtattatctttaaatcctgcagaataaactgtgtttgtagattaaggctcacatactgagttagtgacaaccttggttagtaccgtcttctcccacctactagtccagtttctttttttgcatcaccacactgcaatggaatgttatttttctattttgtattttttaatcgaaaatataataacattaacatttaaaagttttataatcaccaccctaattcagctaatttttttccttccttttagagacagggtctcgctctgtcacccaggctggagtacrgtagtgtgatcatggctctctgtagctttgacctcctaggcccacgcaatcagcccacctcaagctcctgagtagctaggaccacaaatgtgcactgtcatgcctgactaattttttttttttttaatatttttttgtagagacagggtctcgtgttgcctaggctggtcttaaacttccaccctcccaaagtgctgggattacaggcgtgagccattacacctggcccacaactattttgtttttgttgttgttttgagatggagtcttgctctgtcgcccagactggagtgcggtggcaccatcttggctcactgcaacctctgcctcccgggttcaatcgattctcctgcctcagcctccccagtagctgagactacaggcgtccgctgccacacccagctaattttttgcattttaatagagatggggtttcaccgtattgcccaggctggtctcgaacctcctgagctcaggcaatccacccacctcagcctcccaaagtgctaggattacaggtgtgagccaccgcgcccggccaactattttgtaatataaccttgcacatgactttttgtacagtgaagtcagtgcatatgagagttttctgtccttttaaagtatcattatgaatatttttcagatttctgtataatatttatcattacctcacctgatttttacctatcttgggaaacttctgaaatataaggaatcagtttggggagaatgtatgtgaaattatggtgattagaaacagaaccaaaggcccaaagcacaatttataagaatgttgatgagccagatttattggcacttaggatttctgttttttcttggggaaaggtgagcaagaagaggttatgaaagaaaaggcaaataatcttcctttaaaaacaatataagaagggctcattttaatgtctttattagaagaaggctgctttttaggccaggcacggtgactcatgcctataatcccagcactttgggaggccgaggcaggcagatcacctgaggtcgggagtttgagaccagcctgaccaacatagtgaaaccccgtctctactaaaaatacaaaaattagccgggcctggtggcaggcgcctgtaatcccagctgtttgagaggctgagatgggagaattgcttgaacctgggaagtggaagttgcagtgagccgagatcatgccaccgcacttcagtctgggcaacagagtgagactctgtctcaaaaaagaaaaaaaaaaaggctgctttttctgtccttaatggtattttcatttttattatattgaaagatattgatataaaaggtgaaactttctggctttattataaaagcttattccaaaatatggcaagtaccattctagactgaataattttaccagtacttgcttcacaaaattagggcggcatccagagaattcaagttggagatttaataaaaagggaatacgaatttcctctrgaagggattaagaatcattcctgctaagaaccttgagtgacrttttgttgcctggcrgctaaaataatttgtctctttccatgagtatgttgtcttgtgctgtgttaacttyctgatacctaagcttaaagtgagggccaaaggacaaattcagtgcctatatgtattcctaacacgttggtcttgccctgtttgtctccctgtccttctgctcaggttccatactgccctctgtaggaagctctgtaggcagtgtaaacggataccacacctgcaaaggtgagaatgccatttcaacagtgcttctttgttggatgtgttaggacagtgtctatgtttgcatctgtgtatgttgcaatatgtggtggaagaactgctgccagaatgggtgtgaggataaaaatctggggagaagcaactgtggtttgctggctatagaccataaacaggttggcagcccctgaagctaaaggtattgtagaaatacaatagattggatcactagataaggcaaatagggaaggaactcaaagaaaatatatgttaatctttgaattataaagaagttatactagagataatctagtctagctctcagcctcccagctaggtgacttctctgtagtttggagaagaaggaatggaagaatgctccaagtcccttaatcccaatagtaaactaaggttaatttcttactttgctcccttcacttttgttgttcccatgtttagcattttaaggtatacatctgagtatataatgccaaaaccagaaagcagattaatgagaaygcttttgttttgtgtatataaatgggaacttttgtatgatttagcaggaagataatctctaattcactagaaggagtaagagagatgcaagtaatttaggagtgaggagtcaaggagcatactcgaagagctgtctccaatctgatttctgtttctatgatactagatctgacggagatccagtgtgacatgtcagatgtaaacttgaagtatgagaaactagggggagtacttcatgaacgccaggaaagccttcaggctatcctcaacagaatggaggaggttcacaaggaggcaaactctgtgctgcagtggctggaatcaaaagaggaagtcctgaaatccatggatgccatgtcatctccaaccaagacagaaacagtgaaagcccaagctgaatctaacaaggtactgtgtttacattagttgcctcccaacaccaagaggaagagacagctgtaccagtgttcctgcccaagcccaggtatctgagagagagacatgggcaacaatctaggctgtgatgggcagtatgtttgacattctaaatgattaatatgccttaactctcctagagaattttcttatgaaattagaaattgttataagttagattcagaaacaaaaccaggtatgtttgcagaaaaagaatagccctccccagaatcgttagctcattgagaatgggatctcattttctatatgatgctgtaagcaagacaaaccattcttatcaaagtatctttccaattcttagagggatctaaataacagtgattacagttcattcttaagattgacatgtgagactaggaaaaatgtcagaagatataagaccacagaaaatcctgtaggcaagtttcaccaaaacttttaatattcccattgagcgtagcatctcatctccttcaagwtatgttatcatcatatcttggtatttttagtttattttgattaataattccttcttattgagttctactgatgtattatacataaaagaaactcagatcctgccatttagattttcattttaaaataaaaattgaagtagaagggttaagtatcttaacaccactaaacaagtcattgataggatcctagtagagtctataataactgcccagttttccaatcatttctaccacacacacaactttgtttcctgtccagaatctcatggcatgcatggcattctttctcctaggccttcctggctgagttggaacagaattctccaaaaattcaaaaagtaaaggaagccctggctggattactggtgacatatcccaactcacaggaagcagaaaattggaagaaaattcaggaagaactcagtaagttttcacaagagtgttacaaatttgctaagttacttgtcttcaaagcaagtagagaatttcagcacatcctataaaacaggaattatttttagttaatttttataaataagcaattaggatccagatagggccagagcatgagcctgaattgggaagaaaattagaaattccactcaaaaagtcagaagtttggctttcttgggcaagtcaaactgrtaatctactgtgatcaagaaccaaagagaggccaggaacagtgcctcacacctgtaatctcagcactttgggaatctgagacaggaggattgcttgaagctaggggttcaaaccagtctgggcaacatagcaagatcctgtctctacaaaaagcaaggaaaaacaaattagccaggtgtggtggcatgagcctggagtcctagctactggggaggctgaggygagacgattgcttgagcccaggagttcaaggctgcagtgagctatgattgtgccactgaactccaacctgggcaacagagagggaccttgtctccaaaaaaaacgtaacaaaagaactaaagagagtattaatgataaaaatgaaagatggaaataataaaaatattcaataaagagattagataaattgtgtactcataatattgaactgtaaacaatgtagatgaattttttttaatttaattaaattttttttttgagatggagtttgctcttgttgtccaggctagagtgcaatggcatgatctcggctcaccgcaacctccgcctcccaggttcaagcgattctcctgcctcagcctcccgagtagctggcattgcaggcatgcgccaccatgcccggctaattttgtatttttagtagagagggggtttctccatgttggtcaggctggtctcgaactcccgacctcaagtgatccacccacctcggcctcccaaagtgctgggattacaggtgtgagccaccatgcctggccttttttttttttttttttttttggggggggggacagggtcttgctctgtcacccaggctggagtacagtggcacaatatagctcactacagcctcgacttccctggctcaagcaatcttcctgcttcagcctcctgagtaggtgggaccacaagcatgtgctaccacaactagccaatttttaaatttttttggtaaagatagggtcttgctttgttgtccaagctggccttgaactcttgggctcaagtgattttcccacttgaggagttcaagaacagcctgggcaacatagggagatcccgtctctacaaaaaataaaaaattaactgggcatggtggcacacgcctatagtcccagctacttgggacgctgaggtgggaggatcacttgggcccaggaggttgagacttcagtgagccatgatcgtgccactgctctatcctgggtgatagagtgagacactgtctcaaataagtaaataaataaataacgcttctggggtcatttcctgcagtatattaggaacataacttaggtaccaggccagttgttgataatgtaaaggaatacattccctcatttcctctctacagattcccgatgggaaagggccactgaggttactgtggctcggcaaaggcagctagaggaatctgcaagtcatctggcctgcttccaggctgcagaatcccagctccrgccgtggctgatggagaaagaactgatgatgggagtgctggggcccctgtctattgaccccaacatgttgaatgcacaaaagcaacaggtccaggtgagcaatatagcaacaaagaaattggaatcacatgaaactgggtttgaatgtttctcccagtaagtagatttcatgtgatcctggacaagtcatttaatctctcagagtctcagtttaaatgaggtatttataaggtgttaatcatggtgcctgtaaaatagtaaacagtcaaaaactctattattattattaatagagacagtaagatgagtagatatgagaatggggagtttttctgactaaattgtggaattacattttacttttggctgggcgtggtggctcacacctgtaatcccagcactttgggaggtcgaggtgggcgggtcacaaggtcaggagatcaagaccatcctggctaacacaatgaaaccctgtctctactaaaaatacaaaaaattagccaggcgtggtggcatgtgcctgaaatcccagctacttgggaggctgaggcaggagaatcatttgaacccaggaggctgaggttgcagtgtcctgtccggacagtagagcgtgactccgtctcaaaaaaaaaaaaawtttttttttacttgtaatcccctgtgatagtgatccacattacttaatatcttatatctgccggctttacataggattttctgtgatcaaacctcaaaaaaattgatttaagtgcctaacatcatagaaatttaggttggtcaggccgggtgcagtggctcacacctataatcctagcactttgggaggctaaggtgggtggatcacctgaggtcaggagttcaagaccagcctggccaacatggtgaaaccttgcctctactaaaaatacaacaattagccgggcgtggtggcaggtgcctgtagtcccagctactcgggaggctgaggcaggagaattgcttgaacccacgggatgaaggttgccatgagccaagatggtgccactgcactccagcctgggcaacagagcaaaaactgcttcaaaaaagaaagaaatttaggttggtcaaaattatgtcattcccaatgaaatcctgcctggaggcttttacttcttttacattctcccgcagcctggtccatgtcttctcaacttaccaggttccttaaattaagacctaagagtactttttgaaggaactgcttcttttagttcctgcatccaggtaattattgagtcctatttagtctacttaacaaatatttttctaatccgggattttcaaactttttggcttcaagaaccccttttattctctgaaaaattactgaggatccccaagagcttgtgtttatctattaacatttattgtattaaaatactgaggaattttaaaagtatatatttaaatttttaaaatagcaatgataaaaccatcacattaacgtaagtaacatatttttaatgaaaaaatagcattttccgaaacataaaagtttgataataagagtggcattggccgggcacggtggctcatgcctgtaatcccagcactttgggaggccaaggcaggcagatcacgaggtcaggagatcgagaccatcctggcttgcacagtgaaaccctgtttctactaaaaatacaaaaaattagccgggtgtggtggcgggtgcctgtagtcccagctgctcgggaggctgaggcaggagaatggcatgaactcgggaggcgaagctgacagtgagccgagwtcgcaccactgcactccagcctgggcaacagagcgagaatccgtctcaaaaaaaaaaaagtggcattgttttatgtctttgcaaatcttaatttctggcttaataggctattctgcttctgcatatctgttacaatatcgaatgccatgtagcttctgggaaacatcattgaacatttgtgacagcgcagaaattttaaaaggcaaataacatcttagtattattatgaaaatggttttgatctctgtatgtctgctaatcctagaccctcccctgaagtgcctttcaccagccttaatctctgctctgcttggagaactgctcgttctttattgtcacatctagggagcctttcctaatttctgtcttctgccatttgtcatccccagcggaattagccaccctattccatgctttcacagttctgtgttgcgtgttcacatcagagtttaatcatttttacttttgttacattttattatagttcattgtttacacatttgtcatttcgtgaggctatgtcttatttatttttgtgcagtgtaaatactgagtactttctataaattatctcatttaatccttataacagccaaagtaagtactttactgtcctcattttacagatgaggaagctggggtttgagaacttatgaaatcttgcctaaggtcatacagctagtaggtgacagaaccaggatttgaacacaggcagtctgactccacatcctgtaatcttaacttttttgatgaaagcagcaagggatatgaaaagaaaaaaaagccatagtcattgccttaaagaagctctttgtctaattatgctatattataaaatacagattgtatatgctcttcgaattctaagaaagaaactaagaaaaacagacactgagagttgacatggcaagcccagctagtaatacagctggctctgggatccagtgttctgaactcccaattcagaggcttgggtattgcatggcaaagcagatgaatgccaactttaatttctcagccgtgtctggccttagtaactgacattgaaacagaatgggacaaataaggaaaagaaataaaataggaacaatcagtgatcctttcaaagtaagtttttattaagcaattgttaagtgatactgcctcagcctaatagcctggtcctttagttttctggcttatagttttaaagtagttggcactatttggcacaatccaacatcagtttttgttttgacactgctttttcttttttggagacaaggtctcactctgttgccyaggctggagtgcagtggtgctgcctcagctcactgcaacctcggcctcctgggttcaagcaattctcgtgcctcagcctcccgagtagctgggactacaggtgttcaccagcacgccccactaatttttgtatttttagtagagacggggtttcgccacgttggccaggctagtcttgaactcctgacctcaagtgatcctcccacctcggcctcccaaagtgctgygattacaggcatgagccactgtgcctggcctgacactgcttttagatagatctgtttttttcctgtctaaacatcttggtgtcatttctatttcagtttatgctaaaggaatttgaagcacgcaggcaacagcatgagcaactgaatgaggcagctcagggcatcctaacaggccctggagatgtctctctgtccaccagccaagtacagaaagaactccagagcatcaatcagaaatgggttgagctgactgacaaactcaactcccgttccagccaaattgaccaagctattgttaagagcacccagtaccaggaactgctccaggacttatcagagaaggtgagggcagttggacaacggctgagtgtccagtcagctatcagcacccaaccagaggctgtaaagcagcaattggaagagaccagtgaaattcgatctgacttggagcagttagaccacgaggttaaggaggctcagacactgtgcgatgaactctcagtgctcattggtgagcagtacctcaaggatgaactgaagaagcgtttggagacagttgccctgcctctccaaggtttagaagaccttgcaggtaagttggggtgaagaacatacttctgccattattagaggcaagcagaaagaaggaatgggttaggagtagtcccaagattctaggattcccttacgtaatttgtagactcagaatggtgttaaaccaattccttctcctagttgcagtgagaactgttgtagttgttacacagtgaacacttaaaaatgtgaaggtttacatagcatagtcctaaagataaaagctctaataaaatttcagtcagcaagtagagattcatccccatagatgtactgataaatggagttccacatatactctcattgatasccactttttttttttttttaatattatgcataccacacacacacggtctcgctctgtcacccaggctggagtacagtagtgcgatcatggctcactgcaccctcaatctcctgggctcaagtgaacctcccacctcagcctcccaagtagctgggactatagacacacgccaccatgcccagctgatttttttttcttttttttttttgagacagagtctcactctgtygccccagctggagtgcagtggcacgatcttggatcactgcaacctccgcctcctcggttcaagcaatcctcctgcctcagcctcccaagtagctgggactacaagcacgtgccaccatgcctggctaatttttgtatttttaatagagacggtgtttcaccatgttggccaggctggtctcgaactcttgacctcgtgatctgcccgccttggcctcccaaagtgctgggattacaggcgtgagccaccgcacccagtgattatttttatttttagtagagacgaggtcttgctttgttgcccaagctagtcttgaactcctgggctcaactgatcctcccacctcagcctccccaagtgctgggattacaggcatgagccactgcacccggctgcttctggacttcttatgataacttggtagaagaaaaattgtgccattaatttattatttatttttctggaactgtttatgactttcacgtttaccagctagaagtcaaagtttacttctgttacttagatcaccttacaaggttgatacgaggattaaataagatagtgtacatgaaggagcctaattatatgcctctttttggtaggccctcaagtaacattagttccyttcccccaagattagaccgtatactctcagcaaacattttaaatgccagggttcaggctttattgatttcaattttattttctcatttcagccgatcgcattaacagactccaggcagctcttgccagcacccagcagttccagcaaatgtttgatgagttgaggacctggttggatgataaacaaagccagcaagcaaaaaactgcccaatttctgcaaaattggagcggctacagtctcagctacaggagaatgaagagtttcagaaaagtcttaatcaacacagtggctcctatgaggtgattgtggctgaaggggaatctctacttctttctgtacctcctggagaagagaaaaggactctacaaaaccagttggttgagctcaaaaaccaytgggaagagcttagtaaaaaaactgcagacagacaatccasgctcaaggattgtrtgcasaaagctcasaaatatcagtggcatgtggaagaccttgtgccatggatagaagattgtaaagctaagatgtctgagttgcgagtcactctggatccastgcagctagagtccagtctcctaagatcaaaggctatgctgaatgaggtggagaagcgccgctccctgctggaaatattgaatagtgctgctgacattctgatcaattcttcagaagcagatgaggatggaatcygggatgagaaggctgggatcaaccagaacatggatgctgttacagaagagctgcaggccaaaacagggtcactcgaagaaatgactcagaggctcagggagttccaggaaagctttaagaatattgaaaagaaggttgaaggagccaaacaccaacttgagatctttgatgctctgggttctcaagcctgtagcaacaagaacctggagaagctaagagctcaacaggaagtgctgcaggccctakagcctcaggtagactatctgaggaactttactcagggtctggtagaagatgccccagatggatctgatgcttctcaacttctccaccaagctgaggtcgcccagcaagagttcctckaagttaagcaaagagtgaacastggttgtgtgatgatggaaaacaagctggaggggattggccagtttcactgycgggtccgagagatgttctctcaattggcagacctggatgatgagctagatggcatgggtgctattggcagagacactgatagcctccastcccaaatcgaggatgtccggctattccttaacaaaattcacgtcctcaaattagacatagaggcctctgaagcagagtgtcgacatatgctagaagaagaggggactctggatttgttaggtctcaaaagggagctagaagccctgaacaaacagtgtggcaaactgacagagagggggaaagctcgtcaggaacagctggaactgacactaggccgtgtagaggacttctacaggaaattgaaaggactcaatgacgcgaccacagcagcagaggaggcagaggccctccagtgggtagtggggaccgaagtggaaatcatcaaccaacaattagcagattttaaagtaagtctgaaccttgtttttctttttcttttacatgtatttatttgcttgtaacttggaaaccagtcaagtatacattttaacttctgtccctagttttattattgtcacttccatcaccatgaaagcacactgtctgaagactaaatagtctctcggacttctgagcaaactggtttgagcatttttctttttctttttcttcttcttcttcttttttttttttttttttttttttgagacagggtctctctctctcacccaggctggagtgcagtggtgcgatctcggctcactgcagactcgacctcataggctcaagcgatcctcccacttcagtctcccaaggagctgggaccacaggcgccaccatacccggctaattttttgtattttttgtagagacgaggtttcaccatgtctcccaggctggtctcaaactcctgagctcaggcaatccgcccacctcagcctaccaaagtgttgggattacaggcatgagccatcacgcccagccagagcatttttctattgtagtttatttcagtctttataaccaattaaggatatagaaagaaatgtccaagtcttatctcttactctaagaatttccttttaggatttcttgagatttcagattaccagattttgtaatagcagtgaatgtatcttcaggtctctggtttttgtgtgtttttttttttttttttttttttttggagacagagtcttgctctgtagcccaggttggagtgcartggggcgatctaggctcactgaaacctccacctccggggtccaagtgatcctcctgcctcagcctcccaagtagctggggttacagtcgctcaccaccacgcctggttaatttttatatttttagtagagatggggtttcaccatattggccaggctggtctcgatctcctgacctcaagtgatccacccgccctagcctcccaaagtgctgggattacaggcattagtcaccgcactcagccccctgtttttcaaattgaggtatgaaaagccgtaagttaaacatagtctcatcttcctaaagggtttattttacatagattttaggggaggatattgatgtatatttgatatattatggaataaaacataaaattatcattaattgttaagataaaacatgacacttcaaataaatctcccatttatatagtaagcagcttaataatacatcccagactcctcaagagtacaagttctttgcctataggaaagaagtttgagaagtactgccttaattgcaaaaatactttaattctttgcctgagccaaaatctccattcctgagattgtgtgagtataaattaaagtaacaggagatgattacatgacccaaaagtgtggatttactgggttaggagcacatctgttggatcttggttctcactatattaacctgttgcccctagagttttccttgtggtaaatacgtaaaagtctctcactctgccactgtacatggaatagatttggaaaggatactttcagcactttgtttccatcactagagttaattattcctgcttacacagttaacactcctgccattaaagtaaaattgtgatctcagagaccctgcttgccagcgttatttatcttaaaaacatggatgcagaggtaatgttgacaccagctcagagccacgtagtcctagagacgtcacagttttgtagacaggatccaagtgcaaaaatgtggctgtttcagaagggcccctctaggagcttgggagaaattcagcactaaagtgggacattggctgaaggccttcttaccatgtttggagatagtacaattttgagcaagaggagtcatcgtatttgggtttcttgaggcacccagataaggaaagggtaggtagagaaaacgtaaacccgtgaagcagtgcattcctcttagaaacttcctttctagtggtagtgtggccttccctgtttcagcttgcacatttttctttcctcttttgttataagtgtctcaaaagcagagactttcttctacaggtatgcttcagttatccaatttacttgcatccaggctatttagaattaaccatctaaccaactcaatgaaatttttagaaaactgaaacttatccctttaggctccaaaatagttttgttttatcagccgggtgcggtggctcacgcctgtaatcccagcactttgggaggccgaggcgggtggatcacgaggtcaggagatcgagaccatcctggctaacacggtgaaaccctgtctctactaaaaaaaaatacaaaaaattagctgggtatggtggcaggcgcctgtagtcccagctactcgggaggctgagacaggagaatggcatgaacccaggaggtggagcttgcagtgagccaagatggcgccactgcactccagcctgggtgacagagtgagactccttctcaaaaaaaaaaaaacacacaaaatagtttcatctaaccaggttctggtttatataggaattattttaaactcaatttgcctaattttctaaatatgtattatgcataagttttttttaatgagtgcaggttaacattatttaaatggttgtactgtctatactatggtgatattctcaaggatgtgagacacatttggagctgctttgtattaagtattcccaaattactgtgcactttgatttctatattgaagttattgtttagggcctctatagtattatactggttggattggctgtgcatgtgtgtgtggagaggaggaggtaattttgggatttctgcccaccaccatgatattggttattatttcctactgctatcacttttcactgctgtcatttggtctgtrtagtctattcctcccttctaatcttcactgagctagaaaatgagataaacaggcctgttaaaattgcattagatatgagctaaaatgtacaaaagagtccacatgcaggcataaatagtgtttggatttgaggacaagtcatcttttccttttcatttaatccttggtttctagagacattctgacttttgatgttgctggaagatttcaaaaaattactgggcattactttatcttatttctatcctagtatgttgcctaatagtgctcagagttcaatagcacttagttgcttgtcatagccaaattcgtttcactgatttctaaaaataagccttccacctcagatactctggatgtgaaggctgggactggacactgatcggctgggctcttrcagagtgtgttcatcmacagtggactggtgttgacaaggcaagcctggaagaagagtgggagaagggaraagggtggtggagtgtcctgtgtgtagtccattgtcaagtcagtaggtagttaccataaaatgatcagtatccmccctcaagttggggatgcaaatcaaaagccctgttccacctgtccaccttgtagggaagtcaaaagctttggaaagagtttttgccttctcccagcaaaaatctttggtcaggaggggaggagcatattcttggctgaactcatgctgagctcatcggaagtgaaaacaatgagaggagaaaaattctgtgtgtcagttccatagtccccaggaggccgcataaagggaaggtctttttggacccattctgaggactgagtcattttcatgatttgagtgtggagttcctgggttaatgtattatagtccagccatagattaatctttccttactccagcagcagaccagatttataaagtatgactctgttttcagattcaaattatttttaataaggtaaaaacaaagatgaagataaatatttttaaaaacagcattagctgtaagttttcagctctttttttaatggaatcatacttttagcacagaatctgcacaagagaagaggatatgaatctgggagacggaaactctgctttaacccagctaactccatgggagctagaatagacagatgagttaggcctgtgaagaaccccccagtcttacttgggactgtacagtcttgctgatagatccatggatctgcagtctgtggggaaaattatttcttccttaaatgaatgtggaatactaaaatacattattcctaggaaaggctttccctcagttgcttctgaatgattagtaggtcctcactggcwgaccagattctatcacatgggagtggaagagagttcctttccactcaaaccaggcagagatctcaggcttcctgagttaggatctttaccaggttcagctctctgttggaagtagaaaggaagaagccattctagaaatcactaatgagaggattgagcttgttttcagaaagctggaaagaaaagactttggcaaatctcttcaggaaattccgttttcctgaacaagggagtctggttattgaggaaaaggaattgtatgtgtctaacaggaggctaacaagaaaggaaggacstttttatcactgaaacttgagccaaagaattcccctagagtgaccttcctgggaagggtaaaaaaaaaaaaaawaaatatatatatatatatatatatatatgttaagtctctgatgataacaagagattttcctcattttgaaattccctaygtaggttttacttgaactgagatcattctgaatcttaaaccaacccctcctttgccccctgctccccgcaagaaccatgtgacttctcactcagaaagtatttgatggtttgggcatcatactggtgagcattatcaagaaacctggatgcaccttcattcacttgtttttcatatgtatttatattgttgtgtatttgggtcatgcttcagacttggcattctacctctcagtgataaaatgaacaatggggccaggcacagtggctcacacctataatcatagcattctgggaggctgatgtgggcagatcacttgagcccaggagttcgagaccagcctgggcaacaaaatgaggcggcccttctataaaaaataaataaattagctaggcatgacggcacatgctgtggtcccagcttacacaggaggctgacgcaggaggatcacttgatcctaggacgttgacgctgcagtgagctgcgtccatgccaccgcagtccagcgtgtaacagagtgagaccctgtctcaaaaaaaaaagaaagaaagacagagagagagggagggagggagagagagagagagagaraaagaaagagagaaagaaaagaaaggaaggaaggaaagaaaagaaagaaagagaaagaaagaacgaacgaacgaacaatgggaaaaattgactgacagacctctttagggtctgcgagtttctcatagtggttcacttcacccagtggtgcatataaagcacccaaaccagttggtcttttcctttcttgtctttgaggctgggctgctgggttctaataggtgcagcatcaggcttccttaggattattttcattcctaattcaggttgagcagagcccaggatcagggtctcagtatacttgaagtttctaccgggggacctaggtatcctactatgaaaacagaataagaaagtcttgtaaacgccttcatttgattgattgattgattgattgattgattgattgatttattgccacatagaaagcaagcttaggcatcttcatgtgcacatgagaaaagccctggaagaggctgggggcggtggctcacgcctgtaatcccagtactttggaaggctgaggtgggtggatcacctgaggtcaggagttcgagacgagcctggccaagatggtgaaaccctgtatctactaaaaatacaaaaattagctgggcatggtggcacatgcctgtagtctcagctgtttggggaggctgaggcaggagaatggcttggacctgggaggcagaagttgcagtgagccgagatcgcaccactgcactccagcctgggtgtcagaaagagactccgtctccaaaaaaagaaaaagaaaagccctggaagacagggcccagcatggagttgaaagactgccagtttactccttcctttcaaatgattacaaggacagtatcagctcatgtacgtttttggcagttagtacacctgcctgagagtgagtcactggaggatagagcaaatgaggttagcgttatctacctgcccttggagagacaggaaatcacacttggtatgacctgtctgtcacctggaggtttaggtttccccagctttaccaagatgagtgggtatcctctatccctgccaacccccaccttgtgctgacccttccttggcctgtcttggttttttcctttcttccttaaacaaagctactccaaataggaactagggtccaaggaaataaagacagtatcctaaaatggatttctcaatttcggcactattgacattttttgggggtgggtggggaggaaaggggcakccactcacgccaccacctctgcctgccactatcaacattttggactggataattctttgttgtgagaarctgtcctgtgcattgtaggctgtttagcagcatttctgacctagtaacttcccagttgtacaactaaaaatgtctccctggaaggcagaattaccctctgttgagaactatakccctggaagaaattgccacctatacatgggaaacttagaattcaggtggaataggttactagttaaatatttatgtaacaagcagccttctgataatctgattatgactgtgtgtagtggcaacaaccacttctaagtcagctttcctttaagccaggctctggattctttatttttgctggccttaatctgtgtctggcttaacacctcctggtcactttccctggctggaatttacgtacagttgtcagttgttgatgcaggtgtttggttgatgatgcattgccaaagagaagaggaacttcctttgtggacatacttcagggagcttccttgttctgtgcctttaaggggagactacagtctctcagttgttctccacagccaaccaagagtttggctgctgatatttataacccttatgtgaccacccccacctccccaccccacaaagaattccaatgctctgtaataatcctctccacccccaccatagcaactggatgtggagaaggtgaaggagcctttaaggcctttaagtttgcttcatgttgaaccttttccagctcccttttaaaatattgccagttgtattttaaatatcagtgtcacaagcaaaatcccaggcttgcagccactgcatcatcttaaaggagcctcatgccccagtgaaggtagtaaaattgaatggaaggtagtaaaatcatcaagaaaggattgatagattttacaaaaatctgtctggaaatttgatagcaaggtgagattttaaagcaacaaacaggctaggcgcagtggctcatgcctgtaatcccagcattttgggaggctgaggcaggtggatcacgctgtcaggagatcgagaccattctggccaacatggtgaaaccccatcttakccgggcatggtggcatgcgcctgtagtcccagctacacaggaggctgaggcaggagaatcgcttgaacccaggaggtggaggttgcagtgagccgacatcgcgccactgcactccaacctgggtgacagagcgagactccatctcaaaaaaaaaaaaaaaagcaacaaacaaatatatctgtaaccaaagaaaaggactgagcagttggatttgagtttactaaaattcttcacatacagtatcagtatgtagcattcacaactaagatttatcatttgtataagaaggaagaaatatatttccagaaaaactagaatgtatcctgtgcagaacttgtatgtattgatcgtttagtagttgattagtaaacatggttaagataagcacagacttgcagaaaaggactgatcctcactgtgcctagaaatgaatggtaaatggtctcagccttaggctggttctggagcttcagaaaaatatcctgggcactttcaagctcgctaataagctatgagcttctaggaagtacgatgagtttctttgaagggccgtttattgttagagttgctggtttactaggaataaaatgacttccacagggagttgtgtcaggtcactgcaccaaaccatcactgtaaagggctgtctcctgctgaatggattcttcacaagtctcagctgtcccagttggaaaaacccagctatgggtagaatgtgcaccctccctactttgccaccactaagtgcttttcaactacgagtctctcttattgactatagaaggttaatggaatacacttactctctaggacgtcataaactatttttctaccaccagtcatgtcatttgaaatatggatctttgctacacatggtgatggttcatggatggaggttaaaaggaagtgattccatattccttttaacccatccttactgggcagttgctctgtgctagtccttgtggtgggtactggagtctcagatagtctctagttaacagtgtacagatgtgccttgacttacagtgaaattatgtctggaaaaacccatcataactcgaaactattgtaagtcagaaatgcatttaatgtacctactgacagccgggtatggtggctcatgcctgtcatctcagcactttgggaggccgaggtgggtggatcacctgaggtcagaagttcaagaccagcctggtcaacatggtgaaacccggtctctactaaatatacaaaaattagccgggcgtggtggcgagcgcctgtaatcccagctactcaggaggctgaggcaggagaattgcttgaacccgggaggcagaggttgcagtgagctgagatcatgccattgcgctccagcctgggcaacgagcgaaacttcgttccaaaaaaaaaaaaaagtagctactgaccatcatagctcagcttagcctaccttaaacatactcagacacttacattagcctacagttaggcaaaatcatctatcagaaagcctattttataataaagtgctgactcgctcatgtaatttattgaatattgtactgaaatagagaaactgaatgattgggtacttgaagtatggtttctactgaatgcatatcactttcaccatcataaagttgaaaaatcttcagttgaaccattgttaagtcagagaccatctatagtaagggaaacagatacagagaattacagtggtactgatgtagtggtaaatgcagtaagaaagatctgagtctaaatgatctctgaaaaaaactctaaatcagacatttaaaatcctattttgcagataagaaaacttaagacttgaagaggttaaaataacttgttcgagccacatagcaagtaaatattagagttgggattgggaaggtctgtttggcaccaaagtttatgctacaccagtggttgtcaaccaagcatagctttgcagagactcccactccccgccactcctttttttttttttttttttaaacagtttcactcccatcacccaggctagagtgcagtggcacaatcatggctcactgcagcctcgacctcccagtctcaagtgatcctcctgcctcagccccacaagtagctggaattacaggkgcatgctgccattcctggctaatttttgtattttttgtagagatagagtttcaccatgttgccaaggccggccttgaactcctgagctcaaakgatctgcctacctcagcctctcagagtgctggtattacaggaatgagccacagtgcctggcccagagacattttttattgttatgactggaaaagctgctactggcatctagtaagtgctgcgaaacaacctacaatacacaggatgacggccccttacaatgaaagaattattcagcttacttctagaaagctagggaatttgatttttgccatcttcagatcccatgacaagtaagagttaactgattaaatagttccactcgctgggggtgcttctgtggttttcctctccttttaagaaaattagttaagaaatagtgttgcttccgggagtgacttacacagatagagtcaggatcttggggaactaatctgagtcagcgactgaagaattttctctatgcctgaccagtccccaccccacactgccacaaggctcctgctgtggaaatcaatcagctgtgtatctcaggctgcttcctgtagggtgtgttatggaatggcatcagcccttgcaccagctgggagtactgatctcagtgtgattttatcagactatgtttcttttgagccttactgtttggaacaaaggaccctctgttaagaatgcagagagctggtgtgattggatagctagcatatacatacatggttcctatgggaaaaaaacagacataaattatgctatagccctctaaaattttcatctccaaaatgatttcctgaccttctgtctgtattcacagttctttctgtaagtgcttatccttcccccaaagcaattcgaaggccatctgatctgataaatggttgtatccttcagaactagcctatttctgtgtctccagtcttggatgtatttgatccccactatctttccagtgttatttcctatatagaccatacactacatccagttaccccagacactccttatacattttaggtatttgatttctgaagtcatagctcaagtccacttctttataaagctttttttttttttttttttttgagatggattctggctctgtcacccaggctggagtgcagtggtgcgatctcggctcactgcaatttctgactcccaggttcaagcgattctcttgcctcagcctcccaagtatctgggattacaggcacgcaccatcttgcctggctaatttttttgtatttttagtagagacagggtttcgccacgttggccaggctggtctcgaactcctgacctcaggtgatccacccacctcggcctcccaaagtgctgggattataggcgtgagccaccatgcccggccttataaaggcttttgatctccccagctcactactcctgatctcttaatcatttacaatgtataactcacttggcttttatcacataccacctaattttgacattttctgattatatccatttgtcctatcccctcagttaattcacttttgtgtcccttaatgtagttagcatattggtatatacacagttggagatgagacaatatttgactgactggatgaacattctttatttctcataagccatgtgagctctaggattcaaaatgctatctactctgcaagacttgaggtatatatccttgtgtgtcctgaagaaattctaatcttagcctgatttcctcagttctccatctttcttctgggcttccttccttctctgctagttagtatatgttaagggaacacaatcttttttcagtataagagggcaaaactaagaaagaaatgtgctacttcttatgcacagagtcattgctacttactcaattagttgacagtttggtgtagtgaaaaaaactgaatacaagttctagtcagaagtatccaggtttgaatcctggctctatcatttactagctgagtgaccttcagggaaattacttaacctctctgaatcttacttactttaactgtaaaatacaaatattggtaaatcatacctttaggatttttatgaaaattaaatgaagtgatatatctaaaagtattaggcttatatttggtgctcagctcactagatgataatatgcttttttttaaaaagaagcttatctagacatataaattagaatattgtgaaatctttttttttttcattttttgtttgtttgtttgtttgtttttgagacagggtctcactttgtcaatcaagcctgaagtgcagtggcatgatcatggctcactgcagcctcaacctcctaggctcaagcgatcctcctgcctcagcccctacaagtagctgggattacaggcatgcaccaccacacccagctaatttttgtatcttttgtagagatggggttttaccacgttgcccaggctagtcttgaactcctgagctcaagtgatccgcccacctcagcctcccaaaatgctggggttataaacatgagccattgtatcaagcctgtgaaatctttttaataagaacagttacccctctttgtgcctagggatcatcattctccagaagacttgatctaaggcccagcaccagattattttcttcttgaaaattggaaaaatggaaattatgaggataaagtaaaattagtttgataacaatgaaacaagtggatggatagagagccttcctgagcagtttttgtgggaacaatagggcttatttctagccctagagtgggaataataggcaagtttaggtcatgattcaacacagcttaaaatatattttatgtacacatacatatacatacatatttatttattcattaattcatttatgcatttctatcagaatcctacaaccagcaggtttttctgagaccattttggccttggcttgtatgctctacaaattcatattattttcaaatcattaaccagaattaaccagaagacattaccagctcagtgacttccccagccactcagttgcccattagatcagctctaatgatctcagggattttggcctaattagcttttatcatagaccatgttatcttcctctgttaccgtacaatggcaactactaagtcagcatctttaggaaagacatctcttaatattaatcaatctttaattaaaacattgagggctgagccaaaaaatatcggcagagtttcagaagcaagcagcttaaaatacagatataattcatctgtctgccaatctcataccagattgagatgttttacagaaagtctttaattctttacagtttcagcaaatatgtgtttttaatgtttttaacatttggtcatgtgtatatatgagtcaaggaaagaagataattcaaagaaattatatgtgccttagattttctccatcttgaattaattgtatttatcaagtgaaccatttaatatctctgtcatcttgcaattcattcccaaaggataagctctggttttggtctaattctttaaattcatacctaagctgtttgtttctttgtcatcaatgataagaaktttccttagtaacgaaatgaaagagatggtttttagaaatctcttctctctgtattatttattctgccttcttttctaatattgaggagcaggggctggacgcagtggctcacgcccgtaatcccagcactttgggaggccaaggcaggcagatcacttgaggtcaggagttcaaaactagcctggccaacatggtaaaaccccgtctctactaaaaatacaaaaattagccaggcttggtggtgggtgcctataattccagctacataggaggctgaggcaggagaatcgcttgaacctgggaggtagaggttgcagtgagccaagatcgcaccattgcactccacctgggtgacagagtgagactgtgtctcaaaaaagagggggtgattcaacccagagacctctttcatggaaataaccaagcaattttgtgatgatcatgccactctggaactggaaagactactctcagttagtcccagggggaggcccacatcatcactttctcagggaaacctaccctgagcttccaggccaggttgaggcccatgacccatgttctcatagcacggtgtgctttccttagtgcctgggatagtttagagcacatagtagataccaataaatatttggtgaatggatgaaaagaagagaatcaacgatataaccttgtgaaattagttgcctcaagaggagaggaagaggaatccaaggagacaaagaaggactggctagaaagatagcaccagggtaccacagtgtcatggaagtcaaaagaacacagtctcaagaagaagggaggatccatacttatttctcaccactgcttatccttaaccccctctaatctgatccaacacccatcactgtgctgaaactgctctcttagatattcattggcttcctagttgccaagtctagtggccttgtctgcctcactattcccctctttcattgtacagcatttaatatcagatcttctttcttgaaagttaatttactttctggacattgtgctcttccgttctcttctctggctgctcttctgctttcctttttggtttgtcttcctatctcctaaatatgtggttccttaaactctgtcatctgtctcttctcttctctctgcactcaacctctgagatggcagctcctcactgttctatggggaaaggcttccaaatctatctttctctctcttttgttttttttgtttggtttggttttttttttgtttggttgttttgttttgttttgttttgttttgttttgttttgagatggagtctcgctctgtctcccaggctggagtgcagtgggtgcgatcttggctcactgcagtctccacctcccaagttcaagtggttctcctgcctcagcctcccaagtagctgggactacaggtgcatgccaccacacatggctaatttttgtatttttagtagagacggggtttcgccatgttggccaggctggtctcaaactcctgacctcaggtgatctgcctgtctcggcctcccaaagtgctgggattacaggtgtgagccaccacgcctggcccaaatctatatctctatcccagcattgaatcttttgtgtgaggggcccttctagacaccttcacatgggtcgttttttagtatttcacatacagaatgctctaagataaatgaattcaaatattttattctttcctgctgttgttttataataagtactactatgcccctagtaacctaagagtaacactatatggcattatctttgtttttttccctctaacctctaccttctctctggtcagttgtgaagcccaaatattcttcctctgcaattactttcacagccctcttcctcatttttactaggtgtattattctgaacaagtatgcttgccaccctaagtttcatttataaagatttagattttttaaatgagataataataagtgacagttgagtgagcatcccgtcccaaagtcctcatttaaaaatttttgggcgggggggccgggcttcgtggctcatgcctgtaatcctggcactttgggaggccgaggcgggcagatcacctgaggtcaggagttcgaaaccagcctggccaacatggcgaaaccccatctctactaaaaatagaaaaattagccaggtgtggtggtgtgtgcctgtaatctcagctacttgggaagctgaggcaggagaatcgcttgaacttgagaggcagaggttgcaatgagcgagatcgtgccactgcattccagcctggcaacagagtgagactctgcctcaaaaaaataaataaataagtaagtaaataaataaataaataaataaataaataaataaaatgaaatagaataaaacggtttttttttgctgggcatggtggctcatgctgtaagcccagttgggaggcttaggcaggtgcatcacttaagctcagacaacatggtaaaaccccatctctactaaaaatacaaaaattagctgggcatggtggtgcacacctgtcatcccagctacttgggaggctgaggcaggagaatcacttaaacctgggaggtggaggttgcagtgaaccgagatcgtgtcactgcaccccagcctgggtgacaatgtgagaccctgtctggaaaaaaaaaaaaattaacaacaacaacaaaaaaatttggagacaggatctcactctgtcgccaggctagagtgcaatgacacaattacagctcattgtaaccttgaactcctgggctgaacgattttctcagctcaacctcccaagtagctaggactacagatgcacatgcctggccaattttttaactttttgtagagacgagtgtcttgcaatgttgcttcggctagtcttgaactcctggcctcaagggatacccctgcctcagcttctcaaagtattggaattacaggtgtgagccattgagcccagccagaatttgcttctttagagtcctgccttcagctctctacttagaaatatttgtctttgccatctctgtatatctgaaatcctaatgagtaaatgtgattccctccataaagccttctctgatacctcytgccttccttcttcccacccttctgtcaggtcttttctaacttgcaaagccccatgattttgtcatcaccatggttttggtgaccattagtctaaaaagagggattaatacactgtcttttggaaagtctacaggcaggaaagggcttacaggggtcatgagagttcctgcagagtgtgtggaaagttttctcatgggttcacgagtayatgagagctcaaatagcatcaaaatccttagtatcccacttaaagcaaacttcgtgtcatgctatgttgctttatgagccactccgtagccatgtttataataataaaagtaccaaaggatggcagtgactgatgcccaacaggtacagactaatactgtggagtttctacttgctactaaataatgcttgtaaaatctaaagatcctaagatgaaaggcattgtgtagatttaaaatgagcaagatccaaccagtcctctgtatcctcttctactcagaattagtcttccaagagagagcacccatcaaggtgggtgataaggcatcatagaatctagggaagtgtgaatctggggtctccagattgtcccagagggctggcattttaggtctggagcagacaagggcaggatgccaggtccaaaacttggaaagggagctatgttagggtgtgaggagactccacccggctgtctttcattaggaagactgcaggaaggagctggaagggccaggatttttctttcttctaagttcactgaaggaaaatctaacaccaaattctgtacttgggaatttcaaaatgagtagagaattctttgaactctgtaatcaattaaccggaaactcatttgaaatttggcttcagtgcatatgtttgtggttacaggggtgggggaaatatctgaagagggtctctggagctccctgtatttctcttttaaaaagtttatacacagcatgtgaaatgaacagatgcttttttttttttgtagctatcagggcaacaagaggtggaaagctgtatcaggtatttatttcagtccctgagatggctattggcagagtttcacatacctaaactaaggagaaactcatgaacagataaaaattaagacatggaggagaacttgtgcttcctctcttgatttatttctaaacacatactgatgattttttaaaaagagcaaagcactcagaaagtattctttggctttgggttctggggtttttttggaggtgcggtgggaggattagattactatatgtaatttctctttaggttgtatttaaatttgttttcctaacaccctaattagagagagtgtgactgcagataataagtaattcraatctgaatttcatagtcgtaggaatgctccatttatttatttatatggatcactgatgagagtagtaagaatattggtagatagacatgggagggaattatttaagaaaagtctggattggttgatacctgacttggtgaggaaacagtaaaggaatttctgttcatgaagtttgtgattccacatcaagataattctttatggctgggaacagtagctacgcctgtaatcccagcactttgggaggctgaggtgagtggatcacctgaggtcaggtcaccagcctggccaacaaggggtgaaacccatctctactaaaaatacaaaaaattaactgggtgcggtggcgcatgcctgtaatcccagctattggggaggctgaggcaggagaatcgcttgaacccaggaggcaaagattgcagtgagccaagattgcgccactgcactccagtctaggcgacagagtgagacagagtctcactcaaaaaaaaaaaaaaaaaaaaaaacattctttataatagaataaccacccatgtttcatccagagccagaattcctcagattcttccaaccagaggggccctggcatgctaaacagtctgttatgatatctgaacacttaagtgaatgtatttggccagggatatttgctagtaaaattgatctttccttccctgagtttttccagttgtgctgaataattaaaggaaaattaaaacctggattccctaaactgttaagtatcagatctgtaagctgtcagtccttaggattacagtgtatcagagttagaaaggactttaaaattcatctgaacaaactgcagaagatttgtaaatctgttttcccaaatctctgccaagtgattgcttgaatttctgctcaaacacctccagggtcaggaaagtcaccagtttaggggacactctattctttgaatagctgtgagaagctctttgttggttttaaatctcacatcttagtgtgccagcttaaggagatacccagaacaagtttccttcctcccacgtctcagcccttcagatacttcatgctaattacatctcctagaactttctmtaggtcagacattattgggtcttgcactgtttgttcttcataggacagggtttmtagtgtcttggcagtatacgaccaagaggacacaggattctggggcagtgcctttaaaagttttagaactaaaaaatattaaaactagaaagggtgtcaagacacaacctagtcggcctccccacccctttcagtttacagatgggcagagtcttttggatttgagtgggtagaattgatcagcagccgttgttgaagtgagaaatgaagtgtaaagcattttaccagagaaaggtcttttagttgcctaattccgattacaggcttcagcgcacttctcatttttgccaaggaccagtctgattccctaagtaagcctaaggctcagctcaaggtttcagtgccagatcttcatacaccaggtgttggtttcacttactgtttgtgtaaaggatagaaataacttttccataagttttgcggtatatattgaccacatggtccgacagagattccgaattttaatagatgtttttttccttcataaaatcagagaatggccatcacaaatagaacagagtattggacccgttcagagatgcagctgcctctggtggacagtttcctgggttgccctttgtactttctttgtttaacagtcaccaggtgaccaagtggcttttctaaaagccaarggccgtggacgacgggattgtgagcgacttttctctagtgttttctatttgagatttgaaatacccatgcttttcatctggtccaaggaggctcaggtttccttggctgtgcgcaactataaaggacccaggtgtttggtcgtagggctcagctgttggcatccccacctcccccaacaccccattttcttccgtcattgataccactcaggtctgtgagcagagaaatcctggtgggagaattgaccaggacttgatatacttgagaagggggagagggaaggtagaatgtgcctagagttatccaataactttggtctctgagcgtgaccgaattcctttgggacaccgggaaagtgccgggtttaaggctggagtgttcttcggtccggcaaggggcgcgctaaaggtgacactggaaggagcagggacagcctttggcggcagagatggagccgagagcgatgcaggcggcctaccccagccggcgcgacctgccggcacacgggaactcgagtggccgtcgccagagccggctagctgggggagcgcgggcgccctttctggattcgttcgcctttgggctgggctcggagccgggccggttggagcgagacaggggcgggaggggccgggccagcgggaggagggcggggctttcctttgtcaggggatttgcgccgcgcagcccagactcgcgcgggttccgttcctctccttgcgccctctccgggggcggggcgttcccctctggccccggggcgcggtgggcgtgggctgcgggagccgaacggctggcgtcccgggtctctcgctccgaatcccgcagaagcccctccttcggcgcctcagcctccaatcctctccaccgctccctccactctcggagtcgctcctctccccggccccgcccccgccgggccccgcccycgccctcgycctcctycctgtgctctccgcgtcgcgcgctccctggcttycagggggctgcccgggcggggcggcgcascgcggcggcgcggggaarggggaggagagccgcccgccagccgagcacttycagcgagctagcgagctagcgggtcgcgctgcgcgggggaggaggactckccccccgcccgaccctagcggagccttttgttcccagccagaagtttgcatgccgggaccgtgacagctgcgggcggggaggacggcggggccgcggggccagcggcgtggtggagaatagaggcggctgcttgtcatgcagcccacggcgtggcggctgcgggccggggactggcggcggcgggcgaggcggcgcccacagcactcgggactcagctgccggagggacaaactaacttcctgagcgcgggacctgaggctggcgcggccgggagccacctgcagcctgcggtgaggcgaccctggccctcggggcgcgcggcatggcgcggggaagcgggccgtgctgagcgagcccctccgacagacccgcggccgctgctgctgcccgcccgcccgcctgcctttccgaaggcctggcgcggggctccgctcgccttgttttgcagctacagcgcagggttggcctgggagccacaacaatgccatgatgttttggagacaggaagccccaagctggccccgaatgaaggacttcctgtgtttaaagttgcaggaatatccgccgaccagcccagttcaaatgcaaacaccccagctagggaggacgaatggctaattcagaccagctggactctccagggctggaactgaggataaaatgaaaggaattcttaggagcttgggccatacttgaagactagagaggctgtgccattgttattaaaggatacaatcggcataaatttgctgctcccaactctgcttcggtgagaagtgagtggaactagatatcgaaaaagactcgtcaatatcagatgatttttgttgactgtatttgaaagagcagtgctcttaaaaaaaattaaaccataagccatacaaggaattattttaaattatatcgtctgtcaaccatgaggctgctagcctgtgaggaaaaagctgtttgtcttagagcttctcccagaatggtttcaaaacggaacttccaggcctttctggagggcagatgcaattggtggtttggggtatgaacagctaaaaggatttataacttatgtagaatgcatttggggggaacctgtgaaaaatacttttgaaagattgatggttcatcttgattgaaaaaggatgggtaagccactcagcagaccagactgtttaaggcggaaccccagctgcctggggaaaggagaggaggaggatggctacatagaggactgctatgttccacaacggtctatatatgatacgatgaggataaatgagcaaattgaccaggggtcaaagcttaaccagacttcaaaaagcaccatggaaaagatggaaggaagtactatatccagcaatggtacattaggagcagcatctaatgtttttgaatctagagcaccagaaggtaagaagctggatgagaggataatatttgatgcactaaagctaagcagtgatgtgcagaagtcagcacctgtgccacccagaaggcggccaaatgcagaacgcaaagacaatgttaacaggagatcgtggaagtccttcatgccacccaacttcccagaatttgcagagaggatagaagcttctctcagtgaggtttcagaagctggtgcttcaaatccttccttgcaagagaagaaggagtccagttctgcattaacagaaagttctggtcatttggaccacagggaacctcagtcagagtcagtaactctggaacatgtgtccaaatccataggtattccagaggtgcaagattttaaaaacttaagtggagactgccaggactttagatttcagcagcacagtgcaaaccctcctcatgaattccagcctgtagaatcagaagctgtagcaacaagtggtaacacagatgtaatgcaggaatccagattctcaagtgcaacctggccgagggccacaaaaagtttagctaagggaggcttcagtgagaagcagcacccccttggggacacagcctgcactgtggaaatgccacctctctccccttgcctgagtgaagagctgttagatccagaattgcatgttctcataacccccagcctgagagagaaaacagagtctgagctaaagtttgaggaggatgagcgatggattatgatggaggctgagggagagtgggaggaagagaaactgtcagacagggaaaagacttttctgatggcagatgagaagaacagcctggcagatatttttgaagaaagagaacaagcaaacacagcagtggtggaggatggatccgattgcttagctgctgtcttgaggacttttggccacctatctcttggtcagatttgttgccctgatgacccacagccagccaaggaccagttggctactgttcccaaggatatacccctggattgcgattgtgttcttacaggtgaggatattctcggtgaggtggcaaacagaactgctcaggggttagagggacttgtttcagattcagcatgtactgtgggtactattgatgcagaacagctctctgacacagactcagtgcagatgtttcttgaacttgaaaaggagtgtttatgtgaagaaggagtaactcctctagttgagctacagaatcaaatctcttctgaagggctggctgcatcccaggatgcagaaaatttactcgtaattagtcatttttcaggggctgccttagaaaaggaacagcatttaggccttttacatgtaagggcaaaagattatgatactagattggattgtggatattttaataccctggattcttctcaggtgcctaatgctgtggaacttattgcccacgttgatatcatgagagacacttccactgttagcaaggaggaatgtgaaaaagtgccttttagccccaggactgcagaatttaagtccagacagccagctgatctggattcactggaaaagctggacccaggaggactgctgaactctgatcacagggtttctcatgaagaaaaattatcaggcttcattgcttctgagctggccaaagacaatggcagtttgtcccagggagactgcagtcaaactgaggggaatggtgaggagtgcattgagagggtcaccttcagttttgcttttaatcatgaactaacagatgttacctcaggacctgaagtagaggtgttatatgaatcaaatttactaacagatgaaattcatttggaaagtgggaatgtaactgttaatcaagaaaataacagtctgacatcaatgggaaatgtggtcacttgtgaattgtctgtggagaaagtttgtgatgaggatggtgaggcaaaagagctggattatcaagccacacttttggaggatcaagctccagcacatttccacagaaacttcccagagcaggtcttccaggatctccagaggaagtccccagagtcagagattctgagtctgcacctgctggttgaagaactgagacttaatccagatggagtggaaactgtgaatgatacaaagcctgagctgaatgtggcatcatcagagggaggggagatggaaaggagagattcagattcattcctaaatatttttccagagaaacaagttaccaaggctggtaatactgaaccagttttagaggaatggatacccgtcctccagagaccttcccggactgctgcagtacccactgtcaaagatgccctakatgctgcactgcccagcccagaggagggtacctcaattgctgcagtgcctgccccagagggaactgctgtagttgctgctttagtgccctttccacatgaggacatcctagttgcttcaatagtctccttagaggaggaggatgtcacagctgctgcagtatcagccccagagagggctactgtcccagctgttacagtatctgtccctgaagggactgctgcagttgctgcagtgtcctccccagaggagactgctccagctgttgcagcagccatcacacaggagggtatgtcagctgtcgcagggttctccccagagtgggctgctttagctrttacagtacccatcacagaggaggatggtacaccagaagggcctgtcaccccagctaccacagtgcatgctccagaggagcctgatactgcagctgtcagagtgtccaccccagaggagcccgcctccccagctgctgcagtgcccaccccagaggagcccrcctccccagctgctgcagtgcccaccccagaggagcccacctccccagctgctgcagtgcccmccccagaggagcccacctccccagctgctgcagtgcccaccccagaggagcccacctccccagctgctgcagtgcccaccccagaggagcccacctccccagctgctgcagtgcccaccccagaggagcccacctccccagctgctgcagtgcccaccccagaggagcccacctccccagctgctgcagtgcccaccccagaggagcccrcctccccagctgctgcagtgcccaccccagaggagcccgcctccccagctgctgcagtgcccaccccagaggagcccgcctccccagctgctgcagtgcccaccccagaggagccygcctycccagctsctgcagtgcccaccccagaggaatccgcctccgcagctgttgcagtgcccacccccgaggaatctgcctccccagctgctgcagtgcccaccccagcagaatctgcctcctttgcagctgtggtggccaccctggagraacccacttccccggcagcttcagtgcccacccctgcagctatggtggccaccctagaggaattcacttccccggcagcttcagtgcccacctctgaggagcctgcctccctagcagctgcagtgtccaacccagaggagcccacctccccagcagcagcagtgcccaccctagaggaacccacctcctcagcagctgcagtgctcaccccagaggaactcagttccccagcagcttcagtgcccacccccgaggagcctgcctccccagcagctgcagtgtccaacctagaggagcccgcctccccagcagcagcagtgcccaccccagaggtggctgccatccctgctgcttcagtgcccaccccagaggtgcctgccatcccagctgctgcagtgcctcctatggaggaagtttcccccattggtgtgcccttcctgggagtttctgcccacactgactcagtgcctatttcagaagaaggaacacctgttctagaggaggcttcctccactggaatgtggatcaaggaggaccttgattccctagtatttggcataaaagaggtgaccagcacagtgctacatgggaaagtgcctctggctgcaaccgctggattaaattcagatgaggtaattgtccattttgattctgggaagggtctaaagagtaaagtgagatttgcagggctgacctggtggtgatgagaaatggcacagatagttcttttgttctttttgggtctcccgggcttatrgtttgtagtctttctgttcagtttttggggaaaatatactttaaktttgtctggtgaaagactttataatttcatgcttcgttttttattcagataagccaatcccacggaaaacagggatataaacagttgttgatttacatttttaaaaagattattagcaggaaagggtcattctgtttttgaattatacagtgagcatgttcttgcctaaaccaagagacagtttattcattggtggtgtcaacatttaggtagaggccagagtgtgagctttggaatgagacctggggtgcttcctaaccactctgggaaaattagttagctattcttgagtttcctgtttcttcatttgttaaggcataactctgtgaggataaaatgagatacatttaaggtaccaagcgtataagattaccaatcactggccatatcctccccattcttttcaaataggtatgttggttggttgaaagaatttaccaaagtarattggagagaagcaataaagctaaatgattaagaacttttaaatgcaaatatgtgtttctgaaaaccagagctaggcataatgtttatgaaaaatagagatattttagtcatctttgtcaaactgcctttgtgtccttaagcaagtcattttcctttccaggacctcatttcttcattataaaacaagaaaattgggctaaatgtcctcttgggtctctcttggctctaagattctttttattttttttttttagatggagtctggctctgtcastcaggctggagtgctagagtgcagtggtgcgatctcagctcactgcaagctccacctcccgggttcacgccattctcctgcctcagcctcccgagtagctgggactacaggcgcccgccactacgcccggcaattttttgtatatatatatatataattttttttttttttttttagtagagacgggtttcactgtgttagccaggatggtctcaatctcctgacctcatgatctgcccgcctcggcctcccagagtgctgggattacaggcgtgagccaccgcgcccagccggctctaagattcttaatgttagagaaccgaatgtgttaggaaacagttggaaacgatgttccacatccttgagcactcctagtccaaggaatttgagatcagcagctttccacagttaattacccaggtttgatttggtcagtggtaaagagtgcaggagttagaggtttaatctgaacacaagagatgactgagtgagaagattgttttgattttactgcgcccctaggactcaaaatagtgccttcttcatagcaggcatttgctgttgactgactgactgaatgcatgaatatcaatttcctagactatggatggatgctacaagaaagatgggttttctcattcacctcactgcagagcctttcagggcagccttaagtcagctagagcaccagctaaacatgcaggtcctgacaacaaaatcattttgattgcatgccataaactctttgattaagaggattgattaagataatctggccttgctgagtggtggtggttttaccttgagctttaccagttattttgtcaggtagcattccattaaattaggatgcatcatctttgagactgatggatttttgattcatttttccgagttttattgaatttggaatgacaccgagatcccaatagcctgtacaaagtgaagacagtaggtcaasaacagagccattcttgataatacagaatatttcacaccaggcacagtggctcacacctctaatcccaacatttgggaagccaagggaagaggattgcttgaggccaggagttcgagaacagcctaggcaacatagtaagaccccatctctgagaaaataaaaagaaaaaaaaaaamacagaatatctccagtataaagcttayatagcagtaatcatgaaatataaggattaaatttatagtgaggcaatcaaatctgcataaaggggaaaaagtcatagaaatcctgtatcagtctctggaatccttgtttcctcatctgcaaaatgagtagatggctacataatctctaactatccttccagctacaggaggtaatccttttatgaaatattgcctgatgtaaatgacaggagaaggaaatggtagcccagctgcaaagttgtccatctttgaagtgtggttactttgtggaatatctggaagtgagcaaatgcctatatctgtgtacaggaaaggatagatctgagcctcagccaggactgttaaccagcaagaatgtagagaggccattttgaaaatattgaaacaaaacaaatcattatagagttaacatgagtatacaggtttgctaaattggtgaaatattattttaaaaggtttttccaagatgagaggttaattttttatttcttccattcccttaggattccaagaggcaactgaacctgccatttttatatataaatacttagaactcaacaagtgatttagcatgaactgaggtcctctatgtctgtatgtatatgtgcaagtgcagacatggatacatggttaaaatagatataaactttgtaattgcaataacaacagagtttggtagaactaaaatgccaaaaactcgtttgctttttctgtaatgggatctgaggcctactgagaccaatctctggttatgtaaattccctgcttatttatagacctcttcagtcttaatcccagccactggttcaaaggaagaaaaaaaccttttgtataaaataagggttctataagattacaatttgccaagggagtctttttaagcaaaaattggagagcaccacaattccagttcagtgtttgaacgctctgctgatcggcagaatcttcattggttttttgcattccctaacaccgtttgtgtacaaggattcattcattcatggaacaaaaaaaagtttttgtttttttttttagacagagtctcactctgttgcccaggctggagtacagtggcacaatcttggctcactgcagcctctacctcccgggttcaagcaattctcctgccccagcctccgaagtagttgggattacaggaatgtgccmccacacccagttaatttttttttttttttttttttttttttttttggatttttagtagagacagggtttcactgtgttggccaggctggtctcgaactcctgacctcaggtgatccgcctgcctcggcgtcccaaagtgctgggattacaggcatgagccaccacacccggcctgagtaaatattatgagtacctactctgtgccaggtactaggctcctgcagtaaatagaattgacatggtccttggccttgtggaacttatactgagtggaggaggcagatattaagaaaaccacacataaataaatataaaataaatacatagttagaaattttggcaaattctttgaataaaatgatgtcaatggatttgaagacaatagggtggattgaagatatattttggaggtaaaatcaacaagatctgattgtggcttctgtgttggggctgagggagttatcaagggtgacttttaggttctggtttgtacagtggagtggatagtataaattattgatttaaggaagaggtaagggaaagtgggagacactgtttcatttttgaactgttaggcttgggatgcctgtggttcatttttttgcatggagatattaaaaaagcagttggatacgtagctttgaaactcagagagacaaattgagagtcataagcatttattgtggttagtatttaaacccacagaaattgatggaattgcctaggaagaatatagaaagagaagagagtccaggactgacgtcgttctctcactcccacccccaaagatcatttagagatctagaagaggagaaagaaaacaaaggacaacagaaaagaatcagtcaggataaaactggaaaaatgcaataacaaggctggatgccgtggctcatgcctgtaatcctagcactttggaaggctcaggcaggcagatcacttgaggtcaggagttcaagaccagcctggccaacatggtgaaaccctgtctctaccaaaaaatacaaaattagctgggtgtggtggcgcatgcctgtagtccccgttacttgagagrctgaggtgagagaatcacttgaacctgggaggcagaggttgcagtgagctgagattatgtcactgcactccagcctgggcaacagtgtgagaccctgtctcaaaaaaaaaaaaatgcagtaacaaagataaaagtgttttaaggagttctttgggaaattttctattttgtgtcctagttgcatcttacaaccttgcaacaatttttactagtgtacttctttggaaaatgtctgccagtactgcttagttaataacatgacacagtcctatttcactaacagtgtgtgaaatactaaggagtaggaattttagtgtatctaaaagcactggttttgcaaaacagctttatttgggagttgacagaaggaagcaggtgttttcaaatgtacgttctttaacgttctgttcacttttattcaaaatagataatatttagaggtgctttcatatatgttttaacttatgagaaatgatacaaatacccattgtccctgtcaatccatagagtgaaggtgagaaatgaaggaatagctaatgcttctataggaaatgtttgtaaacaaagtaaatccaaaagtttaaagttgcagtagctcttattatagattgaacatccaaaatgcaaaatgctcccaagtctgaaactttctgaatgctggcatgatgctcaaaagaaatgctcattggagcatttcagatttcagattttcagatttgggatgctcaaccggtaagtatttaatgtagatattccaaaattttaataaatctgaaatcagaaacacttctgttcccaagcattttggataagggatattcagcttgtatatgaaagagattattgaactatttaaatataattttacttttctttctttctttttttgagatggagtttctctcttgttgcccaggctggagtgcagtggcatgatctcggctcactgaaacctccacctcccgggttcaagcaattcttgtgcctcagcctcccaagtagctgggactacaggcgtgcgccaccatgcctggctagtgtgtgtgtgtgtgtgtgtgtgtgtgtgtgtgtgtgtgtgtgtatttttagtagagacgaggtttcgcctgttgcccaggctggtctcaaactcctgagctctggcaatctgtctgccttggcctcccaaagtgccaggattacaggcatgagccacttgcctagcctattttacttttctgtgtcatttaaagtgctgtccagtaggacttgctgccaagatggatttgttctctatcaatagtccagtagagtaaccactggccatatgtggctttgactatgtgaaacgtggctagtgggtctgaggaactggattttaaatttaatttaaatgtcaatagctatatgtagctgctggctgtcatgttggaaagcacagaaagaatttaaatgtcagttgtagagtgagataggatttggttattgagtaaaagagggccctgtaatgtggacttgacatcttccctccataccttggctttctgccttctttgccttttcawtccttcaccttcaccaccaccattttattgtaccaaaagcagctttaaacttgggatgtttttcctgcctctatctgatttttcttcagcagaaacatctttaatgctacaaaatggaattatagcagttgttttttctgggaaccatgttgttggagaaatagtcattttaactgaactgctttgtaatgttgcctaagaaaatatggtataatcaaattatagtaaaaaaatgaagtgcactcataattacttttataaccttcctttttcagtgttccctggggctttccctccctggtaatcttagccagccatagaccattctttctagaatcagtttcctaatcctagtgtggtctgtagtctcatattgaccaaaattggtcttactcaaacttatcattttcttttatatttatttttgtcctcttccattttctgtcatcctctggccttaattgactcacctggctcatggaagaaaaaggaagggaaataaatccaggctagtgaaatatagctggttctatccctctgataactgagagaaacccaatttttttttttttttttttgagatggagtcttgctctgttgcccaggctggagtgcagtggctcagtctcggctcactgcaagctctacctcccgggttcactccattctcctgcctcagcctcccgagtagctgggactacaggtgcccgccaccatgcccgtctaattttttgtatttttagtagagacagggtttcaccatgttagtcaggatggtctcaatctcctgacctcrtgatttgcccgcctcggcctcccaaagtgctgggattacaggcgtgagccacygtgcccggccacttcatactcttaatgtggcagaagtaccattctcttctgacccttttttccttttagacatgtctaaatcgtaatggagcttaactgtagtagagcaaaatrtacacgttgcttgttacacctattcacattgttttaaaattctgttgcaccatggtaaacgtggataatacagtatcatttttgagcagttttttaaatgtaaatctgtatcttactcagagtgtgtgtctgaagttattaaggacatttcccaacgttactggcccatttccctttgtaatcagaggaattctgtttcaagattattgttgtgtgtgatctgtggctcttgatcagaatgaagttaaatggccacaggaggattaagctatgaggttggcatttttcacactgttaatatgttttgactaattgagttattagtcttagtcagagaagagcatttcttattagtggtcagttaaggctattccccaagggatattccatcttaaatactagtcatttggtattattctattcttctcttttaggattcatatacattgcgcttacttgtacagcatttcgaggttgatgcttttctattctccatggctttttgcattaaaaattaagcaacaggccgggcgcggtggctcacgcctgtaatcccagcgctttgggaggccgaggagggcggatcacgaggtcaggagatcgagaccatcctggctaacacggtgaaaccctgtctccactaaaaatgcaaaaaaattagctgggcatggtggcgggcgtctgtagtcccagctgctcagaagactgaggcaggagaatggcatgaacccgagaggcggagcttgcagtgagccgagatcacgccactgcactccagcctgggcgacagagcgagactctgtctccaaaaaaaacaaaaaaaaattaagcaacagattttaaaaaaaagaacaaaggaaagagtcattgggttaaagacctaagtagtgtcataactctctgtaattacatgtccataggagaatgtattgaaatacaaaaccacatgttttcttgatgcttcacgtgcaaatgcttgttctttctttttattcctggtcgtctttcattaagtcataaatgccccaagaataaccagtctctgygtggtatagagagtctaatagcctttgtattaaatcttctttggcttgtaattatctagatgtttcagaaagaacaagtggatcctcttcagatgaaattgcagcaggtgaatggacttggccagggattaattcagagtgcaggaaaagactgtgatgtacagggtttagaacatgacatggaagagatcaatgctcgatggaatacattgaataaaaaggtgagtgacaatggggtagcaagtgtactggaaacggaaggcatagaaaagagacatctgaatctaaggtttcccgaaacctgaatggaaataaaaatttagcagttgcaatctataattactaaaagaggtcagtagtaatttgaaaactactttctcygttctcataatgaacctacatgttcatgatacaggtcgcacaaagaattgcacagctacaggaagctttgttgcattgtgggaagtttcaagatgccttggagccattgctcagctggttggcagataccgaggagctcatagccaatcagaaacctccatctgctgagtataaagtggtgaaagcacagatccaagaacagaaggtaagtgagaatgttgggacagtgaactgtaacagccgtagggagtagtagacaacacatttgcttatagtttaagaagcagttcaggagttttagtagaatcctaaactactttgtgtcgtcctgaaaagaaaggtggaaattgattttcattatcttacttaaatctggtttactgtggcatatattagactgaataattttacctgttcatgtatcctatttcagtgttcatctacaattttgtgttaagaggtttttggtgttttcagggtcagcaatattctaaatagtgttgtatatcatgtacaaagttttatctatattttttgttggtttaatttctattttagtgcagttttttctttttaaaaaaaatttatcccaaaggaaattttatttttttctcagctttattggtatatagttgacaaataaaaattgtatatgtttggctgggtgtggtggttcacgcctgtaatcccagcactttgggaggccgaggcaggcggatcacaaggtcaggagatcgagaccatcctggctaacacggtgaaaccccatctctactaaaaatacaaaaaattagccgggcatggtggtgggcgcctgtagtcccagctactcgggaggctgaggcagaagaatggtgtgaacctgggaggcggagcttgcagtgagccgagatcgagccagtgcactccagcctgggagacagagcgagactctgtctcaaaaaaaaaaaaaaaaaatgtttataatatacaatgtgatggtttgatatacatatacgttgtgaaatgtttaccgtagtcaagataattaacatattcatcacttcaaatgttaaccattttttacggcacttttctcttggttcaaaggaagttccctgttagtcacataatgacagtcactgctccatttaaaaatttaagtgtgtgaaaagtatacgagtggtgagaactgtgctatatctcctgtttttgccccaaggatgaaaaaaacttcttttactcaatgaagcttaggatttggcgggttggtttcttttgttttttttctttcttcctagttcagatttcaaaatgatcctgtgttacarcttttcattctctttataatagttgctccagcggctcctagatgatcgaaaggccacagtagacatgcttcaagcagaaggaggcagaatagcccagtcagcagagctggctgatagagagaaaatcactggacagctggagagtcttgaaagtagatggactgaactactcagtaaggcagcagccaggtaagatcaaaggaattttgaggagtgggtcagaggtttgttttgttcttcttcgacttattatcactataagttcttggatgattcatatagatttttggaaggtgtttaatggcttttatttgaaatgggataagattttagagatgatcctcataatcagaatcacactcaggaaatggtctccagcatcttcataaatttccgagagctggaaaactcattgctctgtgtggttgttctgctgtagtataatcatagttccaaatgacagacacagactcctacagtccagccgagttattttctgagtttttcaaacagatttccccctcttatatttataaataatgcttttgatacttggaattgaaatgtgtcatatttcttttctattagcttatagtaatattagatttttttgcctttaggagctagtctgtggttctgttaaatatctgggaattcaagagatgcatgaacttacctcaataaatggtcaaaaagacaggcaacaaatcctccttcaaggaaatattccctttctcttttcatagctataagttatcctgtgacttgagcttaataagtcacatagatgtctttacttttatacagtcctcagttttaaaattaaataccagctaatgagaaatcaataagagagctgatcatttgttattgtatcctttacatttcctaggtagcctatggcagtcttcaaataattccctcttcagtctttttatgtccacctgcccatgacttggcttattccttacctgagttgcaaagtatggcttgcctatgttagtggaagaaacaaaatggaaagaatttaacttacttgtatttccagatttgtactgcttattttcttttctctctgtccatttccagtaatggtaccattagctttccagtttcctaggcttaaaacctcgactccatttttacttttctttttttaatttctcctttgtgcccacatcgatcagcatgctaaattctgtctattttactttacagtgtctttcctgtccatctgtttctctaattcccactctcccctcagttcatgacttacgagctctcactaggtgtatagagatagcttcttcactaatcactctaccactaaccctggggccttccccttcccatcccccagctgcagatgaacctttctgaaataagcctttaatcatatcttttcaagctcagagatatttaattgactccctgttagaataaaacctttagattatgaggctgacacactgcctgccgtgctaagaaggtgcttaaaataaaatataaactctttaacacaccattcaaagccctctatttgaccctaacctacctttcttagcttctactattcttctcactccttaatattatagctgaagtaaactatattctgttctttaatatcttctgacaatgtcctaaccctgtgtcttattttatgggttataatacatctttcatgaaatgcttttgtccagctctctctcttctataaaacttacctttattcctcaatcatggaataatttttcctgcctcttcactgccataactctttatctgtaccttgtattatgatcattattttatgtacttaccttcctggtccataaactccttaaagtcatggtttgtttatctaatgcatatttttatgactctttccttctactttacttgtttccatcctcctagcctaatatagtttctgggccaatattttaaatagaaacaaataacaagagtagatatttgatgcttctaaattatttttagctcttctccctaaaaatacctttaatcttattacaataaattcttcaaattttcagattccaaaatcaaatgagtaagaaagacataaaaattagaggcaatttttaaaaaatgaaattcaaatttaataataatttttaatattgtatgttttagttgcattacttgaagatatattttgaaggctggcataaacaaactaggaaagaaagttttagacttagattgccacttaaaaaatatgtttttctttatattcaaacataattgaatttccagtaatcaaaatgccaactttttttatttaaaccacttcttattaaaataactttgtcagggcataactagcataggacctggcgtaaattaggtcttcagtaaaggtttgctgaacttaagtgcatcatatactcccaggcctcttcaaatgccatatcttagtctgtttttagtaattcaaagacaacattatgacctttcattattaatctgcatgctaatacagttctgtggttgttttcttgtctgttccttgtcaggctatctccaatatccagacttcctcctcactttgtaatttgctgcttttattttatagagtaaaacaaaccacaggtactttggaaagtacatctcttagcacttctctggtctcagtgacagtcatgtatcccaggaaaagccaagcttagttatggatcttatattaaataagagttaagattccaagtgagctataaagtctgtagttttttttgtttggtttttttttggggggggtgctttttgtgttggcaaattcagccagcgtgaggttttttgtttgtttcttttttgtttttttgccttaaatctggattcaaagttatgttctggggcttgaaattaccagaagcctgactggattttggggagttggggagggagttctagttcataggcaatatacagtctttactcttcagatatcttcactcataaatgaaggtagtagtgacagagagaatgaaaacagacaactttttgcctcctttaaaccttattttggtcagatgttcaggtgatatatatactacattctgttttgatttgtgtyaaataaggagaacattagaagatttgattctactgttgctactcaccaggtgattggacaaatctttctttaagccttctgactgaactttctcttttataatagggggataattattcttttataatgggggataattattctgtccaccttacaaggttatgacagaatgagaataaggttaatggtgtgaaatcctttaaaacatcgaaatgctacataacgtgtgttctgtttactattggtatttaaactatacctggaaaagactattcttttactgagtatagtactattaccagttttaatgtgacttttyttcctgagcagcttgttctatatatttgtgtaggcaaaaacagctggaagacatcctggttctggccaaacagttccatgagacagctgagcctatttctgacttcttatctgtcacagagaaaaagctkgctaactcagaacctgttggcactcagactgccaaaatacagcagcagatcattcggcacaaggtagggagtggttacagtaaatgaaaatagaaaactggaattagaaatcctagaaatgagtaaactgcctgcagcattctagaggatgtgtgttttgtgggtttaacttaaaatatggtcagattattaattggaaaagtcacattcttgaaatacaaatagaaattgactgataggctaccaccggaataaacagcttttgttcccaatttttatattatttttgcctttcagtcggtgagttttttaattgtttaatttgttgtatcatttgttattcatcattttgtgtttacttttcatttattttgtttctgttattcattttttccatctggatttccaggctctggaagaagacatagaaaaccatgcaacagatgtgcaccaggcagtcaaaattgggcagtccctctcctccctgacatctcctgcagaacagggtgtgctgtcagaaaagatagactcattgcaggcccgatacagtgaaattcaagaccgctgttgtcggaaggcagccctacttgaccaagctctgtctaatgctaggctgtttggggaggatgaggtggaggtgctcaactggctggctgaggttgaggacaagctcagttcagtgttcgtaaaggatttcaaacaggatgtcctgcacaggcagcatgctgaccacctggtattcatgtttccatttttattggttatgttattctgttattttgttattttgattcatgtttctcttcatttatttttttttcttcattacaaacacttcaactttattttatacacaagtgcatagttagtggacttgatgctgactgctaatctgtttttggatgagtccatggaaatacttatatttaacaagttaaatcagtaattctagaagatggtacagggtatatagtcaggggccatctgaactccaactcatgatttacattattaggtgatgggtcactaagattctatttgagcagttttatgaaagataatgtgctttaacaaaaccagatctatctgtgtagtgcccaggatttgatcatacagttaaaaaacttttaggatatttctggatttgttcaaattccggggattctgtgtcatcttaatagaagagtttgcctttttcatttcatttttatgaaatctgtttgggagagtaaaaataggtaatttttctaatagtctgattcttttgcttcgtcaactttaaatatgaagagagtttttaaccaggattctgatttaagtcagtctgttcttactgaatttcttctcttgaactttctgtttattccttattttggacacagtagacaattttgctcaatttcacttctgcctttcttgggttcaggtttggtaccaataattggtaaagctgatgtaattctaagtttttctcatccagcgcataggaaagcttgcctataggtatctgatttaattattttgaatagtcaatgggctaaccaaggagaagatgaggggatcaaatatctgatrtttaaattaaacyagtattcatctctttactttaaatttgrtctcttaaaggtctcgcattttgtttcatttgtagtgccacagtttcaggattaatggtattctttcctttcaggctttaaatgaagaaattgttaatagaaagaagaatgtagatcaagctattaaaaatggtcaggctcttctaaaacaaaccacaggtactttgaaaagtgtgtctcttagcacccctatggtctcaaagacaattatgtacccaaggaaaggagttccctgccttagcctcttctttatgtatatatgagaagcttagtattcactgattgtattccctactgtgctccagaaggttgtttcctgctaaatcttttgaaaactaagttatctcacatctggttatagatgatgatttctcctctccttcagtatcttgaatgccaacatgcactgaaaggtgctggaaacatctagaaacacttgacrctgaactcagattttaataattcagaagtggcttcttttatccagtggaaagtttattttatttcccatttgcccttagtatgggataggtgaaatcattaccacagagagagagagagcgtctatgaaattaaagctctgatttgaagaaaggggatcagagactcctcattcctagrtctcttaaatatgagtaattgtgtgctatcttccataggtgaggaggtgttacttatccaggaaaaactagatggtataaagactcgttacgcagacatcacagttactagctccaaggccctcagaactttagagcaagcccggcagctggccaccaagttccagtctacttatgaggaactgaccgggtggctgagggaggtggaggaggagctggcaaccagtggaggacagtctcccacaggggaacagataccccagtttcagcagagacagaaggtgagctgttactttaccataaaaagaaaaaaaggcttcctctttgtcagaatccttaagttttatcaacctttaccttaaatataaactaaaaatatgtgccccctttcttgtttactcatggacagtaagatttgacataaagacatatacgttacacatatgttatgaagaagaaagaagttgaatcaagtttactttgtaacattttaacctctattatttattctctaaagagtgcttcatggttttatttgatttctctgcaggatctagtatagttctagatgcatagaaatattgtataggtacttgttaggttaaatactgagcctttggttaaagcattatttatcatttctgttgaagtaaggagatgaaagaagtattagttgttttacccagagacaatgtggctcaaaaagtcttacaggcagttctaagcaagcaacaatgaagtctaaagtcaggcttcagaatgattgaaaaatctgagatgagaaaaaaataactgaaggaaggaggtcagagtcctgctgggatgtgtggtagagatagcaatttccacccagcacagttgctgatgtgctttatttagcaaggtatggcctgaaaactcttttccctccttaggaattaaagaaggaggtcatggagcacaggctggtgttggacacagtgaatgaggtgagccgtgctstcttagagctggtgccctggagagccagagaagggctggataaacttgtgtccgatgctaacgagcagtacaaactagtcagtgacactattggacaaagggtggatgaaattgatgctgctattcagagatcacaacaggtaatgcttataatacctctgcattaatattttagacagtattgatgtgtgagatacagtactatgacccacataaatacagactcagaaataagaatgggctcaagctaaatctggtggaataaatatgtttcattgatgggaaatgattgggtagaagtttgtgaggatggatccagaatttgaccaaaatacttgacccctttgagtagagaagtacttggagaagagtctacatgaggccttttcttagctaatgccmtgctaagaaggctgatggtgatgggagtagataatatctagattcaaaaggtccaaatgcaccacaatcttagtttgacataattaactctcttagcattagatggaagagggggaaggaattactatcaaatatgcaaaccaaaatagcagagctatctaaaatagaaccttctcagtaaacacaggtgtcatatttcccttgatcttttttccttcctactttctggaaaaaaatcatttgttcttttgtgtagctggatacacacctcttaatgtgccgtagtacaaaaaataagttaatataactccttaggatcatagtgatgaacatatgctttttgaatcacacagaaatttgctctgagtccaggtatatccccagtgtgtctttagagttatcccttatcttggccagatatttcaataygaaatgtattgtgcttgggagaagcgtatttttaaatgtaagtgtatattggccaagttgaagaggaagagataaaagactggagaggtcaggcataggagactgggctcacacctgtagtcccagcactttgggaggctaaggcaggagaatcccttgaggccaagagttcaagaccagcctgggcaacataacaagacacaatctctacagaaatatttaaaaattagccgatcatggtggcaattgcctgtgtagtcctagctattagagaggctgaggtgaaaggatcactcgcgcctaggagttagagcctgcagtgagctatgattgtgctactgcactccagcctgggcaacagaatcagaccctgtctctgagggggcagggaaggatggaggattggggagccctcatgaaactaacagtcacgtagaacatgttcttggttttcgttattacataaccatttaaaaatgtgttgttcttttggggtcttatgctgcttcagctaagcgggcacttccgagttaacttgactcatccgtctactgccatattaggtttatatttaaacatctgactaaacctactactgttccatgtctgggtaggaaagagcaatggcaggaagagtgtagtctcataaaaacactgattagaggcatctttcttttgaaggggattgatatctgttatttctagctgtagaaactgagttctgtaacttactttaaagaaattgaaatgtggtcagttttaacttgtttgcatcttgatttgtgattttatgaaattcttcccagttttgactctactttgtgagatataaactgtattactgaaaatccaggccttgctttgttgaataaattgcagttatgtggagacttggctgtatataatttgtttatttttctttaatacgtctattagtatgagcaagctgccgatgcagaactagcttgggttgctgaaacaaaacggaaactgatggctctgggtccaattcgcctggaacaggaccagaccacagctcagcttcaggtacagaaggtacgtgcccactctttcctgagctaatagaatcatcagtaacttagagtgactaggagagtttctgactatcccatgtcaagtggaataatttagtggcatgatggtaaatagaaattaattttctatgtatttggttgagatgaggaagaatttttttttttgctttgtgagaaaggaaaaataggcccattaatccataattagcaatttccttgatagaaatttttgtaagctactaaaaagataagctagagaagatgttggataggcaaagtgtcaaactgtataagaacaatttttgatgtggctttttcrtagattttgtcttaacctttagtaataacaggaaaagggtctttttacttcttaactacagtttacttttcaaaggctttctccattgacattattcgacacaaagattcaatggatgaactcttcagtcaccgtagtgaaatctttggcacatgtggggaggagcaaaaaactgtattacaggtgaattacatttatttatttgccatattgttcctgtttttatcatggtgaattagaagcacaattgtgaaatgatggkttaaggctttttccctcctggacttttcttatgattgttattaaagtccagcttgatgttctggggaattcagaatcttaaccctgtgtccacaaatgtttaaaacagccatcctatataatgtgaaatatattgcaaatccatcttctttataacaggggaattgctacttatcctcactccacagggagcaagctttgagttacttttcaaggtatttatggtagatttttttcagaaccatatgcagatattaattccttcattatakccttctaaaaggtcgtacctagttttaaaaggattggtcaagatggtttgtagacaagttttttcatttcgttttgttttgtttcataaaggatatgtttaagcacagtttcctcagaaatattcataaactgactgarctactcatcctaaacatttgaagcataaatggcaggtttctggagacttttttttaatcagaagaaaaatgacaggcaaaacttgataggcaaagattccatcgtagccccttagatgttcagttttaaactgatccattataatggtatattggccaggcacggtggctcacgcctgtaatcccagcacattgggaggccaaggtgggcagattacctgaggtcaggagttcgagaccagcctggccaacatggagaaaccctgtctctactaaaaatacaaaaattagctggatgtggcagtgggaacctgtaatcccagctacttgggaagctgaggcaggagaatcccttgaacccaggaggcggaggttacagtgagctgagatcgcgccagtgcactccagcctaggtgacagagtgagactctgtctcaaaaacatatataataataataatgctatatctaaggttgtgtatcattactgaaaggttaattttgctgtgtttttcttatactattttactgctttttaaacttttatcttttaaaaattatagaaataaaatatatgtatgataggaaaattagaaaatttcagataagtatgaagaagaaaataaaaatcacttgtaatctttactgatattttaaaataatttagttatgtattcttttagactttttaatgtatatatacctactttttttcttaagagtttataatagtaatacttatcctttttttttttttttttgctcacataggaaaagacagagtctctaatacagcaatatgaagccattagcctactcaattcagagcgttatgcccgcctagagcgggcccaggtcttagtaaaccagttttgggaaacttatgaagagctcagcccctggattgaggaaactygggcactaatagcacagttaccctctccagccattgatcatgagcagctcaggcagcaacaagaggaaatgagggtaaggagcatgccaagtttcattttattgttctaaaatggtctctataatttatttaaaaacaacatttgttagtgtctataggtgcaagttctgtgttacgaagttaattcttaatcagttagaattcctttcataatacataatctgaattatttccttggttgtttaatatcaattgattaaacactaagattatagagatgtcgagaaccttagaatgacagaactaaagaaagaactcactaaaaatcaatggaatttaaaatatttccggggataatagggtgttgttacactcaaggtatggttggacagtactttctacttagttaggcaccaactggagtgaaagccatgaggtaatgtcaaaaaacatttgctctgtatagttaatgacacttcaaaatgtttatttctggtttatggcttgtgcttattgctattcttataagtggaagtgtataaactggacgtagtcagcagtaaagtcaaggagtggttggattgccaaaaatgttgctattcatagcttatccagcttggtatctcagtctggggaggtagacaattattaaaccatgtagagtaaaatagagtacatagaagtacttatgattacagaagagtgtggagtagacttgtatgacacasctggtaggggaagagaagagaggatgtttccaggaaggctgctagggtgatgagacatcagaactgactttcaaaaattaaattgggtaatgtcagaacctaagacttaggtgtttttctgttcccacacaaatggtgagatgctgggccttgctggtttttaacaattttgtttgttcctcttaaagttgatattagctctgatcaaagtatctaaatacataaactggtataaaagtactcattatggtttaattctttttttacctagcaattaagggaatctattgctgaacacaaacctcatattgacaaactactaaagataggcccacaactaaaggaattaaaccctgaggaaggggaaatggtggaagaaaaataccagaaagcagaaaacatgtatgcccaaataaaggaggaggtgcgccagcgagccctggctctggatgaagccgtgtcccagtccacacaggtatgtgtgtgtctgacactcataaccttgaattgtctactgttctaaacaagaggtctctgtatcaggtatgtctctgtgctcaggaatgtccagagcagcatgttaatacgtgatcggtagatagaacagaaagcttagcctatcttcatttttattccaaggaacattggcatactgacattctaaggagagtgaaatgagtcttggctggtatatattgtctgttgatggtttctctgaaaactttatgttgtgatgatcctttagcagatgattttggataaatttaccttgcagattcaaaagcagtgactgcctcaaaaaagtacttattgaacctgttacttttttgctttagagcaacagcacattagttttcttaagcaaccagctaactcatagtttaagatgcttgagtaaggagtagtaagagccaaagagaagcataaaccagcagagggatttaaagcatgtaactacatactttcaactaatatattactcttagtggtactgttgtcatgtctgggtattttattcctatgtttagtcaatattcttggttaatatttgtacttactcaagtttctccccccaccttccgtcccatctctcactcacattgtggaatgtgttactttgtgttgttgctgcctgctcctgtcttccccacatcgtcacatttcattgttgtgttgaccgcgcccaccattacagattacagaggtaaggtacccatccccattgggactagggtgttcttataatgctgaaaattgaggtcattacctgtaagggaatttcccttaactttagtggaataaatttaattagtgcagtttattatgccagtttcatttggggtggaacctagaagtgagagagtgatgggaagtgatgttgttaaggaatcccaccatgttttttctataggacacttgaaattgataagcctttctttaactaaaaccagagttggtttgagatagatttttcttaggaggcatgcttatctgttttgctcttttctctcctctctgcatcaaattttaatgagaacttttcagttgtagtcatgttattcaaagtaacagaaaagtgggaaggtaataattcttcaagaataaggttagatttggtcttccttaattacctttcattattccaacgttttttctctcttattgttccataaggtgggtcgttaaactgcatgccatgttacttttaaactacaagtcgtgtagcatattaagtttcccatccatttacacagctggtggagggcatctaacttgttggtctagtctgttgcatgcaactgtcatctcagatgttgacatactgactctcagcagtttcatagtcttgtcccttttttgttacattagttggaataggagaaatattgtggcagcactaaagatttgaattggtttctagtatattcatatatttagattcttaaaataaatattggctttttttttttttaatgggccagctctgtatatgcccaaaacagttttgttgttgtttttttctttttcttttttttttcttttagacaaagtcttactctgtcgcccaggctggagtgcagtggtgctatctcagctcactgcaacctctgcctctcgggttcaagtgattgtcatgcctcagcctccctagtagctgggactacgggcgygcgccaccacacccggctaattttttgtatttttagtagggacggcgtttcaccatgttggccaggctggtcttgaactcctgacctcaggtgatccacacacctcagcctcccaaagtgctgggattacaggtgtgagccaccacccctggcccaaaacagtttcttaaccaaactcaacacttaatagccattgggctaaactgagcacaggttatcctaaacagtagtaggataatatcttgtccttattccctaacacttctccaagaagagtgatgaggtatgctgtgatggtaatgttccaacatttgtttagtttcatgataaaattgagcctatgttggagacactggagaatctttcctctcgcctgcgtatgccaccactgatccctgctgaagtagacaagatcagagagtgcatcagtgacaataagagtgccaccgtggagctagaaaaactgcagccatcctttgaggccttgaagcgccgtggagaggagcttattggacgatctcagggagcagacaaggatctggctgcaaaaggtgcttgatgattgtcattatttttaaaaatcaacagaataaattctaggstgtggttatcttcagcatcccaccagatttatttatttctttgaatgtaaaggcagtccccagtaatgagtattccagaaagtcactggaaaatcatttggaattcagaacacatttcgccattgaaacaaggttacaattggtagttagattcccaggccaggaaacaaaagctcctttaacccctaacgtgagtaaactacagtatcaatagtgggtagaacatagctaccttttgtaacactttccatgggaaacatacaagtttaacacagaacactggaaacaagagttctcatcttagcccttttgtaagttaggggttttgtatcttagcactacctttatagtagatgatagctcatttctggattacttctgtgatccctgtatgtgggataccaatgtaagaggaaaacgctagtatataaataataggccggagccacccgcagtggctcatgcctataatcccagcactttgggaggctgaggtgggcagatcacttgaggccaggagttcgagaccagcctggccaacatagtgaaattttgtaaaaatacaagaattagctgggtgtggtggcatgcgcctgtaatcccagcaactcaggaggctgaggcaggagaatcgcttgaacctgggaggcagaggttgcagtgagccaagatcacaccactgcactccagcctgggtgacagagtgaaattccctctctctaaaaaaagaaataaataataggccgggtgtggtggctcatgctgataatccaagcactttgggaggccgaggcgggtggatcacctgaggtcaggagttcgagaccagcctggccaacatggtgaaaccccgactctaccaaaaatacaaaaattagccrggcatggtggcacatgcctgttatcctagctacttgggaggctgaggcaggagaatctctggaacctgggaggcagaggttgcagtgagccaagattgcgccactgcactccagcctgggcaacaggagcaagactctgtctccaaaaaaaaaaaaaagaaaaagaaataatagtaaaactaaaatagaaaattatcctttagttataaatgcttagcatttttttaaaaaatagtttcattgaaaaggtcagagttacatggaatttctgaatagaccaatttcaggctcttcagaaagtcctattcatatctctttttttaacctcctcagaaatccaggataaattggatcaaatggtattcttctgggaggacatcaaagctcgggctgaagaacgagaaatcaaatttcttgatgtccttgaattagcagagaagttctggtatgacatggcagctctcctgaccaccatcaaagacacccaggatattgtccatgacttggaaagcccaggcattgatccttccatcatcaaacaacaggttgaagctgctgaggtaagaaggaaacaaaaccctttttcttaggtgtctgtcctctagaaaaagcactttatcaaatcaaagtgaggtatgttaactgcttagccaggctgagtaccttaaaggtttttgtttttgtttttgttttttgctcttgtccccaaggctggagtgcaatggcatgatcttgactcactgcaacctccgccttccaggttcaagtggttctcctgcctcagcctcttgaatagctgggattacaggcatgtgccaccatgcctggctaatttttgtatttttagtagagacagggtttccccatgttgaccagagtggttctgaactcctgacctcaggtgatccacccaccttggcctcccaaagtgctgggattacaggcgtgagccaccactccaggcctaaagtttctttttaagtgagacattctccaattgaaaaaaacctgctcattatattacatttcttaaatgtagaaaaatwgatggtagaaaataaaaatcaattttggactcattatctagagataacagttgttacattgacatacttttttctagtttttggtgctatttttcttttcttttcttttcttttcttttcttttctttyyttttttttttttttggagacagggtctcactgggtcacccaggctggattgcagtggcatgatcttggttcactgcagcatccacctcccgggctcaagcaatccagccacctcagcttccctagtagctgggtcatatgccaccatgcctggctaatttttttatgttttatagagatggggtttcaccatgttgcccaggcttgtccagaactcctgggctcaagcaatcctccagcctcggcctcccaaagtcctgggattacaggcgtgagacactgcacctggcccaggagtctcttttttaccaacaacatttcttacctcatattgtccatttagcataagccaagcctatcttgatattatttctctaatttcttacttttatttcagctattttttcatagagaaattctttccctccccaccttgggtcaataccaatacatgagccaatttttaggatctggcacagagtttttttcaagatcatagaccccagcacttctgttatactctattgtcagcacttaaatttgtgacttgtactgtgttattttacccttgatatgtttctctgtaatagacttctagctgttgattataatttctttggaggcaggaaggggtgaacctttggtaaattattgaacctcaccataccttttctatagtattttatatatacatatacctatatgtaatatatattttgtatatatgaaaaataaccatgtagagtctgaagctttagtgtccagataagtgaaactgacagttatgttgagcatctgctattgatggggtataaatcacatttgcaaagtttggtaagttctgttctgttttctattttggcttatattctrttcgtttacatgtagactattaaggaagagacagatggtctgcatgaagagctggagtttattcggatccttggagcagatttgatttttgcctgtggagaaactgagaagcctgaagtgaggaagagcattgatgaggtgtggagaaatggatgaggcactcagttagaacattagtgggcccagactgaagagtggtattgattgaagaatctgattgaatgtttttcccctagatgaataatgcttgggagaacttaaacaaaacatggaaagagaggctagaaaaacttgaggatgctatgcaagctgctgtgcagtatcaggacactcttcaggtgagaggccaggaggtgaccaccaaggaaatacaggttctgttttttgccatttttgtcatttttggaattaagcacaaaagtggatcaccttcacaggactgcagacctaagatagtggtgtttccacaaatttagccaaagttccccacttgtagtgaaaaaagtagcgacatctgtctgaattcttactcttcctgccatgtttatcattgcctgctcatcatagattcattcagctacgttgtgaagctggccttactgtgaaagtcattgcttgccagaggttccaaacccaggttatcttcaagcacagtttggcacagttgcttcagaacatcatgagcttgctagctgggattgaaaaatcttcacttttattcaaatttagtatttccaaattgtagtttattttgaacattatcttgataatgttggctccattattaaatcaccatattattaatataaagatcattattctttatctgtgccccttacctgaaatcacaaacagcacaaggtgctttgattgatttatgtcttcttatgttagcagagataatgctaattctctcccaaattcttctggttgtttttgactgtttacttgtcttttgttctaggctatgtttgactggctagataacactgtgattaaactctgcaccatgccccctgttggcactgacctcaatactgttaaagatcagttaaatgaaatgaaggtttgtatctgggtatggcttttgaagaagaattgttttattatagtttttaaaggcttgatttgatgttaacattgagtgtgtctttgacaggagttcaaagtagaagtttaccaacagcaaattgagatggagaagcttaatcaccagggtgaactgatgttaaagaaagctactgatgagacggacagagacattatacgagaaccactgacagaactcaracacctctgggagaacctgggtgagaaaattgcccaccgacaggtaaggcaggtggtagatgacatcagtgaactactctccgctsttttctaatttcgtattgaatattccctttctgtcttttcctgagtagcacaaactagaaggggctctgttggcccttggtcagttccagcatgccttagaggaactaatgagttggctgactcataccgaagagttgttagatgctcagagaccaataagtggagacccaaaagtcattgaagttgagctcgcaaagcaccatgtaagtattttcattttttcatctctaaccctattgatttgagaccagatgctgccaccagcagcctttgaatgttgtgtatatcttaagagaaccaagttagatgatatccatagagataaattatgttgttcaacatgttttaggtcctaaaaaatgatgttttggctcatcaagccacagtggaaacmgtcaacaaagctggcaatgagcttcttgaatccagtgctggagatgatgccagcagcttaaggagccgtttggaarccatgaaccaatgctgggagtcagtgttacagaaaacagaggagagggagcagcagcttcagtcaactctgcagcaggtacatgtgacatccaagtaaggtaggaagagctatacagataacagaaagcctatctaagtcagagagaagagatcaatttgaaaagcaaagaatcccttatgtcttgaggggaaggttaatactgtgctgtaacttatctrgaaagagcagcttttgattgggtagttcttttctgaattcatttctagctcagtctctttattcacattcaaagttagcagatcttcactataacagattccctttttttcttggatcaagtcaggtctcttcctattcaacagtaccttaatcaatagtcaattcatctgatcgtatcaggcatttataatatgttatagtgaggtctgaaggattctgctagattctagcaataatattggccccatgctaatctagcaacagaacagctttgccagagagcagccgaaaattccttcctcaagataaactcctcatatcatttggaaagttgacttttaaagctgagaaatgactactgacatggttgatatatctttttctcaaaaggcccagggcttccacagtgaaattgaagatttcctcttggaacttactagaatggagagccagctttctgcatctaagcccacaggaggacttcctgaaactgctagggaacagcttgatacacatatggtaatagcaattttttgaaattgagcataagcatcccatattcactagctcctttccaagttcacagtcataattaatatgtatctggaaatctacaaagtagtgcatttttatcaaacatatagtataacctttggggattgctgcctgttacaggcttctaataccttacagtaggcagcagtagtgacagggaaggtcagctggaaattttgagttaatcagctttactggcacacatatattgacttgaagatgacagcatcaagaagacaaatatacaacacagatgtgctttcacttaagaaggaaactacttaaggggggtttagggaaatcaaatagttacccgacagtatttcaagaatgcatgctagaacaaaaagcaacataatttctaggcaaatttttcatgaaaaggggaaatagattattggagtcttttgagggatctctaatccttaaaaaatgtttttcttggycgagcgcagtggctcacgcctgtaatcccagcactttgggaggccgaggtgggtggatcatgaggtcaggagatcaagaccatcctggctaacatggtgaaacctcgtctctactaaaaatacaaaaaattagccgggcgtggtggcgggcgcctgtagtcccagctactcaggaggctgaggcaggagaatggtgtgaacccgggaggcggagcttgcagtaagccgagatcactgccactgcactccagcctgggtgacagagtgagactccatctcaaaaaaaaaaaagtttttcttctatgggtgataaaattattttaatattttaatttgccacttgttatttagtaaaatatgttaatacttacattttaatacaaatgaattctaagtaatcagtatttagttattacaattaattttattattaagtatggtgggtttcattcccttatggctcagcacttgaactgaatccaaaagaatggcttgtaatcaagatgagcccttcctggactttcccagactstgctacagaatctatatgtaggtgtcttccagagaattcgtagaattgatatctttccygccttttcktgtaggaactctattcccagctgaaagccaaggaagagacttataatcaactacttgacaagggcagactcatgcttctaagccgtgacgactstgggtctggctccaagacagaacagagtgtagcacttttggagcagaagtggcatgtggtcagcagtaagatggaagaaagaaaggtacagtgtatgatccccatgtttgagtaatttgctgagtgattgcatgtataataattgccatcttatttatatgaagattttttgaagaccagggtattgtaacagaagttgcagaactgattccatctgtgttgagttgcattgatggtataagtttctgttgttatttgcttytataattattcattccttacctgttaagacattactgccattatcgcttcgtgatgggctttatgtcctatattaatcaccaatttgtgttctacttaaaaacaaggttttgctggagttggtatcttggggttgagagattggggacagggcatatakggactgacgaataattctccacaaggaatttggttcctaacgtaaatgtagtgtgcamggaaatttwctagaaatcaggagagaagtaaattatatgacctcttcccactcatcctcaaaaatcaaattctcttctctacaaaataatgaaagatgaytagggatcaaggtgtttgcccaaaaagattattttttatgagtacagagwttcactgtrttttttgctgctcagatcaagtatgaaatatatacatacacaaacctgttgaccacattcactcaatgaatagttattgagcaagtgtgtgccaagtcctgtgcctgatttatggtggaaacactaaagacgaccctatctttgggaaattaatgaacagaagggcataaaacacatgaacatcttgagagaagcattaatttcctaaaaaccttctagcatgggattgggtaatttgattatattaagaatggctaaaggacctaagtgtatgctaattcttggacagagtcagacctggtggctcaygcctgtaattccagcacttgggaggctgatgcaggaggattgcttaacaccaggagtttgagaccagcctgggcaatatagcaagaccccatctctacaaaaatacctaaaaattagccaggtgtagtggcacacgcctgtagtcctagctacttgggaggctgaagtaggaggctcacttgagcctggagggttgaggctgcagtgagcagtgatggtgcccctgcattctagcctgggtgacatcaataacctatctccaaaaaaaagagaaaacaatccttggacaggctgtcatccatagatcctgcagaaggcaaagctaagattaaataaactgagacagattccagctcataaccaagaaattttcagagagttttcttaatagttgagcaaaataccttaagacatagttgcccattatcagaaatggtcaggcaaaagctgagtgtcaaggatagtttattattttgcagaaacattaccttcaggatcagtaaaatcatttattaaatgtgtgtggtgctgtagtaagaaaatataaagaatatgtagatataaagaatataaagatataaattagatataaaagtatatcttttatatctataaagtagatataaaaaatatataaagaatatgtggatagaatgatgtggaaagaattcctatcatctaggaacttgtaatatattaatttctaaacatttctatatatatttgaagtggatttcatttttccacctgatttgtttagattgggtttgtacatttttataacatttattgtaatttttttttttttggtggggggtggttacaaaaataacctgaaagcgcaaagaggaaaatagaaattacaacccagtcaggtagaattaacaacagttaacgtttttggtgtacatcttggagttttttctgtgaatattttggaaatactcatttttgtcagcctgtcatttttactttgcctgcctagtaggggggccagaggcagaagtcattaccaaaaggttagtgtaggtctctgaggatggagcttatgaactctgtgggattgaagcgtacttgtgaggagtagccttttccctgaatgagctcttgttgttgccattcttaggtaaatgaaagtgtctgaaaatctacatctagtgttgtcagatttttgcctagaatgtcttggcttctttcgttacctcttcttcttatagcataagcataatttttagactcatattttcatatgccatattttctgaaaacatgtatttaaacaaagagtactacattgaacatcatcttcatagtaaattgcttttcatttagctgtttttataccacaaaaagtacattaaaggaaactgaaacattacccaaagcaggttgtagatcctgcagctgtcaccactaaagggtctgttcacttacagttattgaatagtcttattcccgttcaaggaagtggagagtagcagagaaaggaacttagctgcttattgtgctctatttccttttccatgtacacagttcttgcccatttgtttcagacactaacattaaaatgtccccttctttacaaataaagcatgtttggacgttgattaaatgaggcttcctttttagaggtcatttcatttgttgtacaattcatgcctttgtcgctgagcctataattcctgaaattggcgctttttctttctgtgtgtgtgtgttttacttgaaattcagtcaaagctggaagaggccctcaacttggcaacmgaattccagaattccctacaagaatttatcaactggctcactctagcagagcagagtttaaacatcgcttctccaccaagcctgattctaaatactgtcctttcccagatagaagagcacaaggtaagtatgatattatgatgctgcattctttttgaaagcactaattgaaagaaatgcccctttatcttatcttaagctaaaaaagagcactrttgttccctcaggtttttgctaatgaagtaaatgctcatcgagaccagatcattgagctggatcaaactgggaatcaattaaagttccttagccaaaagcaggatgttgttctgatcaagaatttgttggtgagcgtgcagtctcgatgggagaaggttgtccagcgatctattgaaagagggcgatcactagatgatgccaggaagcgggcaaaacaagtaagttggggaagaaagatactaattcactgaagagtcttgggctgcatgtattgagtctctgggatgattstcaaacgtgctgtatagtgtgtatattcattcctgttaacttatttcttatgtaattttagttccatgaagcttggaaaaaactgattgactggctagaagatgcagagagtcacctggactcagaactagagatatccaatgacccagacaaaattaaacttcagctttctaagcataaggtaaagcagttaattgctcttaggtcccaagccatagtattcgctaaagcttgtatcttgccaaaaataaaaatcagagctagtaaaaagaaaaccaattggttaatgtttaaaagtcaaaatgatgaagccagggttccattttatatctagatggtctaatcatgatatttgctcatttaaataacagtttaaggaaagtagttatgggagtaactagttaaaactgtaggctttcacaaattgtcaggcacttctatatatggtataaacaaaaaattataaatttcttaaggataagctatggttaattttagttcaaaaaaagtggtgatattcatactttatttggtttctagcctgaaaactcaaattcttttgttccaaatcaagatgtcgtctgacttttaacacttttttcttttctttctggaaacataggagtttcagaagactcttggtggcaagcagcctgtgtatgataccacaattagaactggcagagcactgaaagaaaagactttgcttcccgaagatastcagaaacttgacaatttcctaggagaagtcagagacaaatgggatactgtttgtggcaagtctgtggagcggtgagcatgaatgtccccttcaggggtctaaccgggatcccaaaagcaagaggttcttaccagattctataaaatggtgataaagctaatgcatcagtaagaggttttgtaccatcttaacaccaccagttagttcaaagactgttataatttaaataaaatgtgtaaaaattctcattttaaacttgaaccttattgtattagagagaggcctataaaatcaaaccaacaataatagatcagtaactcaaaagtatttgtaaatcatcaatttgtaataccaacaactgtcttattgactgctcttggacactccaaagcctctacatgcattacctcatttaaccataatgatacctgacctttgctgggcaattactactgaatatgtaccaaacagtagctgataatcatttaatcctcataaccactgaggtgggtaccatttttattccattgtacagatgagaaaatgaccataaagaggttcttaactcccctaaggtcactcagctaccctgttggcagagctgaggtttaaaccatggcagtttggttctaaaagttgtacttttatctatttgtacccactatgccatrctaaatattacaatattgctaccctatttgtacttttttttgtttgtttgtttgagacagagtctcactctgtcacccaggctggagtgcagtggcgcgatctcggctcactgcaagctccgcctcccaggttcacgccattctcctgcctcagcctcccgagtagctgggacyacaggcacccgccaccacgcctggctagttttttgtatttttagtagagaagggatttcactgtgttagccaggatggtctcaattttctgacctcgtgatccacccgcctcagcctcccaaagtgctgggattacaggcgtgagccaccgcgcctggcatttttttttttttttgtcatgttgagacagggtctagctctctggcccaggctggagtgcagaacttactgcagcctccaactcctgggctcaagggatcctcccacctcagcctcttgagtagctcagactataggcatgtgccaccatacctggttaatgttttttgtttttgtttttgagatggaatctccctctgtcatccaggctggagtgcagtggcactgtctcgggtcactgcaacctccatctccccggttcaagcaattcttcttcctcagcctcccaagtagctgggactacaggtgcacaccaccatgcccagctaattttttttaatatttttattagagacggggtttcaccatattggccaggctggtctggaactcctgacctcatgatccacctgcctcggcgtcccaaagtgctgggattacaggtgtcagccaccacgcccagccattgttttttatttgagtagagacaaggtcttgctattgtccaggctgttctgtaactcctgacctcaagtgatcctcccaccttggcctcccagagtgctgggattgcaagtgtgagccaacacacttggcctgtactccaattttttttttttatgaggtgactgaggttcaaggagatgaagaaacagcctagggtcacacaactgatacagagctaggagttgaactgattccagatcactaccaaaactatcatcttttacttagagtggtatatgaggtgattaacacasaccttgggttgttagggtgtgcctgtgtgtyactgggctataagatgcctaaagggtatctctacctgtcccctgtgctacccttaatccattctagagggtggtttgatttaaaatgtctcaccatctctcagtcactttttactctatttcttttttttttttttttttttgagatggartctcgctctgtctcccaggctggagtgcagtggtgcaatctcggctcactgcaagctctgcctcccgggttcgcgccattctcctgcctcagcttcccgagtagctggaactacaggcacccacsaccatgcccggctaattttttgtatttttagtagagacagggtttcaccgtgttagccaggatggtctcgatctcctgacctcgtgatctgcccacctcggcctcccaaagtgctgggattacaggtgtgagccaccgcgcccggcctttactgtatttctaactgttctaacatagaagtcactctctatatagggttcaagcaatattccctttcagcgaggcagaattgtgggccatttgtaaaaggaatmcctaaaaatggtagcgtttgtgtgcatttctcaggcagcacaagttggaggaagccctgctcttttcgggtcagttcatggatgctttgcaggcattggttgactggttatacaaggtggagccacagctggctgaggaccagcccgtgcacggggaccttgacctcgtcatgaacctcatggatgcacacaaggtaggggtgaggtctgggctacattggagtgcagtgggtcttctgtatatgactgcctagggtcttctacatatgactgcctctgcccttctttctaggggagaaagagagcctgacagttgctttgtgtgtttaaacaaactgttgctgagattctgcattagtcacaacgaatttaccaaaattggtttgattcagatttggcaatgtgtaaacttcacttcaaggttgcgcctcttcctgtttgtttctctcagttgagtcacaaaatggatctaaattccaacggaaacccataagatagccatttccactgactcctaaaatggaaatgagtgattttttttttaaaccacttctgaacctaacaatcctaacaccaggcacgccaatatttaacataatctctatctgtcatgttgaattatgtaatatcctcctgtttcagcacaagcatttaactttaccttgaaattacaacagattcttattatgtgcacagcagatgtttttatttcccataattctggaaacgttagtataatggttaccattttacagatgaagaaactgggccttaagcaacttttcaaaattatgtatctcctaaatgcctgagctagcatttacagccacattttctggttgtttttttctttcttttttctttttttccccttgagattgggtctcgccatgttgcccagactggtcttgaactcctgggctcaagcagtcctctcatctcggcttcccaaaatgctgggattacaggcatgagccactgcgcccggcctggttgttttttcttatgcattgctctgcctccctctatgcataaaagacacatgattagaacctaccaagaaaattattatttcccagtggtttcttggactcaaaacattccttgaacaaacaaattctcctattttcttttctaggttttccagaaggaactgggaaagcgaacaggaaccgttcaggtcctgaagcggtcaggcmgagagctgattgagaatagtcgagatgacaccacttgggtaaaaggacagctccaggaactgagcactcgctgggacaytgtctgtaaactctctgtttccaaacaaagccggcttgagcaggccttaaaacaagtaagggatatttgctgtcccaacccaagggatagatctgagtgggtttatttggtttttcttttactagaatctgttccagtcagtcttgaaataagtataacagagttgaaaattgatattctgaatgttctataaaattttaatattcattttgagaaataatgaattcagttgattttcaaagatctacaaatgaaagataacctttgtggagttttgatgaggccatgaaatgtctgaatgaacactggaccctttccctagcatgtcccagtatctaggtccttggctgcagagagaggttgaatcttttgtgcttggttatttcaggcggaagtgtttcgagacacagtccacatgctgttggagtggctttctgaagcagagcaaacgcttcgctttcggggagcacttcctgatgacacagaggccctgcagtctctcattgacacccataaggtaatccagccttggggtttggtgacctcatgctacctaccaccttgagggctgcctaccactaaatgaaagcaactttttcttggaaatatcagagctcacatgaaaaggaacaaaaccagagtggccctagctcattggtttagcaggaatgaaagggaagcgactgatgggttttttgacaccttaaacagtaacattcattcttataaaagtaatatatgttggttgtaacaagttttttaaacatggtattaagaaaaatgttgactatttcatcttctttactcctcacctgcatacgcctttgtttgccttatgttaccagctttaggccctgatctgatcccccagcaccacttactaagctgtagagtatggtgcagtgtctggggtctcagtctgtcctaatgaggtgggaaatgtttccctttttaaatttttatgttatccactcagagattttaatcatggatttgttattatattctgttatgggtattttttaaaatcatggtttttacaactataattatatttttccaatacaaatatgtttaccaacatgaaatgaaataggatataaatgagagtaaatgaaaaatgggactaaaaaagagagaaactaactcgaatgggaaaaggggggcatacctctgtgtgtcctattctttgttgtcatctccaccagagaaagtcattcttgtgtaaacccctcaccttcccacatcttttagaatgaaaatgccrtaaataactatacaggcttttagaggtctgcgttaacacatggaggaaaaagaaaacattgaaatttatcccccctcagtgtaaactaacagtgctgctaatgtagactttktacgtttttgttttcaaatcttttttgtttaggaattcatgaagaaagtagaagaaaagcgagtggacgttaactcagcagtagccatgggagaagtcatcctggctgtctgccaccccgattgcatcacaaccatcaaacactggatcaccatcatccgagctcgcttcgaggaggtgagtccctggttcagaggaggactgcacacgcccagtaaactatcactatagtatagtatagtatttttcccccaggtaaggaatctttcaytcactgtgaataactyagcaaaaattaagttaacattttagtaaagactgttttcttggtaatgtgtggcaacctggaggagtagtgttggcatagtgctatgttaatgtgacttccagtggacatgttgtgtagtgtctgctccttcctgggaaatcctgtgttaacaggatgtacagctgacccttgaacaatgtgtatttcaactgcacaggtccacttatatgcggttattgttcagtaaatacagtcagccctccatgttggtggggtccacattcacagccaaacatggatagaaaatacagtattcacgggaagcgaagcccatgtgtgcagagggcagacttttgcaggttgcacaaaaccaattataggccttgagtatgcatggattttagtatccacaggtggtactgggaccagtcccccatggataccaaggaacaactatactagattttctttcaggagggctgatattttattccagctcttatcccagttgtcactggggtaatagtgaagcctcttgactgtttgggtggtctctcctctaaaaagtcattgtgttggccgggagcagtggatcacgcctataatcctagaactttgggaggcttgaggcggtcagattmcctgactcaggagttcaagacaagcctgggcaacatggtgaaacccatctctactaaaatacaaaaaattagctgggtatggtggcacaagtctgtaatcccagttacttgggaggctgaggcrggagagtcacttgaacccgggaggcagaggttgcagtgagccaagattgtgccactacactccagtgtgggtgacagagcgagagtctgtctccaaaaaaataaaataaaaagccattatgaaaatcagatgaaaaagggctttggaaacaaagggggtatgcttgactgaaagaggccatggtttccttctttttccacaggtcctgacatgggctaagcagcaccagcagcgtcttgaaacggccttgtcagaactggtggctaatgctgagctcctggaagaacttctggcatggatccagtgggctgagaccaccctcattcagcgggatcaggagccaatcccgcagaacattgaccgagttaaagcccttatcgctgagcatcaggtatcttaacctcactgtgtgatcactggtgttttccgtgttgggcatggagaccatctctgttgccctgtgtatatgtttttaaatggctgcttaacacattaccacagacttagcactgtaaaacaacacatacttacttacctcatagtttctgtgcttcatatacctgggcatgagttgactaagtcctcttcctggagtctccccaggcagaaatcaaggtgtcagccagtactgcagtctcatctggagttcagggtcctcttttaggctcactcaggatgttggcagaatccagatcctggtggatgtaagactgaggtctctactttcttgctggctctcagctaggagttgctcttgccttctagaggccccctcaggtcttagccacacagccagccggagaaactgtccaaagtgctctatggagtcttgaaatgtaatgaagaatgaaatgtaattaagggagtgaatattccatcatttgcccacactcaagggagggggattacatagagtgtgcatacaggagtgggaatcctgggggcctttttagaagtctgcctgccacagcctgtttttattgaccatcatttgagccagggtcccactggtccccattatacctggttcagaaagctctctygcatgaacccagtkgtcagtgaaggtgcacattagactaaactgaatggaggaaagctcaggtgggccatcttcataatatatccttaagaggcaaatactatttttaaccataatcatttatactgaattcaagcgtgaatgttgattagttatactgtagactatatggtctttttagtttatataaacaattaccccagcaagtgagaactcactatacagatagtccctgacttacagtctctcaactttatcatggttcaaaggttatacatattcagtagaaactatacaattagaggccaggcgtggtggctcacccctgtaatcccagcactttgggaggccaaggggggcagatcacttgaggtgaagagtttgagaccagcctagccaacatggtgaaaccctatctctactaaaaatataaaaattagtcgggtgtggttgtggttgcctgtaatcccagctactcaggcggctgaggcaagagaatcacttgaaccagggaggcagaggttgcagtgagctgtgatcgcaccattgcactccagcctgggcgacagagcaagactccatttcaaaaaaaaagcactttgagtgcccatccaaccattctttcactttgattacatgagatagtcaacactttattataaaataggctttgagttagatgattttgcctaactgtaggctaacgtgttttgagcatgtttaaggtaggccaggctaagctacgatgttccatagtttaggtgtgttatattttcagcttaacgatgggtttgccaggatgtaacttcatcgtaagtcgaggagcacctgtccttcctgtgggatgtacctcctctctgagagattatcttcttcctattcwgttcttctcctttctgttttcctctctctcctctatgtcttcagtctctccctgtttattcttttctctaaagcttccagacatgtccttccaacccagagttcccctcctttttcagctacgcttcttgttccctgtctcatctccttttttcccatcactccccaagtccctgtggtctggctgacactgttctggtcacattctactggctaaatccaacagagttttttcagtctttattttgtttgacatgtaacctagctggctcttcatcccttcccaaaacttcccttttgacttctgtgtcctttaatctttgtgttttcctctgatctctctgaccgttcctttttagcctttttagctggttcctcttccctgcctattcatcagtgttgttccctgacgtctcattcttgatgctctcctcactctgctaagatttatctggtctaacagctttagctattacctataaagcttctgcatctttttcatcttcagcactatcatctcctaaagtccagacatacagtaaactagaagcagttctaaaatttccactttatctttgcccscttgcctgacgtcatttgtccattccagatctgccccccctttcctcattcagaggcctgtgatgtctggagttcctccttttcctcacatctagccactcaccakggcttgtcagtcccactttcaaaatacctcttggttccatctttcctgccctggctctggccctcaccatgttttgcctcagttgctgcaatggtttcttaacctgtcttctcactgctagccactccccatcccacacttacccccacccccacatcactccatgttttacactgaagccagagtgatagctgtaaagcatgggtctgatcatgtctcttacctggatcgaaatccttcagctgccccctgttgctctcagaataaatggccaacccttagcctgacacagaagcctttcgtgatctgtctcctgcctgcctctccaaccctgcctcttgccattcctctgattgcatcctctgcccagccagtgagtggaggggtcctggtcacagcactgtcaggcatccctgtctctgtttgggttgcaccctcttccaggactgccttcccaccatttgttgactgtttcttcattgctcagtgtgtcagtccgtttgcattgctataaaggaattcctgagactgggtaatttataaagaaaataggtttattttggcttacggttctgcaggctgtacgggaagcatggtgccaatatctgcttctggtgagggcttcaggaagcttagaatcatggtggaaggcaaaggggagccagcgtgttacatggcaagagagggagagagagaaagaggaggagatagcaggctccttttaaacagccagttctcatgtgaactaacagcaagaactcactcattaccatggggagggcacsaaggccattcatgaggaatttgcccccataactcaatcacatcccgttagaccccacctccagcattggaaatcacatttcaacatgagatttggaggggacaaatatccaaactacatccctcagtaactcaactcaggcaccagcctccacacagcctttcctgccaccacaggccgtaaagtacccatcctagctcttcctttgcccccataagagtaaaaatacaatatttaactctttttcctattttttgtgtttaacagacatttatggaggagatgactcgcaaacagcctgacrtggaccgggtcaccaagacatacaaaaggaaaaacatagagcctactcacgcgcctttcatagagaaatcccgcagcggaggcagtatgtttccagccccctgtgttaggatgcttcattcctgctaattgaggatgagcactttccaaatgcctatcaaaaaaaattatattccattttcaaaaaccgtgttggttttgaaccaaaatctctcatttttgaaactcacttttcttacattgacagacagtagctgtactccatattctttggtatgattggtatgaaattacgaggtggttaagcttattttttaacartggcctttccattgttttggttatcagccctagctgtttacatttggcttgtactaatttaatcaacacaacagcttctacagaatatgttgcttttttagttgagttaacgtgtcatcagctcactaaggtaggacagaattgcttggagatatgtaggcagcaggtaagtatgtgctgggaggatcagtacttttggaattagtacacctccgtatctaaatattgccaagtcccgtatttcttttctcagttattgactggatattattataaagatcttctaggtttatacatacagctatttctctttgtatactaaccagctgttctaatcttgtgattatttttccttttagggaaatccctaagtcagccaacccctcctcccatgccaatcctttcacagtctgaagcaaaaaacccacggatcaaccagctttctgcccgctggcagcaggtgtggctgttagcactggagcggcaaaggaaactgaatgatgccttggatcggctggaggaggtaaygccctgctgagtggccttccctgaaacaaagtgcttttttcaatcaaaacacagcccttctgaggctctcttaatgtgaaccttgtgtcttaatttactttttcacaatagaaacagacctataccaagccagtactcattctttgaggcccctgaatgagaaaagacacatgtgtaagaaaaccgtttgtgacagagtaggctaaagcttctaggtgtggaaagcaagaaaacagccagtccataatgagggccaggacctgatctgcctcagcatcttgctgtggttgggaatcaggaacagaactttggaaatttatctccagatatgtagcatagcacaaaaatgacccttgttgagcctttcatgtaaaaacagatgctacagaattatgaaataggagtaatttttaatgattttgttattagtcttcacttgatcatgagaagcaactctattttgaagtgtcattacccagtataaaaaatatagtactatgcttcctagtttctaaaacaagcctctaatatcttttgtatttttttatttgtgcatatcaaagcagctatgcctggaagtgagtgttctgtgttttgtttattttttccttaggtcagttgacttttaagcttattgggttcttggtgcttttttcccccattccttctaactttggagtttgaaagaccaaggggaaactgctgcactctttaagtcattttgagtgtatatcattaacgtagacttaagtagctgaaaattgtcttgcccactgcataggcctgctgttttccatcaaggccaaatatttaacatggaggtcagatgggcaatttgctctctggtgccattccaaagaaacatgcttggatacaacattgggttcccaatgcttccatccagaactcagattttctcattgaaatctcagaagatagtggtaaacacgagcctcctgatatgagccctatgtgtgattataatgcctttcaaaacaacataatcgaggagtgctaaggacctcccttctgggttagaatccatttccttgcatctaagagagtgatcctttgaaaagcccaaagggaaagcaaggctggcttcacccattctcattctgtgtgctccatattttccatggtgattcagttattgtttctcttgctattccattataccatagctcgtgtaaatagtcatggctttaagtgaaagagccagattgtgccttcacaaaagaagcaaacacatagatttcattgttgatggcccctggaagcatggctttactgaatgtctgaaagtttgggtatgctctgggcagcttttgagggcccaaaaaataaatcttattgacacttctgatttctgtgtagttgaaagaatttgccaactttgactttgatgtctggaggaaaaagtatatgcgttggatgaatcacaaaaagtctcgagtgatggatttcttccggcgcattgataaggaccaggatgggaagataacacgtcaggagtttatcgatggcattttagcatccagtgagtctagtcatcattccaaacatgggtcacacctggattccttgcactttgtagaagctgtgatattctagctaaacagtctttctgaagctggccaggagcttggctcacacctgtaattccagcwctttgggaggcaggtggcaaaggcatggtggcacacttgcagtcctagctacttgggaggctgaggtgaatcacctgagcctggggaggtcaaggcctgcagtaagctgtaatcgtgccagtgaactctagcctgggcaacagagtgagactctgtctcaaaaaaaaaaaaaaaaaagacagtggttaaccagaggttttcagctgggaaacaatatgatttggtctrtgttttagtaaatcactgtgactactataaatagtcacacttccctttgtatagcaatttgtttagaatctaagacaataatctaaacataggaaaacttcatgctattccaaactgtcactattctgaaataatctaaatatccaataattgtggagtggatgagtatattcttgagttgagtggtaggactgtgggtggttgtaatattatgtttatgccttttggtatatttgaaatggggaatattaccttttttcgttgcatttggggtaggggagtctataagtggatatgtattatttttcaggaaaaatcaagacataaatttttttgctcttaagaagtatttctggccaggcgtggtggctcgcgcctgtaatcccagcactttgggaggccaagatgggtggatcacttgaggccaggagttcaagaccagcctggccaacatggcaaaacctcgtctctactaaaaatacaaaaaaaattagccgggcctggtgacaggcgcttgtattcccagctactctggaagctgaggcaggagaatcacttgaaccagggagacggaagttgcagtgagccgagattgcaccactgcactccagcctgggcgacagagcaagaccttgtctcaaaaaaaaaaaaaaaaaaaaaaaaaaatctataaccgccaaccraacaagtacccctcttaatgtttcaaaatatgattccttttctccagagttccccaccaccaagttagagatgactgctgtggctgacattttcgaccgagatggggatggttacattgattattatgaatttgtggctgctcttcatcccaacaaggatgcgtatcgaccaacaaccgatgcagataaaatcgaagatgaggtaagggaaataattatattttgagtacacttctggctgtaggtttgtaatatcctgaatttggttgggttcagtgatcatattagcctttgacttgtctgttgggagataattatttggagttctattttgagatctctttttggatagcatttcaaagagtcccagaggatctctgacatctgagctctagctcaggctagatggattactcaagtgagtcatgtctgtgtggtgctctgaagtttayagagaacctttgcagggcagcatactcatcctggttcactcgtcctgtgtttgggatggactcatctcactcttgagcatgctgcctggaatctagggaaatggtctmccagtgtagcatttaagggttgaaatggactgggcatggtggcttacatctgtagctctagcactttgggaggccaacacgggaggatcactggagcccaggagttcgagmccagcctgggcaacatagtatgattstgtstgtcccccccgccaaaaaaaaaaaaaaattagccaggtgtggtggcaagtgcttgtagccccagctactcaggagactgaggtggaaggatcacttgagcatgggagatcaaaggtgtggtaagctgtgatcatgccactacactccagcctgggcaacagagcaagacttgtcttaaaaaataaamacaaatgtttaaaaggggagtaaaatgtaatgtttaaaatggtgtatacccatcatgctttctgccttgttaagaactaccacattgaaactgccaaatttattagtgccatctagaaaccctaacatctgttgataacagatcttggtaagggagaggtgctgggacaggtcttaggagtggccctggaacacaccaggactgacttccagggaatcttgggctcctagggtgaaatttaaagcagttcataatttgctttattaataatttgattttgatgcaagcatattagcacttttctctgaaggagttttgaagcaggaataaagaatgtgttgtatagtcacttgggaattttctttcatgccttttctcagtgtctcaattagttcacttagtaagaagaacatatactaatttggaacagacaataaatgtatatgtcaaaagcctgaaatgcctaaaaagtaaataatgagcygtgcgtggtggctcacgcctgtaatcccagcactttgggaggctgaggcaggcggatcacctgaggtcgggagttcaaggccagcctgaccaacatgaagaaaacccatctctactaaaaaaatacaaaaaattagctgggcctggtggtgcgtgcctataatcccagccacttggggggctgaggtaggagaattgtttgaaccaggaggcggaggttgtggtggagccgagatcgcaccattgccctccagcctgggcaacaagagcgaaactccatctcaaaaaaaaaaaaaaatgtaaataatgaatagcctccctgttaatgtataaaaatctttgtttctctgaataggaagtcttgctctaccctttacactttcctttttgttcacacccaataggttacaagacaagtggctcagtgcaaatgtgcaaaaaggtttcaggtggagcagatcggagagaataaataccgggtaaggaagagaaaaagcagtcctttgttgtggtggtttctcatatgtggctgatccyaccttttcctcctgatgcttagaggcccagagcccatcggacttgagatgtggtcactctctgacctcatctctatagatgccaagtgtcaggtaccctgttacatctgaaaactagtcccatatctacctagatagtagtagtttgtatttaagttttaagatargagatatttcagagctgtcacttcacatctgacaaagttcctagggggatgaaggtacctttggaaacaattrtatctattgactgaccacttgcccacaaagagatggtcattgtgagcctgagtggctcccaggctagagaggcctggggaaactgtgttgaagccccaacagacactgtgcctgctctgagctgggctacaaatggggcccaggagcactgaggagacatcaggctcagtggtcttccctggaaagccatgctaggtgtggccataactgacagtgaactatacttgtgttttagcttcttttgggaccagggtcagggacatagaaggatctgaaacaggtctcctaaaatatatcaacagctcgtcaagattctctaaagtcctaagaaaaatctatgattggcaaagaggatttagattgcactaagaaacacaggaaggtccatgtttcattagtatatccaaaatgtcctcaaagtacaccaaatctaccccatgctgcagtctcctgaggagtgctgggtgaatctgctttgaatataacctagggcatttagttaataaagctccatataatcttatgcctgcttgttggattttgttttcttgttttttgtttttaattatctatgagagaaatgaattaacaagaacaacatagcatggagagttagttcatagtttataaaaccacatccctggccgggcgtggtggctcacacctgtaattccagaattttggaaggtagagaggcgagcgagcggatcacttgaggtcaggaattcgagaccaacctggccaacatggtgaaacaccctctctactaataacacaaaaattagctgggcttggtagcgcatgcctgtaatcccaactactagggaggctgaggcaggagaattgcttgaacgccggggtcggaggttgcagtgagccatgatcgcgccactgcactccagcctgggcaacagagcgagactctcaaaaaaaaaaaaaaaattaaaaccacatccctgtggcaggagcttggtaagaatatgttcagtgtgtgtcactttgccagaaaaatgtaatgatatgattttcattctttagtgttaatttgacaaaatgttctctttttttttcccctcctttcctccatcctttactctttactgtctatagttcttcctcggcaatcaggtacagtgtgccttgcaatgttctccttctcaatggatatggtctgtgtagctaatgctgcctgttcttcgctatggggagaggatgtaatctgaagcatgcctgggtcgcacctggttgtcttaccaagtggagaaactgttgatggggccagcattgcaaagctatcttagcagcaaaagaatataagtataattttttataaaggagatgaaatggasgaaagtgaagctatggtatcagtccattacacttctaagaagagcctggttttgtacttctgtgttagaagtcagattaccaaatagcacagttcttatttatattagaatcttttgacagttaataaattttgtaatgtatggtaagtcaattcctgaagaacttcagtactatttaaatatctttttaatatttgtagttacttatattgtatgttataattacaaggtatctgagaagtgtagtgtggagatcgtaattggccgtggcctgaagtatgctgattatggccagccagccaagatttaatgggaccaaattagacttgcaaaaaagattggatgctttgactccacttggtaactctaacctttcagatctttttgagtgctgtggggtcctgtgtcctccaatgtggaaggaagttgcatgagtaaaatctgtctctctgatatgaaattataaacactagttgttgatttcaggccctcaaacatcccaggccttgcaagtcactatagaaatgttctagrcaagtgggaagaacaggggataagagaaaaaaactaaagatgagaacaaactggctttaaaaaaacatcattgcttgagagtgtccaatatgcctatttgctaatgactgtgtgtgaatgctagggtgcctttgaagagtcctgacaccctcttctactgctccattgatcaggagagggtcagatgacttctaatgttgagaacggaattatgaagttcattttatacacaggcaactgaggcctcaaagatcacatgcctactctcacacagctagtgtcagccactgcaagaacccaagtctctgtaagaggttttccttttaaaaggtggaaacaacagttactgacccttaggactcttatttgttctttgcctcactgacaaccttgtcctaccaggtgtgcacaggtctccatttttagagctgccataatccctcctaccacttgtgactctggcctcaacttccccagctacactggctgctggcttggtcaaacctcctttcccccatagcttagcagaaacaagttagaatctttcaaagagagctttagtgtgaaattaaggttgggggggacatgaaatatatggagtgataaattatagtacacagtattccaagaataaagtactcttgtggttccttcctgattcaccctggggtacacacaggtgcatactccctgcctctcacccatccagagaaaaccctttgcagtgactcaggtccaagagcactgctcttgggtggaatcctccatatctctcagaacctcccacagggcttctcattttcacttgtggggcccagcttctgagagggggctctcacagagcctggggggcagcttccttcccaggacaggacgtgtattctctttcaagtctgggttcagtgctgctgctaccacacagtgcttttgctgcagtcactttgtataaacatgtttaaattgtatcagatgaaaggtgtgggacttcttttattttcaaagtaaagggctgggagggaggatacagtatttttcaattgccttgcctgtgcaaatactgcatttgagtcagagcagctaaggaatatggagaattaccacaagtatattaattttgagggaggatggctatatgacctcagatatcctttcttgcattttcaatttttctgccttgttttaaagttacagttgtcctttataactttgaaaatcctggccgggcgtggtggcttatgcctgtaatcccagcactttgggaggccgagacgggcagatcacgaggtcaggagatcgagactaacctggctaacacggtgaaacaccgtctctactaaaaatacaaaaaattagccggcctggtggcgggcgcctgtagtcccagctactcggaaggctgaggcaggagaatggcatgaacccaggaggcggagcttgcaatgagccaagatcgcrccactgcactccagcctaggcgacagaacgagactccatctcaaaaaaaagaaaaagaaaaagaaaatcctaccaactccatacccgaggaacccttgaattgaatgattttaggaattccatttctcctaccagatgtttgtttgttttggaaactctgcatacttctcttttgttgctccttacttcattttggaaagagggtaatttatgccatgagaaactccagatgtttagagctgggaagtaggaatgtttgggcaagaaaaaagggaaaacataaataatcagaaatatgcttgttttagcatctaaaatgattattggatactgttcataatcatcatgggagctacaatttttaattgcttcaactcaattttagtataaatatgacctaatcatttgttcagctgaagaaacttttctgctggtgacactgcaattagcaaatacttcgggttaaytcctgaaaacctgatgcagaaaatcagattttcttctaagcttgtaatgatgctttgcaaaggtttccttaaggcttgaaatagtattcactattttccatttagctttaaagcatactgtattcagaagttgatatccacaatctttcttttaggaaaacaaattagcatgccaagaatatgaatttttaattgagcagaatctcttttaaaaaaataaagtgacctaacactttgtctgttttcctacctctccttttggtgcagaggcagtggtgtgaccattaaaagtgatttttatcccaatagaaagtatattggcccggcgcagtgtctcatgcctgtattcccagccctttgggaggccaagactggcggatcacgaggtcaggagttcaagacagcctggcaaacatgttgaaaccccgtctctactaacaatacaaaaattagctgggcgtgatggcacacgcctaataaacccagctactcgggaggctgaggcaggagaattgcttgaacctgggaggcagaggttacagtaagctgagatcacactgttgtactccagcctgggcaacaagagtgaaactctgtctcacaaagaaaaaagtatatcaagacaccagtctttagcttgatatttctgcttttctatttttaaaatccttttgtgaaatatataaaaatgcaaaattgtgagagttaacaattcttctgtagctatcaaattgtcattcctgtctgaatacagtctgctttgggagaaaaacatagatctgctttaagacatatatattaattaagtttcctttgattctacagtttggggattctcagcagttgcggctggtccgtattctgcgcagcaccgtgatggttcgcgttggtggaggatggatggccttggatgaatttttagtgaaaaatgatccctgccgaggtaaggaaccattctaagcatgaattacgtgttaggtatgcccccagcagtgatcttttaygcttacaggaagcattgatggtggggtctgtctsttttttattttgttaagctgcccaggtgtcatcccactagcacagattagaactcaggggtgccagcataggccagggagaaaaagctgaagaggttgatgctatttggggaggtaggtctagaggaatgcagtaatgagaattaagagtgtattggtgttactcgaatgtttgtttggggtattaaattaacactatcctagaaaggagcccggtgaagccctttaggttccctcttagtgcctcagatccctttgcctgtaattcctgtggctgttactcagggagagtgttaggcccttctcatacagggaagaactggtgagccccctggaccaggaggaaggataaagacacctacatgtgagcccattcacttctaagacaggtggccacctaagcaagaccatggggtgtctttctgctaaatgtgaaaaggctggcccaccagcccagaagcataaggagactgtcaatttaatatgagcatgagtggtggcatctgcagctagggggtgtgtggggactgcaacagggaagagatgaccggttccaattgctaaatcctcttcagctatgtccttgcctttttcctgttagcagagctgcatgtgggtgcacaggaggctcccccactgtctgccaatttgtctttcttgactagtttctgcgtttcctgccctgtctgtttctttctgtttacgtattttttattctagttcaccatcctgggagtaaaataaagcgctctgattccagctcttcgatttccagtcagtctcccataggttggcttttaagctttgtccctcttcctcacaccctagcccattgagaatggctttgcttcttaaactgtaacatctcttggttctgtgtatctgctgcattcatgaatgcttgaaatggccaaaccatagcttttctaactactcaagttgatggtgcataaaatactgttgagacagtgtccatggaatttgttttgagtttctatttaacaaatacttatatagttttatgtgccacacactattacaagtactttacaagtaacacatttatgcctcatatgaagtgtagatgctcttatctctgttttacagaataggaaattgaggcatagaaaacgtaaataatttgcccaaagacaaacaactagtaaatggcagagatgagattcaaattcagggcaatctgggtctggagtatgtgcccctagtcagcatgttatatctttcagaggctgacacacctttgtgtatgtttattattggatcacctgcataattattaaggtttatttataaacctagcagaaatgtttgctgtacagtacataacttctttggaaatgatttatagtcatattctgaagcatttagtgaggacagagctaaagatagcagttttcacatgaattcagatatgcccctaagtagttcctcttattttaactcattctgtgtttactacagtaaaccagagtaaaaattcagcagtaataattttcattagaggttccttttttaaaaaaattggggccaggtacagtggaatcccagtacattgggagcccaaggcaggaggattgttgaagctcagaagttcaagaccatctttagcaacatagtgaaaccccatctccacaaaaaaaaatttaaaaattagctaagcatggtggtacacacctgtgtagtcctaactactctggaggctgaggtgggagtattgcttgagcccaggagttcaaagctacagtgagccatgatcatgccactgcactccagcctgggcaacaaggcaagactcttgtctacaaaaaagtaattttgaaaacacttaaaaacttgaaagtatttagttttagaatttaaaagctgtcttttattgctttaatgagaaacaatatatgccattttaactttaactcagtaaaacaactttattcctttccaaatctatgaataaggtcctatttttcctgtcatgtatgatcagactaaataaaagagatattgcatgtggcattttggaatccttgattgcctgtttatttgctgcctgctctatttatgataacatcatgctgctggccaaggagaacactgcttgctttgtccttatcttagtatctaaaatttggaaccccaaggaaattggggagggccatctagaagctattttctatgaaagctagtaaccttttttagcatcccttggaacaagcaaggtaagactttcctgtgtctctccaggagtgctctcctggaactcagtaatcatctcaatccattgactgtggagagaactctccagaagttttaaatttcgtaactctgtcagtgatgggcaggatgagctatttttaatcaaataaaaaatggtgctaggcgatgaacacctaaggactaggatggattataataagttagaagggtatgaaggatgagaagagaacaaagttacttgaaactatattggaagttctataaggattaatgtggcttctggaaacagtgcttatggtaggttttgtactcatttatgttgcatatttccttgggtctctggaatgtagagaatgctatactgaggacagtacaagatgtgtgacaaggttcttaacaccagtgtgcactatcatttcttacctccttttacacagctattttaaaaggtagaagatatctcaaactgcatgtagcttttagtcatgtgtaaaaaaatgaaaatattttactagctagatttgccagtctcctggtactgccaaaatcagatatttcagtttctgaatgtatcygtggcacaggaaatcatgatgttttggatagagagaaaaaaagtgctcctgcctaaataatgggtatacttgtacctaaggtactgtgtatgtttttgatcattagacatattagctcccccagataagtgaacatctaggaaatttcatttatgaagatttaaaagacacattttgaaatagaactcattttttttttcagattgttatacagataaaatttaccatcctaaccatttttaagtacaggactaagtatatttgtgtcatactaccgtcaccaccgtccatccacagaactctcttcatcttgtaaaactgaaactctatacccattaaacaatagcttagaactgaattttaacatgcccgcatcagccagtttcaggtagccagcataactcccttagcaaagacagcctctttggtggtcaatgaactgaacttgaggtggctgccgtcatgtctggttctgtaggttcaatggtagatcttttctccagtgaaaagaatggtgagggggaaaatcctatcacagtagtcaaccaagtactaggaatcttctcttttttttaactttaggactataatacccaattttgggaaatatttgaatcaatgtaaatattaagagtacctttactactaaattcaagtgctagtacataaattttgcttaatcagaatttggtgtttccttctagttcgagaaaaatgtttactttttacttgtgggattgctccagaaatcaattttcacagcttccaactgtttattgtttgttgtcgcctcctcccatcccagccttttctattatcaaagtaaaagtattaattgcccccttaacaccttttttaattcttaaaattggccgctttaagtttatttctgaagaaagagctttcatttcttccaagtgatatgtatataaaatgttccttaccaagaatcgtttcattgccttgcatcttcaaatattttcttttaaaatgcaaatatccatgggagttgtagcatattaagctaatattagctaggcatggcttgggataaattaattattcattggtctcttgaccgagatgagagcaccagaaatgtgggaattttactattgtgagcttaagagcataaggaccaagaagatggaaattacagagagaggaaggaaaataaaagggagaagacaagcctctaaagccccaattaaagtaagccattatttttcacttgagtttagaccttcttaatgaggcctcatggaagcgtgcaggagctagctaaccactgtttacagtctcagattgccttaatgcctatgttgcgtgtctttggcatggctgtagtaacctggaaggatgacgttagagaattgttcacacgtctttgcatctctggccagtgaaatactatcccaagaggtgaccattggctggagatttccttatgaaaacagagactgtctcattatgtttatttgtttcgttatgacgtgtaagcgtaccctgagaaaattatgaactgtattttcccagcatcctgcatgcacccagctaggaaagcaagtgagacaccctttgggccctcagcagtcatttaatgaggcgttacaatgtacctacctcatggtggcctctggggctaacagggtcatgatataggagatcagcataggatcctgtgatagaattaaacaggtcctcagatcacaaaatgcaaaggttgctgttaacatgggataatcttcyttcttgtagtatctttcttatggaaagctattctatctgctcttttaaattgctttaatattctatatatagtaggtgttggcagtcacaaatttaactttgtggtttcagtcatgaaaattcatggatttgcatttgtttctgstgtgcaagagagccggtcacacagcgagagagtgagccccactggccactgactcctcactttaacacagcttggtgcttctgttcttcatccccrtgaaataatgagcacttctcaatggaagcacttagtgagttcatgaaggttgcgagatccattccttgaaactgttgagagactcttgttttcagaggctatttcagagaaacagaggctactctgtttcacacatacttactgaaaccctaaatgcaagcctcgcactgggatccaaaggtaaattaagatgatggtccctgcctgcagaagctctcagcctagtgcagggaacaaacatgtgaatacatgcccttctatttggtaaaatgaatggttgagagagcaagaggggaagagatgactctgcccatgaagatggagaaggtatcaggaaaaggacataattgggctgggcatagtggctcacgtgtacaatcccaacactttgggaggcctagtagggargatcacttcaggccaagaatttaagaccagcctgggcaacatagcaagaccccatctctgttttaaaataaaatacaggccgggtgcagcagctcatgcctgtaatcccagcactttgggaggccgaggcgggcagatcatgaggtcaggagttcaagaccagccgggccaatatggtgaaacgctgtttctactgaaaatataaaaaaattagccgggcatggtggcatgaccctgttgtcccagctactcgagaggctgaggcaggagaatcgcttgaacccaggaggcagaggttgcagtgagccgagactatgccactgcactccgtcctaggcaatagagggagactctgtcgcaaaaaataataataaataaatatatggccaggcacagtggctcacacctgtaatcctagcactctgggaggctgagccgggcggatcacccgaggtcaggagttcaagaccagcctggcccacatggtgaaaccctgtctctactaaaaatacaaaaattaatggcctggtggtgtacacatgtaaccccagctactcgagagactgaggcagcagaatcacttgaaccggggaagcggaggttgtggtgagctgagattgtgccactgcactccagcctgggcaacagaacaagactccatctcaaaaaataactaaataaaaataaatgtttgtgtgtgtgtataagtgtatgtgtgtatatactgcgctccagcctcagcgacagagtgagactgtatctcaagaaaaaaggttttgaaaaaggaaaaggaggtgttgcttcagccacatcttaaaggaggtaacacttgaccagaaggaaaagggatctggatgttcttggtacagaaaccacaagttcatatgaacagaagtgtcaacagctgaaaaagtaaggggacaagtagtcccatgggactgcagccaaatgtacaaggttagcgaccagataagactctggacgggtcagcaggaggggccaggtgatggatgccagaccactgggtcctgggtacttaccacattgtgcttcctagtccccaagatgtggtcctcaaaaaaacgaaaagtcacggtcaaatgaatttgggagatgccaagttaaagctctcccaagcagggaaatatagaggaccaaaccccttttgtaggaaaaccctagaaaacctcacttggggaattctgctataagcagtgaaacaccatggaaggattctgagctgttgacaacagattttcatttagaaattcattctgcaaaatacaaaaattagccaggcaaggtggtacatgcctgtagtcccagctacttgggaggctgaagtcaggggatcacttgagcctgggaggtcaaggctacagtgagccatgtttgtgtcactgcactccagcctgggtgacaaagtgagaccctgtctcaaaaaaaaaaaaaaaaaatgcattctgcagaatgagaaaatgagtgagggctgggtgggtggtgagatgagaaacaaggagaccagtaggaaggctgctacagttacccagtggggaggaggtgctccatgaaacacctgagtacaagggggcatgcacaggctcagggattcaagaggcatttgaaggtagaatcaatagactgaactgcccttgggagggagagacctacgttggtgccagggttttggttcctgactctggtcatgcctaatcagttgctggatataacttctggcatccagcaggaaggcctgccctactaatatatttggagttgggtgtgactataatggtagcactgaagcctcagtggatgagctcatcaccaggtcaagtctaaggggagaacaggactgtggacagacccagcagacatccatgttttagaagtgggcagggaggagtggtcagcaagggagcaggcgtccttgaagccaggggaggacagggtttcaaaaacaagagagcagtgtgtagtaaccctccacatgcaagttacaacagcagagagatgtttttacctaacaaattgtcagacttttttcctgtatgtactcatgctcatagcacaataattggccagaatgaagtaaatttaatatactcatattattttggagagtgtatgctagtaaaacattttggaatcagctggcatctatcaaccttgacacatggttgacattcatcagttgatgtttttaccttaggtatgcatcctttctccccagaaaatctacatgtagatatttatcctaggctgggcgcggtggctcatgcctgtaatcccagcactttgggaggccgaggcgggcagatcacgaggtcaggagatggagaccatcctggctaacatggtgaaaccccatctctactaaaaatacgaaaaattagccaagcgtggtggccacgcgcctgcagtcccagctacccaggaggctgaggcagaagaatcacttgaacccaggaggcggaggttacagtgagccaagattgggccactgcactccagcctgggcaacagaacaagactctgtctcaaaaaaaaaaaagaaagaaagaaatttatcctaaggaaatatcgtggatacatgcaaaatgttttacaaattgtcacagcattggctacaatgtttaaaatatttaaacaaaaatgcaatattggactggttaaataaattcacatccatatgatgaaataatacttagcagctagttaaaattttgcatgagacatgtagggcatggagtaaagtttctgatttttttaatatatacaagctgggcatggtggatcacgcctgtaatcctagcactttgggaggctgaggcgggtggatcacctggggtcaggtcagtgtttttgaaacactgtcctccccggcttcaaggacgcctgctcccttgctgaccacttctccctgcccacttctaaaacatggatgtctgctgggcctgtccacagtcccgttctccctcttagatatatatacacacacatatatacacttagtgtatatatatatatatatatatatatatatatatatatatatatatacacacacacacatatatacacttagtgtatatatatatatatatacacacacacacacacacagatgtgcaaaggagtaagacacaccattataatagtgatgtcccttgggttgtgagattaagcgacttttgttgttgttttggtttttgagacagcgtcttaatttctcacccaggttagagtgcagtggtgtgatgacagctcactgcagccttgacttcccaggctcaagcaatcctcccacctcagcctccagagtagctggatctgcaggcacatgccaccatgcctagctaattttttaattttttgcagagatggagtttcatcatgttgtccaggctggtctccaacctgggctcgagcagtctgccctcctcagcctcccaaagtgctgggattacaggcatgagacaccacacccagccattaagcaattttcattgccctcctgagatagaggttgtcagtgacctttgccagagcaatttccatgagtggtggggatggaagcgtgagtggtctgaggggaggagtggagacagcgaatgtaggtggtgatggagagagctaggctgggaatgtcttgggggtcgggggacaaagaggacaactcaagtggaagacgtgggttctaggtccacctctactgccactttgcttgacctcagcctctgtgagtacttmagtgtctctgtaacatagggatgctaattacagtcagctgcattattgcacattctgtgaactgtgcagtgcatagggaacatatcaccattatggcattagagaatgcccttcctaaaacatttaaaatgtcacttccttcaactgcaatgcaatttcaaagttttcctcttatatcttttttttttttttcctggcagagtttgctcagaagtgaatttttttttttttttttttttgagatggggtctcactctgtcacccaggctggagtgcagtggcacgatctcggctcactgcagcctccgcctcctgggttcaagtgattctcctgcctyagcctcctgagtagctgggactacaggcatgcaccaacatgcccagctaaattttttatttttagtagagacggggttttgccatgttggccaagctggtcttgaactcctggcctcaggtgatctacctgccttggcctcccaaagtgctgggattacagacatgagccacttcgcccggccaagggtcatgtattgttgaggcttgaggaggaaggaaacactggatcatggaaggaaacagcttagcatttcagggaccattaagtcatagatcatccagacaacagggctcttagagatcggttgacctgatcgcctctggtgagcctgaggaaactgaggccagagcaggaaaaaaatcacagttggcagcagagcttggactrtaactcagaggttttggtatccaagtgagtgcttttaacctgatactttgatatgttctgtcaacatataatatattgagaagaatttggatttgatttaggaatttggaaccatgctgcttggacacttatgcaacctgatttaaaacactgattctaccaaaattcctcaaattccttaagggacatatggggtagcacagatgagaargtggacaaaatttcctgccaccttctagatttatggtttctgaccagttaaacatctgttatagaaaagaatgacaaatattttgttcataatgattcccttttctccagcagtcccatttgtttagctgtgtctagtacttcataaagagtgcacagtttagggtggatgaggaggtagagggtttctgcaggattacatcttacagtgagaaataatctaagaacatattccagagggattatgtcttttaaattagtagcatctttcgcatttaacatttttgttggctgtgcgtgagatcttcctatggaatccacattttaagttctgggtgtgcagccccagaaagccataagacagcgctaactggcttnccgtgccgactccacgttctttgcatcttgatgttcctcctacttgcagttactcctttggccttttattgctttcagtttttcacttaacagtttctcactagcaagttttgtgcatggtcttgatctctttctctctccccaccgacatgtttacttcttaatgattctctcctgatctttttactgtcctgagttcctggactcctttctttaggattgttactgactgaattcaaatagaagagtctagacaatatcgatttcagtaatgtttttctctactctttcattaccacatatcctgcaaaaattaagcaaaaagtacacatgtactaagagagagaaaagaggggttttgatttaacttcagaggtttacgaactgttgcatctgctttacctcaagyagtcagtgtgcttaccccagggacagtggcaaagcaagacgctagcagcagagtgggctggtcctttatacacagagacttgcttattatacagttaacatatctgctatgggtaggaaycttgacaaggctgatgtgtcatgaatttatctctatttttgaagaacccacagatggtactaaacccatataacttatataactgttatcatggggtcaagccgctgtataaccgtcaaaaatatattttttagaagaactgacattgtgtgtgtgtttatttcctttttagcacgaggtagaactaacattgaacttagagagaaattcatcctaccagagggagcatcccagggaatgacccccttccgctcacggggtcgaaggtccaaaccatcttcccgggcagcttcccctactcgttccagctccagtgctagtcagagtaaccacagctgtacatccatgccatcttctccagccaccccagccagtggaaccaaggtatgtactgatctccattatgcccttcttccccaatcccaccctcacagatgttcattgttcacggtagcctctgaaagactccagtgaggagaagaaataaaaatgaaaacatgttttctattttagaaataaaacgtgaaaacacacagatcaagactgccctgttcctagcagtacacagatatatggcctttaagatgactccaaaggacatttattaaaatatgcactcagcctggttatgtcagaaatgtttatttcctcatgttctcagtttaagtttgagcccatccagtgttactacttttgaaaatccaggctggacacagtggctcatgcctgtaatcccagcctttgggaagctgtggtgggaggatcccttgagaccagaagttgaagaccagcgtgggcaacatagcaagaccatctctacaaatttctaaatttatcatctctaatttttaaatttagcctagcatggtggtgagcacctatagtcccagctactcaggaagctgaggcaagaggattgcttgagcccaggaatacaaggctgcagtaagctatgaactgcaccactgcactccagcctgggcaacagagtgagactctgtctctaaaaaataaaaattaaaaaaaaaaaaawtaaggaaaaaggacagaaaatccaggcactggctgtgcagtggagctaacagctaagtttgatgttatgatgggttatgtgtgaatgatgttagtgcctgcctggtccttctcatcctgatggaccaacatgcattttattttgttttctgtttctttaaaatttagtatcttctatttatttttttctgttcccaatgtgcaccctttttgttcctttttcaattgttcctgtccttccctttgratttccgtttcacagacttcacttcagttctctcgctgttatgacaaaccctggttggtaaacagtaaagctggcacccctatcagggacagccattctcctgacctccagctgcccacccccgaggtagagtatggctttgctgactgaggacacagtcaagacgaggccctcgctactggacttgaccagctcttcttcctgacacgaatccctgcactctttcatctctgtggtgcttgctgtcacagctgattcatctartccagtgttttcaggggtttctaactcggattcaccaaaattggagagaaataagagatgcctgaaactagattaataactttataacaatcttgagaatgatatttgctgagaatggtaaatgatggtcattgctgtagatttgtttattgatgtcatttataatcaggcctcttggaatctccaaatgtcagatactcagacgagttatgaacacttgaaattcaactatggcgcatgttctacaatgttctgtctttgcttagaacagaagagtggttggcgccacctgccctgagacacatgtccagggtggttggtattgccacaccacactggtccgaggcgtgggtgctgtctccttcagccaagcacagcaccagtgaacactgacctgaggctcacattctagcttctgaatttcttggcctaggcacttgagtttctgtagccttgatttgaatacacatgccagcaattaagcatgttcaagtgcagccattaaagtgcctgaacgcttttggaagagcagtgttttagaaataaaacatggactagtggcttgtctgatagtagtgcagtttgcattccagctcctaccaagaaacattggattcttgtgcctcaagacartgttgccttcagtcttggaaagccttagccagggaaacaagggatgcacaagaagtcaatggctatgaatgagctgctgttttgaggttcatttcacttcaagctaaaactccagttcagaaatatatctggtttagaatatgatctggggacctactgccactaaactactagactcaccctgcttatcttgcttttcttctttccttaatggctccagtttcataaaaatctcagttctattttaaattttagatgtttaatgatgtacaaattctcatacagttctgataaatcagggcttttgttctgtcttaaggttttattttctgtttcatttcattttgaggcttcatctttccttacttattggtgttctgtagccaggccatctcctgacttggaattctagcccgggttctagctgtggtcttccagcagcagtgcgcaggaaccttagcttctgaaactggtgttcttcctcctatgtggccaggaaattttgtgcttgagtgttaatcactttctatcgcttatgctttttctttataaatttaagaagtacagcaaacaatgagatggattgcttttctcttctgtttgcataaacgtcttaaaggtcctggaaaacaatttacataattgatttcaaagaaaaattagaatggcatgctgtagcatgtggcataagtaatgttttgggggtttttttgtttgtttgtttgtttgttttttcattttttaaaaagcraagtagagacaaggtcaaataatggatgtttaaaacatttaaggatcagcctggtcaacatggcaaaaccccatctctacwaaaaatacagaattagctgggtgtggtggcaggcgcctgttgtcccagctacatgggaggctgaggcaggagatcacttgaacctgggaggcagaggttgcagtgagccaagattgtgccactgcactccagcctgggcaacagagtgagactgcctcaaaaaaaaaaaaaaaaaaaaaaaacccacacagatttaaggctggacatggtggctcacccctgtaatcccaacactttgtgaggccgaggtgggcagatcacttgagcccaggagttcaagaccagcctgggcaacatggagaaaccctgtctctacaaaaaatacaaaaataagccagccactagggaggctgaggtgggaggattgcttgagcctgggaggtcgaggctgcaatgagccatgaagtatgccactgtgctccagtctgggtgatggagcaagactctgtctcaaaaaaaaaaaaaaaaaaaaaaaaaaacccacacatttaaaatactctttttcctccagttaagcctactatctaaaaaaccaaaaaaaatcactcaaataggaaacatagcacctattggtagcagtgataataatatgtagctcttttccagtttgggaaatgcttctattcatcatttattcatgcaagtttttattgagttcctcttctgtgctgtgcagaacacaggaagcaggggagagaatagaagtgtacaagcagtgttctgagtagtgagacaagacctctctactaaggtcatcctttcaatagagcccctgcagggaatgagggggtgagccacacgtgtatctggggtaggcttggggtgtggtgattgtgcaacaacagtccaggcaaaatgaacagcaaggggacaagactggtggaccctcactgggccattggtggaacagcaaggaagctagtgtggctgggatggactgatgaggagtgtggtagaaatgaagtcaaagaggcaggatttaatccctgatttcccaagagagaagcaaagacacaggtgttaatttcaatcagtcctggaacccagactcaaacccaggtctcctggttcttcatgcacagacttgttcctgatgtctcagtcccacagtcgtgtgcttctcatagtttatttgatccacaagttaagtaattttatctgcattttaccagtaaggataatgactaaaagatcttactaaagttactgcacctacttagtgttaagagattggggccaggtgcggtggctcacacctgtaatcctagcactttgggaggctgaggtgggcagatcacaaggtcaggagatcgagaccatcctggctaacacggtgaaaccccgtctccactaaaaaatacaaaaaaattagctggacgtggtggcgggtgcctgtagtcccagctacttcggaggctgaggcaggagaatggtgtgaacccaggaggcagagcttgcggtgatccgagattgcaccactgcactccagcctgggtgacagagcgagactccgtctcaaaaaaataaaataaaaaaagattggagtaatacttgaatctccatatcaaataggtgggctaaaactcatttcaaatttttaaccccaaaatcttgatacctagtattatttgaatttctttttcctttactcattcaccataattgtttgttgtaactattgtattcttactgaggattttttttttttcatttctaggggaaattagtaaaacaaaaggtatttgaagacattttgaaatttttatttggaayataaaactttgattttgggaattatcaaaatatatgacctaggatactttaagagaaatctttgttttcctggacttttaatttgcttttcaactaagcaaatataaggaggtgtaaggagaccttttaaagttgaatttctggcaaagattttaccaagtaaaatgtgacctttttattattttttttaaggttatcccatcatcaggtagcaagttgaaacgaccaacaccaacttttcattctagtcggacatcccttgctggtgataccagcaatagttcttccccggcctcyacaggtgccaaaactaatcgggcaggtaagtacctgccccgtgacctacaagccaggctgagaatttggaaacaacagcctatgtggaatgtttcactgctcccaaggagcgggtaatgagagtggcacttagtgtgatgcccagaaagacagacctgcagatgctcaagtgacctttactttttctgtcattacagctagctttaagctttccttctgagatgagatgcttccacagccaaagctgggccatgcgttctcatcagaaatgatcacatttgagagaatgtaaaaggaaatgtgggtcttcctcagacaccagtccagtgttgggatgagcagcttgctagtaatttttccaacacgtcatacttactatggctgctgttgaaccaagaaaggcaggggaagatcacatctgttctcctgctactgttcctcatgggaacctaggaatcttccttcatttcctggctggctgcttcccctcattttgcctctatccatcctgcccatggattagcccggctggcaggctcacccacctgtgctgaggtggttgagcaaccttgcttgcctccactttggggccatggaaggtgacagtgctgctgatagagtggctttctaatccccaggaggcagcttctcaagtagaatcacaaagccagaaaaggcttcagcaacttctgtatggatgaggaaactggggtgcagaaaggctgtgagatttgcttaagatcacacaggatcagaaccctagcttctgctcacttgttcttccaccccatgccatctctattaagtctgctgttttattcttgaattccagaccctaaaaagtctgccagtcgccctgggagtcgggctgggagtcgagccgggagtcgagccagcagccggcgaggaagtgacgcttctgactttgacctcttagagacgcagtctgcttgttccgacacttcagaaagcagcgctgcagggggccaaggcaactccaggagagggctaaacaaaccttccaaaatcccaaccatgtctaagaagaccaccactgcctcccccaggactccaggtcccaagcgataacactgtctaagcacccccaagccactatccactttgaatcctgctccatacattgggtgtatatttattctgaacgggagaagttatattgttaaaagtgtaaaagaataattgtgttatgaagctgccttattttttttctttttgtaagttactattttcatgtgaatatttatgtagataaaatttgcctcctggtaaccctgtaatggatggggcccagaaatgaaatatttgagaaaaacaagtgaaaaggtcaagatacaaatgtgtattaaaaaaaaaaaagcctattaatagggtttctgcgcggtgcagggttgtaaacctgctttatcttttaggattattcctaaatgcatcttctttataaacttgacttgctatctcagcaagataaattatattaaaaaaataagaatcctgcagtgtttaaggaactctttttttgtaaatcacggacacctcaattagcaagaactgaggggagggctttttccattgtttaatgttttgtgatttttagctaaagagagggaacctcatctaagtaacatttgcacatgatacagcaaaaggagttcattgcaatactgtctttggatattgtttcagtactgggtgtttaaaggacaaatagctgctagaattcaggggtaartgtaagtgttcagaaaacgtcagaacatttggggttttaaactgatttgttgctccctatccagcctagacaccagtaactcttgtgttcaccaggacccagacccttggcaagggataggctcgttggtgacattgtgaatttcagatttgttttatccactttttttgctatttatttaaatggtcgatcaacttcccacaaactgaggaatgaattccacgagcctgttctgaaaatgtggacgtaagacaaacacgtgctcgtcctttaatggagttcaccagcacacttgttaaccagtcctgtttgctttcgtctttttttgtgcgtaataaagtcaactgaccaagtgaccatgaaaaggggctgtctggggctcctgttttttagctgctgttcttcagctccgaccatgttgctgtgtgattatctcaattggttttaattgaggcagaaactgaagctctaccaatgaactgtttagaaacaagacacacttttgtattaaaattgcttgcagtaacaaatattttgtatttcctgattttcttttcaactattaccttatctataaatgttaccctggggtataatcatgttgtaggtacttaaatgcattccgcaaatcaaaatatcttgatggataaattatagagcttaatagatcttgttttatttcatccttgttaattttgtttaatatggctgggcatggtggctcacgcccataatcccagcactatgggaggccaaggcaggaggatcacttgagttcaggagttggagaccagcctgggaaacatagtaagaccttgtatctactaaaactaaagaaacaattaggcatggtggcacatgcctatagccgcaactactagggaacttaaggtgggaggatcacttgagcctgggaagtcaaggctacagtgagccacgattgcaccactgcaccccagcctgggtgacacagcgagaccctgtctcaaaaaaaaagacaagatattaacatgaacatgtaggatatctgtcctacttacatgattaaacaaatagtattatgtaaaaagatactagaaatcatggagatcctgggttctcagaatgggaccagtttgtcacactatgtcacagtatgctgaaatttctggttaaatggtagaatttcagaggtggaagcaaaatcggtcatcatatctagctcctttgttttacagatggagaaactgggatgggaaagtacaagagaaagtgatttccctgagctcacaaaatgaataaatgacagaagtgaaccttgaatccagtcctcgactccctgttcaagtctggcacttctatttcctccagcctctagtcagttggctttataatagagcagccaaatgttaacttagtaataagaagaaaagggctagaggcttcggaggtaaaggggctaagactcatgccacctgtgttcttggtcattaggccgcattccttaggacataggcatttggtgagatcgatgcatgtttgccaaagctgttaaggccaaatacccagattaaaaggaatttggagcctaatggattctgaaggaagtgcttactctgttctccatggaactggggaacttcaggctgccaggactttgtataggatagtgttttcaccctaatttgcttccccttctaggcctcttggcagcagaagcatgtgagaccagcttgacctccatcttcccagattgtgggttatggtccagaatcttaccaagtaattaaggttttctggggttttgtggcaaagttcagctggcagcggcaccaacgaaaagtgcatttctttttttttctttttttttttttcttttttttttttttttttgagatagggactcattctgttgcccactggagtgcagtggcgcaatctgggctgaccgcaacctccgcctcccaagctcaaactattctcctgcctcagcctcctgagtagctggagttacaggcacatgctaccatgcctggctaaaaaaaagtgcatttccattcaacaaatgcctgtacacaagaccatgtaggaaataacaagatgctaggaaaagggttaaagtataatcacagtcctgggccgggtgtggtggcttattcctgtaatcccagcactttgggaggctgaggcgggtggatcacctgaggtcaggagttcaagaccagcttggtcaatgtggtgaaaccccgtctctactaaaaatacaaaaattagccaggtgtggtggtgggcacctgtaatcccagctactcgggaggctgaggcaggagaattgcttaaacctgggagacggaggttgcagtgagccaagattgcgccattgaactccagcctgcaagaaaagagaaactccatctcaaaaaataaataataagtaaataaatatatatatatataatcacagtcctgtgatagaaatgctaaatgaggaaggaaaatttggtgtctgctggggccttgaatgatgcaataactagctcatatttattgactgcttactgtaagccagtgattgtgctaagtgctctatatacattctcactgaatacccttaacagttctatgatcattagcccccttttcttgataagacactgagcctgagagaggttaagatcacagagttgccaggtggctagggaaaacccttgttttgacactactttctccaagaaacctaccccacctcagttcccttccagtcctaatgttctggattccactcacatgtggtctgctcccacttccccgctcctctgcccttccagccactttgctggctcctctgggagcacagctttcattttgctttgggaaattgccgtgttcaccagctgtcacccctgttgctgtgggggctgctcaggggcagggggcttgtctgctccatctctggttcagggcacagcacagagcagctcacggtggttgttgctgaactgaagcgtgggcagaggcccttggaatggctaaaatctgctgtttaggtttatgggaatgtgaagcccgttgtttagaaaacacagctctatctccacatcctaaattgagaaatgatttctgttataagaatcagcccagcactgggcagcttgcagtctagctgggagcccagaattgcacaaaacaaacctgagaattgtacaggctggatctagggcctcaagtgatgtgcagtggattcaaaaggggcgtgcagagaggacagtgaagggggtgtgggcaggagattccgagactctgaccaagatgacatggggacaaagccctgtggattcagcctcctaaacagctttctcctctgcccctccaccccatcaccattagagactcatggtcattgtacccacccccacatctgattgctgtacctgcctccaactgcagggccctgactcctgtctccctctgatccatattccgctctgcttccaagctctggtcttgggtactttcaacggttattctgcattatccttagctcagtatccttatgggacagtcccagtccgcagggtagccccggcttctaggcggtggcatccacatctgctctgcccggagctgatgcaggtgcctcatggggggcgctctggggaccgcgcagaaaatttacgagcagtgtggaaatatacctgttgggtaaaagacaaactaggcgtgtgtttaaggcaccagcaaatgactatttagattaagaatttgttgtagaaaattttattgaagtgatgacttcaaaatgtgattttgagggcattatacacttgcttcgaggtttaatcttcaatccacatggcggggcaccataatctctggtgcccagggccctcgtctagcccctgtgaggccctttgcggtgcctcccttgccagcccctccagcctccgccatttgccccctgggctctccagtttccactgcccccctgcccgagcccagctccactgctgtgtgacctggcgtaagtcccttaaccgccgtgtgcctcagtttcctcatttattaaaagaggaggttccagtggtatgtaccccctaacgatgtgcgagcatcacagaaatgacacgagacacacactcagaacatgccttggcgtggcaagtgctgactgttgccattattaggctccccagccggggtctcagggccttggcacaagctattccctctgcctggagcactttcctccactgacctttcctggcgctccaggtcaactccaggagccttcccagtgcagtctaggtgccttctccttccgcagcgcctgaaccacacaggaataagtaaggcgagagcgcgcccagggaagagcaggtgtgcagaaagggactgagtcagtcgagacgtttccgcggggatccttctcttggcaggcctgcaccggggccgtggggactgagaagatgtgcacaggtggctcccgagtgctcgggaagggccccagagcttctggcccagctggaggcaggaggcggagcctcctccgcaaagctggatcagtaccggggacgcagggcgcacagctagggctggcgggggcggcccgactggggcgctgcctgggctcacgcgggagccaggtgggggacgcagggagaagcagccgagcaggtgccgagaaggaggcgcccgcagaagcgcatgcaggggccacggggaaggcgccaggaggcggtgaggggccgcggtggccggaacccgggccggctgctgcgggcagaggaacaggccccacccgcggggcttggctggcaccgcccggctctccagacggggctacggccgcgtgtcgggcccggtggcgaccacggcacaccacggcgaggcagccgggtggcaccactggcgggaccgggacggcgccgcggccttaggatctctgcgccgaggcccgcggcgggagccacgacggccctgaccacgctgacgcccaggctgcgggctcctcgcccggaccaaccgccagccacgccgaggtcgcacctcggggtcgccccacccgcaacacctgccgccgcccggggctcctagcgggcgcggcctccgcgcccaggccccgcccccgcgcccccattggtcagtcccgggggtgggcgggcggcacagacggctgagccggggcaaggactcgcgggaatcgcgccgcccgggtcgctgccggagctcgccggtcgcccctgcgctgcgcggaccgcagccacagccggactggtgggaacggcggcgacagacggattggctgacagtcccagccctcagaacagccccggcctcgaagcgttggcgtctgcgtccgcgtcagcgtccgcttgtcccggagccggggcaggtgcgcgcggggggcgctccagggaccgcgctgaggccgcagacgccgcccgccgagccccgccccctgctcgccgaactcagctccccgttcgccgtcggggcgtccccgggcccaggggcggcggcggagctgatgtgcgcccgctgagcgcccccggcccgccatggccgcgcgccccggaccgctctggcttctgggcctgacgttgtgcgcgctgggcgggggcggccccggcctgcgacccccgcccggctgtccccagcgacgtctgggcgcgcgcgagcgccgggacgtgcagcgcgagatcctggcggtgctcgggctacccgggcggccccggccccgcgcgccacccgccgcctcccggctgcccgcgtccgcgccgctcttcatgctggacctgtaccacgccatggctggcgacgacgacgaggacggcgcgcccgcggagcagcgcctgggccgcgccgacctggtcatgagcttcgtcaacatgggtgagtgcggccgcccgcgcggggaccctcggagtaagctggctgcaggggaggggcgcgcatccgcgggcggtgccgggccctggccgaacggggaatcacagacggtggacgcgaaccacaggggagtgggaccgccgtggttagggaaggtctaagggtcatgggggccccctgggctgcggggtggtcaggagcagagtgtgggggactgtggactcccaggcgctgccttcaccctgccccagacacacccaggagtaagaattaggtgatgtctttgcccacctgggctgccccgggaagacagcctggtcctggggagacaggtgagtaaacagaggccgggatgctgtcactgtgataaggacagtactgaggagagggacaaagttcagcgtggaaacctgtggtcacatcatcggagtgaccagagctgagtcgcgtgccctgagtccacagcaggctcttctctgtgcggagcctgggtggggtgcggctgtcaggggagcggctggggaaggagcagactcagctcgctggggcagggactgtggccttgtcaccctgggccctgcacttagcatgtggcctggtatagggtgagtgtccggtcctgtggaatggcccagtgggcagctggacccactgtgttctcccaggcaaagccgggcttttcctg

SEQ ID NO: 97319 - DNA, 159920 bp, Homo sapiens
  misc_feature (1)...(159920): n = A,T,C or G
ttgcccagcctcgctctgttgcctgttgccaaggctgtgttgcaatggcgcaatcttggctcactgcaacctctgcctcccgagtccaagcgattctcctgcctcagcctcctgagtagctgggattacaggtgcccgccaccatgcccagccactttttttcatatttttagtatttttagtagaaatggggtttcaccatgttggccgagctggtctcgaactcctgacctcagatgatccgcctgccttggcctcccaaagtgctgggattacaggtgtgagccactgcgcctggcctggaaagtcttcttgctctcccattaagtggccatggctccaactgcctgagctactgagaagtgtggccaagtattttgttgcactctttgtctctcatggtgtgagtttaatctcttcagtcagcttggaagcgtcccaatggctgagccagaatgtttctgtctcagtttttggcagcaggctggtcacaggcagggagggagaaggaaagaagttggggaacagcccccttacattctctctcatctgcaggccagcaccaggagctgctgctgaaacagctggctgagggacgacaggctcaggttggcagttggaaggtaggactaggttcagacttgtctctgcatatttctctatggaggacctttcctttctctgtctatcctgttctgcagggaggccaggataccctctcctgcccctgtcttcattcctctcttccctgtgctgactctctctctctccagagctcttctttctaacctttctgctcccggccatgagaaactatccttgccgacatgagggttccaagtgtgctgaagaggacagtcatggggagggagagagggagaggtttggttccacccgagcccatgatctggcagatgttagagcagttgcaaagtggccaggaaggcaagggtcataccctggaggctaccaggacagaggaccaagatgcctggagggagcacaacctccttaggtcagggggtatgggtgctgtgccattggagggaaattgtctcacaggtcgggcactggggaccaaagttcagctatcctagatttgacttgggcttttggggtagtatgagtatctgggttgtatcccataaaggcattctttacctgatagagagtcagtgaggtacctttgtatgtttggatgttacagagggaggagagattggcagggcgcggtggctcacgcctataatcccagcactttgggaggccgaggtgggcggatcacctgaggtcaggagttcaagaccagcctggctaacatggtgaaaccccatctctacaaaaattagccgggcatgatggcgggtgcctgtaatcccagctactcgagaggctgaggtgggagaatcacttgaacccaggaggtggaggttgcagtaaactgagatcatgccgttgcactccagcttgggtgacagagtgagactccatctcaaaaaaaaaaaaaaaagagggaggagaccagagtcctagcctgaggaaggaggacagttctgtgttggaagggcccccttgatacatcattatcttctctgtttctggttctgttcccctttccaggatctccattcatgttgtccaatctaagctgcctctgcccactaccttcaccatgtctgtttcttcatccagctcttaattcagtcttctggacagtaacagtagctgggaacttttatggaagccaggtaaggataaggacaaggattcccgttttgggggaggctaaatctgaatggtgcctgaatgccagctgcctaattatttaacactaggtagaatggagtctctgcctttctgtgaactcactgacctctgttgctgtttatcctgtcagtcctctatgtccctctctattagaaaggcctagggcctagttctatgcatatcacaatgcttgctgatgacttgttttctcttcccttttctttcctcttagatccccagaggagcaccctttctaacctggagcccagcatctttcagctccatgcccagagtcttaagcaagaggacctattcctttggggccccaaaatgctcctgaatgacctgtaaggactcgttaagaatagtaggatgaaggcttctttgcccaccctcccctccaaggccctgtttctgggctgcccgcccctaccttcttgaagtagctattatctgtcttatctactgaggcttttcactgcctgcccatccttgccccccatctcagctcactgcaacctccgcctcccaggttcaagcaattgtcctgcctcagcctcccaagtagctgggattacaggtgtgcgctaatttttgtatttttagtagagatggggtttcaccatgttggccagtctggtcttgaacttctgacctcaagtgatctgcccgcctcgccctcccaaagtgctgggattacagttgtgagccaccatgcccagcctatagctgtaccttctgagtgcaagctcagttgaacttggaaagtaatgggagttcccattctggtgagtagaatgaggtaggacactgctctagggcagtagtgctgggggatgcaaaggaggatgagatattctggtgggacttggatctggacagtaggaggctacctttcctcatctccagcttctgccttttttttttttttttttgaggcaaggtcttactcagttgcccaggctggagtgcagtggcatgatcttggctcactgcagcctccgcttcctgtactaaagcaatcctcccaccttagccccccaagtaataatatatgggactacaggcacacgctatcatgcctggctaatttttaaatattttttgtagagacaggttttcaccatgttgcccaggctggtctcgaactcctgggctcaactgatccaccaactttggcctcccaaagtgttcagattacaggtgtgagctgctaccatgcctagccccagcttctactgcttgaggctctctttggcatctccacacatcatccttagcagcccagactgcatttctgtagcagcctcttccctggtctcttctttcagtctctctgcctctaatccagtggctttaagaattttttggctgtgacttccagtaagaaatacaatttacattgtgacctagtaaatatgtgtgtagatttattaactgaaataaaaatgttatgatttaatttttatccttagtgggagtgatacactgatattttctattatatttcattaaaaaatgccttgtgactaatgatcctgatccttttcactacttggacaacacggaacatgaactgcatgggtccactttgttttttcttttttttgagatggagtttcactctgtaacccaggccagagtgcagtggcgagatcacagctcactgcagcctcaacttcctgggcttaagcgatcctcccacctcagtctaccatgtagctgggaccagaggcatgcgccaccacacccagctaattttttgtactttttgtaaagacagggtttcgccatcttgcctaggctggtcttgaactcctgggctcaagtgatcctcctgcctcagcttccctagtagctagtactacaggcatgtgatgccacacccagctaattataaaaggatttttgtttgtagagatgtgtctcactatgttgcccaggctggtctcaaacccttgggctcaagagatcctcctacctcagtctcccaaagcccttgggattacaggtctgagcccacacacccaacctcaacagaaatattaaatagcaatgtggaaaattgttatttgagctgtcaccaggtggcagcacatgatttgttgccagaagaatggtaccaaaaagcctttggtcagggggactgggctggggtgatctctcttctcccttcagagattctgtgagctaccaattaatcttcctaaaacactgccctgtttagtttatggtcctgctcaagaatagctctcacagcataaaaaacaaaagacaaatttgaatattggcatttaagcccaacccacatgcagcctcttctctctccaatatctcctaccacacttctttctttctttttatatttttttgggacagggtcctgctctgttgtccaggctggagtgcagtggcaccatccacagctcactgtagccttgacctctgggctcaggtgatcttctggctttagcctcccaagtagctaggaccacaggtacatgccaccattttgggctcattttttttttttttttctgtacagacagggtctcgctatgttgcccaggctggtctcaaactcctggcttcaagtgatccaccttggcctcccaaagtgctgagattacagaagtgaatcactgtgtctggccatattttttttttttttttttttttgagacggagacttgctgtgtcgcccaggctggagtgcagtggtgcgatcttggctcactgcaacttctgcttcccgggctcaagcgattctcttgcctcagcctcctgagtagctgggactacaggcacgcgccaatacacccagctaatttttctatttttagtagagacgaggtttcaccatgtttgccaggatggtctcgatcttctgacttcgtgatccccctgcctcggcctcccaaagtggtgggattacaggcgtgatccactgctcccggccctggccatatttcttaaactttatggccaccaggaatgcataccacttatactcttccaggaggatgaaagtcttaagatgtctgaaaaggggtctctaacccctgggagtgctaatacagtaaggcccatactgcttgctcttgccctcctcctgttctagtctcttcagtcatgagattatgagctcctgatgtccaggcacatgcaaaaagtgaagaaatatgtgccttgaacagctgggcagaattcttagctgggagcggtggctcacgcctgtaatcccggcactttcgtaggccaacgtgggccgatcacttgagtccaggagttacagaccagcctgggcaacatggtaaaccccgtctctacaaaatatacaaaaaattagtcaggcatgctggcgtgtgcctgtagtcccagctatccggggaggctgagttgggaggatcatcttaatccaggagtttgaggctgcaagtgagccatgatcgctccattgcactccatcatcctgggcgacagagtgagacccttctaaaaaaaaaacaaccaacaaaaacaacaaaaaatcccaacttattccccaccagctttctttcaaaatctgttttcaagctagctgaagtgttacctcctctaagctttcacttaaccgaatctcatagtcatgattaattgcttccctagcattttgtttagctctactgattgctcttactatttcaagtcggtattattgatatattttttcctcctcactatactgaaatcctgcaggacgcagcattcttaccgcttttccttactcagctataccttggccaacccgaaagccgcgccagtctagtccattttctattggctttatcaattaccaatcatttctgtgtttaacatttttattggtccatcttgtgtttactgccccgccctctaagaggctcctggacttgggtttcccccaggtgtattccctcctcctcggttccgcctttcccacacactgcttcttctgtttttacctcgacttccttcctattggttcccttcgtcctccggagttggcacctaaggctgttgattggcttttctggacgcccattgtgcccaccctcataccacgtggcattcctagcgctaattgggcaattccactacctcgtttatcaggagttgacggttgactggctactctgagggagggcttgagggaggggcgtggccagccgagaccccgcccccaacccccctgctgggccgggtaggcgtttcagtctttcgcggcccgggagctcagcagagctaccagctgccctgttggcttcgctggtcggatcgtcctcctggccccgccaaacaggcggggggagcggccccgactgtggggccatggcagtagtctcctcgttcgccgccgccgctagcctagctgagtcgccggcttctgcgctaggggctcccaccgcctccgcaggctaaggagccgctgccaccaacgagctgtgagggttactatgctccctctttgccgccgtctcctcctcttgcccgcgcaggcacccctctggctgctcagtcctgcctcaggtaacgtgaaaagaggacgggggtcacaaacccgggcatcctgcctggcccgcgcgcgctgccgctccacmtcctctgccccggagcagaggcgcctgcgtccctccgcacccgacgggacccctcggcttcccagaggtccccctctcagcggcggcggacgctcccttcctggccgctttcccctttccttctcacttccctcaggctccccgccacgtctgctcccccttagaacctgggaacccattagaagttacctcgctcgcattagggatctttcgttttctcggaaaactcttgtttcagagacttccagctccccactgagcgcctccctgctcgcatacccgctcctgcctcagagatctgggttccttcacttgacttccctccgatacactcttccctcgaaaacgttcacctctacccaggaaaacaattccctcccctcagaccctactgccttccccctcttctttcctcgcttgtcatcgtctcccttcctttcccctctctgctttttactcttcgctgtgaagagtggactaagccagtgttcagatttcgctacaagcgaaatccaggtttgcgtaatttaaaagtctttaaattgtatacctctgagaagaacttgctgaggaatttggacttcrtgctgcatgcatggggagccgttgaaggttttgtaagcaggagcttggtatgattgcattatctttggtgaaaatatagaggaaggattgaaagtgaagaccgtggaggcggaaaggccaggtaggcagaaaacgagtgtgctcatccaggcgggagggaatggcccgaaattccaagaggtttcaaaataaagttgagaagaatagtagaaagtttctgacttggctgatggtgtgaatcggtagtgttaattgaaatagggaacatagtctctggttataccaccctcaacgctcctgatctcatctgaaatagggagcataaaaaagcaattttgagagaaggtaataaatttggttttgaacaagttaagtttcagggtttgtttgttagtttttgttttttttgacggagtctcattctgtcacccaggctggagtgcagtggcacgatctcagctcactgccacctcctcctcccaggtacaagcgattctcctgcctcagactaccgagtagctgggattacaggcatgcgccaccacgtccggctaatttttgtacttttagtagagacggggtttccccacgttggccaggctggtttcgaacgtctgacctcagtcaatccgcccacctcggcctcccacagtgctgggattacaggcgtgagccactgctcccagccgagtttgaggtgttttgaaatatcactgtgggtatctggaaatttgggtctgaaaattgggagaaagcttggacctggatacataaatttggagggtcaagagaatatatgggggatatttgtrtgccttagtatggaatggtaatactgaaagatgagaagggctgtggaccagaaggagcatcattgtttgaaaggtaatagacactgaaaaagagagattaaaggaacgggacaagaactagaacataacagcattataataggagccaaagaaaggatttcaagaagggagtggggggcggtgactatcaatgtcacgtgctttcgaggtccagctgaatgagagttaagaagctttttttttttttttctttggtgtcagggtctcactctgtcgcccaggctggagtgcagtggtgcagtctcggatcctcccacctcagccttctgagtagctgggatcacaggcaggagccaccacacccagataattttttgtattttttgtagagacgggatttctctgcrttgcccaggctggtctcgaactcctgagctcaaagctatctgccttccccsgcctcccaaagagctggggttacaggggtgagccatcatgcctggcctgccctatatttagcaatcaggaggtcacttgtttcctctgaaatgcagttttggtagggtggggatggcaaagaaggtagtagtgagatcatgatggattgaggaataaatgaggagaaatgagtaaaattattctccagagtttggttgtgaaggagagctggttctagtgaaactcatctttattgagaatatactatatgccaggtacataaagatgctttatagatcacaacagccttgtggttaacatgtcagtatccctcttttacagtggagagtactgtggacaaggatttgagcaggtatgtctagttctgaaacctgtgttctttccattatggcacatgtgtgtttttcttttcagtacaggtgaaacagttctgtaagtgaggggaaggttcatctaggaaatatgtcagtcaggcattttgccctttgacaccaaaaggatagtagtgaaaatggataatgatgtggtagaagggaaggaaagtgagggagtttaacagatggcyttatcgatgtgattacttatctgtggagaagtcagtttggagactgaagacactatggtgagtttctgacttgagtattatggccatgggaatcttaaatggaaaatgaaagagaataaagatttaacaaaaaaaattgttggccaggtgtagtggctcactttggattttttaatcccagcactttgggaggctgaagtgggaggatcgcttgagcccaggagtttgcgaccagcatgggcaacattgtgagacctcgtctctacagaaaattaaaaaattagctgggtgtggtggtgcatgcctgttgtcccagctactggagaggctgaggtgggaggattgcttgaaccgggaggctgaggttgcagggagtcaagattgtaccactgcactccagcctgggggaaagaaaaaaaaaaaagcaaaaaaaaactcaggagctaaaagattgttgaccacattgagggtcctactagttagaaataatatatttgtaatggggcccaggagcatggattttacactttcttcaacagcctaagaatagtaggacaaaaaagatggttggattgattcaaaatggaaacttgcaggacagaaagataaaatgggaagcaactttacactgctattgatagtgtaggagatatgtttcattccaagggaccaagctgggagttataagaagcaaaatctagagggaggctggtgtacttagagaataaaaagacaatcagaaatgtggttgaagaccagattttgtaagaaatatataattggacagcccagagttcattatttcaaggtaaagacaaaaactggcttaactgtctcaatgctgttgaaggggaatggaggtgtaggttattgaagtagtgggagattagggggctgtgttgaatatgtcatcaatatgaatgtcacagttgtccagcatgatagcaggagattgagcagaggagatagtaagtcctataggtgggcctgctcaccaaggagggacccagagttggattggtggttccttggcacttgttgaaaagtagtaccaaatggtacagatgtttgtatatgaattaatggtgatatcctcagatacttgatgccctggatgtatgatgtgttattctctcttacagatatatgtttgggatagaccctcaaacacaaaaaatcctttgtaagcttgacatatgatgggctttgattctgtttaaaatatatgtgctggctgggtgcggttgctcacacctgtaatcccagcactttgggaggccaaggcgggtggatcacttgaggtcaggagttcgagactagcctgaccaacatggagaaaccctgtctctactgaaaaaaaaaatacaaaaattagctgggcgtggtggtgcatgcatgtaatcccagctacttgggaggctgaggcaggagaatcgcttgaacccgggtggtggaggttgcggttagccgagatcgggccactgcactccagcctgggcaacaagagcgaaagtccgtctcaaaaaaaaaaaatgtatatatgtgtgtgtgtgtgtgtgtgtgtgtgtgtgtgtgtatgctgggaggctagggactctccacctcaggatcctcagtaacatttttttatggttttagttaattgtgtgtgtgtgcgtttgtttttttttttaattaatttttttttatggggtcttgctctgtcacccaggctggagtgcagtggcaagatctcggctcactgcaagctccgcttcccaggttcacaccattctcctgcccctcagcctcctgagtagctgggattacaggcgagggccaccatgcagggctaatttttgtatttttagtagagatggggtttcaccatgttggccaggctggtctcaaaaggttttagttaattgtaaaaagaaaattacacatttaaatatgctcatcccggacttattttgaggagaaaaytgacttgcttttatgctttcttccctgtatgaaagtatttatacatatattcttagtgtcatacatttcattttgttttgcaaaaagaatgtagtgttggaatttgaaacctatggtaaaggcatttatgggaatttcatctccttctagtagatgaagcccaattattacattgtattgtgtgggtgatggtgaatgttttgacccaacaatggctattatactatttacaaagtcatcatatggagatgacttcagtgtagtctcactagtgttattttccctgaacaatcacaggcagtggctgtttcagagaaaagcctggttgtaataagttttatgtcttccattcctgaaaatttccaaaaggcagtgtgataaaaggaaaagaacattaggaaaaccttagttgtattcaactctgttgttattaactatatgatggttaatataaaggcaaattacttatcttttgtgagctttagtttttttttttaagatacatttaatctttgaatagataatacattcaactggttattaaatgtaaacttttttaatatataaatttagggctgggtgcggtggctcatgcctgtaatcccagcactttgggaggctgaggcaggtggatcacttgaggtcaggagttcgagaccagcctggccaagatggtgaaacccccttctctactaaaaatatgaaacattagctgggtgaggtggcctgcgcctgctatctcagctacttgggaggctgaggcaggagaatcacttctacccaggaagtggaggttgcagtgagccgagatcatgccactgtactgcagtttaggcgacagagtgagactccgtctcaaaaaaaaaaaaataaaataaaaaataaatttatataacagtgaaaagtcggctgggcgcggtggctcatgcctgtaatcccagcactttgggaggccgaggcgggcggatcacgaggtccggagatctagaccatcctgactaacacggtgaaaccccgtctctactaaaaatacaaaaaattagcagggcgtggtggcacatgtatgtcgtcccagctactcaggaggcggaggcaggagaagggcgtgaacccgggaggtggagcttcagtgagccgagatcgcgccactgcactccagcgtgggcgacagagcgagactccatctcaaaaaaaaacaaaaaaacaaaaaacaaaacagtgaaaaatcttacttccatctctgttctttattaacctggttccatgccctctcccaaacactttgaatagtctctttatattcttttagactttattttttatttttaatttaatttgatttaattaattaatttatttattttgagacggagtctcgctctgttgcccaggctggagtgcagtggcgcgatctcggctcactgcaagctccgcctcccgggttcacgccattctcctgcctcggcctcccgagtagctgggactacaggcgcccgccaccaggcccggctaattttttgtatttttagtagagacagggtttcactatgttagccaggatggtctcgatctcctgaccttgtgatctacccgcctcggcctcccaaagtgctgggattacagacttgggccaccgcgcccggccctttattttttatttttgagacaagagtctcactctgtcgcccaggctggtgtgcagtggcgcagtctcggctttctgcaacttccgccttccgggttgaagcgattctccagcctcagcctcctgagtagctgagtagccgtgcaccaccacgcccggctaattttttaatttttagtagacacgtggtttcaccgtgttggccaggctagacttgaactcctgacctcaagtgatctgcccgcctcagcctcccaaagtgctgggattacaggcatgagccaccgcgttcggcctcttttagactttctttaggcgaatgcttacaaataagaatatatggctgggcgtggtggctcacgcctgtaactccagcactttgggcggcagaggccggtggatcacctgaggtcaggagtttgagaccagcctggccaacatggtgaaaccccgtctctactaaaaatacaaaaattagccaggcatggtggcaggtgcctgtaatctcagttactcgggaggccgaggtaggagaatcacttgaaccaggaaggcgcaggttgcagtgagccgagatcgcgccgctgtactccagcttaggcgacaagagggagactccatctcaaaaaaaaaaaaaaaaaaaaagaagaattaaaaatgaaatgatacagttggcccttgaacaaaacaggggttgggaagccaacccctgtgcggtagaaaatccaagtataatttttttttttttttaagacagaatctcttgctgttgcgcaggttggagtgcagtagcaggatcatggctcgatgtagactcaactttgtagactcaagtgatcctccctttttagcctcctgaatgagtagctgggaccacaggtgcatgccaccatgcctggctaatttttttttttttgtagagacagggcctccctatgttgcctaggctggtctcaaactcctgggcatcaacactcctcccatttcagcctccggaagtgctggaattactggcatgagccactgtgccttggccccaaatataatttttgaccccccctccgccgccccctcgcggcaaaacttaactactgctgttggtgatggtgttgcataacctggcttcattaatttcctttttttttttttcttttttctgagacggagtttcgttcttgttgcccaggctgtagtgcaatggcacagctcactgcaacctctgcctgccgggttcaagcagttctccctcttcagcctcccgagtagctgggtttacaggtgtgcgccaccatgcccaactaatttttttgtatttttagtagagacagggtttcaccatgttggccaggctggtcttgaactcttgacctcaggccatccgcctgcctcggcctcccaaagtgctgggattacaggtgtgagccaccacgcccggctcctcttttttgttgttgttgtttttttttttttgagacgaagtctctctctattgtccaggctggagtgcagtggtgtgatctcagctcattgcaagctccacctcctgggttcacgccattctcctgcctcagcctcctgagtagctgggattacaggtacccgctaccatgcccggctaattttttttgtatttttagtagagatggggtttcgccgtgttagccaggatggtcttgatctcctgaccttgtgatctgcccgcctcagcctcccaaagtgctgagattacaggcgtcagctactgcrcccggacattttttttttttttttgaattggagttttgttcttgtcacccagactggagtgcaatggcgccatctcagctcactgcaacctccacctcctgggttcaagcaattctcctgcctcagcctcccgagtagctgggattacaggggcctgccaccacgcccagctaatttttgtatatttagtagagacagggtttcaccatgttagccaggctggtttcaaattcctgacctcaggtgatccaccccccttggcctcccagrgtgcctggattacaggtgtgagcaaccacgcctggccccaggtataatttttgacttcccgcaaaacttaactgctgttgctgttggcattgcatagcctggcttcatgaatttacttttttttttttttttttaatggctgaccactactgctgcagatctcaatctgtggtacatatcaagcaattcaaatttttatttatttatttttttgagacaggggcagttgcccaggctggagtgcagtggtctgatcatagctcactatggcctcgacctcccaggctcaagccatcctcccatctcagtctcctgagtagctgggactacaggtgtgtgccaccactccaggataagtttttatttttttgtagaggcatggtctcactatgttaccgtggctggtctcaaactcctgggctcaagcaatcctcctgccttcagcctcccaaagtcctgagatcacaagtgtgagccaccatgcctggccaactttttcgtataatgtcatgacctttctgtttcttgagagcacttccagcattagtggcacttggtatggatctcatggtgttattcagggtttacagtattgcactaagcatgatgaaaaatatgcacgaaccttgagagatcactttttactgtgacactttttactggaggaaggaactgctcacgtggagacgattagcatcacacagcattttaggggctactcacaacacttgctcactgaaacagcaacaggaggtggctccagaattattacagaagtacagtatatactatagtcaattttatgcagttgtgatttaatactgcacctttccatttgtttactgttgactatgaatggcaccatgtatggtttgtatttgtgtgcataagtttttatacattttaactttttataatagatttgtatatatcttatagtaaataataaaatagactagtatctacatatattttctgcattcatgacatacctaactttttcttaatttttttgatgtttctaggctaggtgttttgtttctgagtttttttcaaaatgttatacatctccaaaaatttaaaaaatatatttgttgaaaaaaatctgtatgtaatacagctttgcctgtagtttcagctactccagaggctgatgtgggaggattactcgaggcctggagtttgaggccatagtgtgctatgatcacacttgtgaataactacagcacatgagtggacctgtacagttcaaacccgtgttgttcaagggtcaattgtatagtcctgtttttcccacttttcatgtacagttgcccatggttccccactgttctgcacttcccacccccaatcttgcttattttttttttgagacggagtgttgctctgtcgcccaggctggagtgcagtggcgcaatcttggctcactgcaaactccgcctcctgggttcacgccattctcctgcctcagcctcccgagtagctgggactacaggcgcctgctaccacgcctggctaattttttgtatttttagtggagatggggtttcaccgtattagccaggatggtctcgatctcctgacctcgtgatccgcccacctcggcctcccaaagtgctgggattacaggcgtgagccaccaggcccggccgcttatttactttatatatcttagagacctttccagatcagtacatagagagcttcctcattctttttttttggttatatatattattatttttttgagacrgaatctcacttcatcacmcaggctggagtgcagtggtgcgatctcagctcactgcaacctccatttcccgggttcaagtgattctcctgcctcagcctcctgagtagctgggattacaggtgtgcaccaccacacctggctaatttttgtatttttagtaaagacggggtttaaccatgttggtcaggctagtctcgaactcctgacctcaggtgatccacccaccttggcctcccaaagtgctgggattacaagtgtgagccactgtggcctatatatatattatttatttattcatttattattattattattttctttttaatcacctgcatagtattccattgaatggatgtatcataatttatttaactaattccttataatggacatttatgtttccagtgttttgatattatatacaatgctgtaaaaagggcctttgaatgtgtcattttatatgtgtgcaaggatatttgtgggataaattcacagaagtgagatttcttttttttttttttttggagactgagttttgctctgttgcccacactggagtgcagtggcgcaatcttggctcactgcaacctccacctcctaggttcaagcaattcttctgcctcagcctcctgagtagctgggactacaggtgtgtgccaccacgcccagctaatttttatattttaatagagatggggtttcaccctattggccaggctgatctcgaactcctgaccttgtgatccgcccacctcggcctcccaaagtgctgggattacaggtgtgagccaccatgcccggccctcagtcttttcttttatagcttttggatattgagtaaaaaagatagaagagcctgactgggcgtggtggctcacgcctataatcccagcactttttgggaggctgaggcgggtggatcacctgaggtcaggagttcgagaccagctgaccaacatggtgaaatcacgtctctactaaaaatacaaaaattagccgggtgtggtggcatgcgcctgtagttccagctactcgggaggctgagacaggagaatggcttgaaccagggagatggaggttgcagtgagccgagatctatcttgccactgcactctggcctgggcaacagagtgagactccatctcaaaaaaaaaaaaaaaaaaaaaaagaagggccttctgcatttcagtcctttatttttttaatctatccgatgggaacaagaaaacaattattgtgaagatcaaaatgctctgtgaactgtaaactgtaaatcattatacagattaaatatggtgttatttattaatttgtctttggaacaagtgtggaggctattctctcttcctctgaattaaataaaatagaataatataattttttgggggggctgggcgtggtggcgcatgcctgtaacagctgctttggagggtaaggcaggagaattgcttgaacacaggaggcagaggttgcagtgagtcgagattgagccattgcactccaacctgggcaacaagagcaaaaactccgtctccaaaaaaaaaaaattttttttttctttctgcagtatggaaaactagggtggtattgatcttgtggtcagtgttttccttggacaatttcatggaatcttcttcacaatgacttccacaatgatttcactatggaaatcataaagtattttttatacttagtcctattattctttgtattaggtgtaactagaatctgactaaaagttctcaacatttgtttcactttcacattacatagtatttactttgggttttgtattgctactgtttgttaggaatttgtattttggaaggatgttaaaaatttttttggcgattataaaagtaatgcatattcattaaggaagaattggaaaatagagattttaaaggagaagatacacattattcataatttgcccatgattcaaaaagttaaaaacaggctgggtatggttgctcacccctgtaatcccagcactttgggaggctgagacaggcggattatgtgaggtcaggagtttgagaccagcctggccaatacggtgaaaccccgtctctactaaaaatacaaaaattagctgggcatggtggtgtgcatctgtaatcctagctactcaggaggctgaggcaggagaattgcttgaacccaggaggcagaggttgcagtgagctgagatygtgccactgctctccagcctgagcgggccacacagtgagactctgtctcaaaaaaaaaaaaaaaagttaaaaaccattgttaacattttggactgtatcctctcagaattatttgtctgtgtatgtctatattgtcgtcaccatctctccaggatttggcatagtgcctggcccgtaagaggtgctaaataaatatatgttggctgagtgaatgaaagaaggagtatgttttttacattgaaaatgtggaatctcgatgtcctatttattttgctttttctccactgtacattttgactcaatattgtagtattatactttgtattgccatagtttgaaggtaagtttgagtccaagcccttagcttgaactaaaagagctcatagtctggaagctcatagtccagtgaaagagatgataagcaacaattaaaatactatatgatgactataataactaagacttgtgcagggtgatatcaaagcacagaaaatgagattgaggggtcagagaacacctcccacatgagatgattactgagagagtcatgtggaagaatctgggaagaacacaccagggagaaagaatattacatgcatagatattgaagtgtgagcagggctctacaaatatagcaattctctatgtttggagtagattgtgactgcagatagaggaatggacatagatgaggctggagatgtgggtaggggtcaaatgaggcagaacttttgtatgacacatgaatgattctcagaagtttacttagcctggtgaaacagattgaaaaaagtgtgagagtggagctaggaagaccaaaaagacattaattgagtgccaagtaagtagtatagtcagattactacaagagctagaatgacatgaacatcatataagctgaggcagaaagtcaacactacatcagaagggtgcgttaagtgtagggaataatgattagcctaattatagtggagcagagtagggaataatgattagcctaattatagtggagcagagtcttcgaatgccgggctaaagaattttataagcaacagatatcattgaagatttttaactgtcacctgtattgtctgaacagttacaggttgcagkttgcttccttctggctagtctgaaatttggttaaaatctttctttttttttttgtttttgagatggagtctcgttcagctgcccaggctggagtgcagtggtgtgatctcagctcactgcaaccaccgtctcccaggttcaagtgattctcccgtctcagcctcccgagtagctggaattacaggcacccgccatcrtgcccggctaatttttgtattttagtagagacggggtttagccatgttggccaggctggtcttgaattcctgacctcaggtgatccacctgcctgaaatttactttcctgaacttttatcaggaaaaaatattaaaggaagcaaacctctatcagaaagttaaagaaattccatctattatatatcagtatgaattcagtttaatgactatatcttttgtatttgtttttttgattttttttttcttttttgagacagagtctcactctgtcacccaggctggagtgcagtggtgcgatttcagctcaccgcaacctctgccttctgggttcaagcaattctcctgcctcacttaggctcctcagtagctggaattacaggcatgtgccaccgcgcctggctaatttttgtattttttttttttttttttttggtagagacgtggtttcaccacgttggccaggaattcaagaccaatctagtcaacatagtaagaacccacctcttcaaaaaattaaaaaatcggccaggtgcggtggctcctgtctgtaatcctgggctcaagggatcctccccttggcctctcaaagtggtaggattataggcatgagtgactgtgcctggctacctcattctttttttttgagatggagtctcactctatctcccaggctggagtgcagtggcgtgatctcggctcactgcaacctccacctcccatgttcaagcaattctcctgcctcggcttcccaagtagctgggactacaggcgtgtgccaccaggcctgtctaattttttgtgtttttagtagagatggggtttcaccgtgttagccaggatggccttgatctcctgaccttgtgattctcccaccttagcctcccaaagtcctgggattacaggtgtgagccaccgcgcctggctagctacctcattcttttaatgactacataatattaagttgtatggatgcacatggattgattgattggtcttgctctagtgccgaggccggagtgcggtggtgtcatcttgactcattgcaacctcygctcctgggctcaagcgattctcctgcctcagcctcccaagtagctgggactacaggcatgggccaccacgcttagccaatttttgtattttttgtagagacaaagtctcctcatgttgttcaggctggtctcaaactcctaagctcaaatgatccacctgcctcgggcctcccaaagtgctgggattacaggtgtgagccattgtgcctggcctgtactgtaatttatttaatctatctctatttttggatatttggrttgtctccatttttctgttactgtattagtcagggttctctagagggacagaactaataggatatatgtatatatgaaagggagtttattaaggaagattggctcacatgatcacaaggtaaagtcccacgataggccgtctgcaagttgaggagcaaggaagccagtgacaaatcagtccaagttctaaaacctcaaaaagtagggaagctgacagtgcagccttcagtctgtggccaaaggcctgagagcccctggcaaatcactggtgtaagtccaagagtccaaaagctgaagaagttggagtctgacattcttgggcaggaagcatccagcatgggagaaagatgaaggccggaagactcagcaagtctgcttttccatcttctgcctgctttattctagctacactggcagctgattagatggtgcccacccagattgagggtgggtcttcctcgtccactccactgactcaaatgttaatctcccttggccgcaccctcacagacacactaggaacaatactttgcatccttcagtccaatcaagttgacactcagtattaaccatcacagttaccaacaatttatactttaatattcttgtacatatatctttgtgtactgatagcaactgtcatttttcatggctataaaaatattctcttggccgggtgtggtgggggctcacgcctgtaatcccagcactttcggaggctgaggcrggtggatcacctgaggtcaagagttcgagaccagtctggctagcatgatgaaaacccgtctccactaaaaatacaaaaattagccaggcgtggtggcacatgcctgtagtcccagctacttgggaggctgaggcaggagaattgcttgaacccaggaggtggaggttgcagtgaaccaagatcgsgtcactgcactccatcctgggcaacagaacgagactcaaaaaaaaaaaaaaaaaaaaaggccaggctaacacaaggaacctaacttcctctttcctcttgattactttctttcccacagtctctgaaattctgaaatagccctctaacatcagaagaaaaggtgagttgcctttcttttcttttctttttttttttttttttttgagatagagtcttgctctgttgccatgctgtgcacccagcccatgagttgcctttctgccccaagtggtccttttcaggccttctcatatttaactaggaaaattgatcaaaggagatattatcctggaaattcataaattcacctagtgctttaccatctcacattatttgcatcgggtccaatattagttttgtgttatttcatattccagcatataaagttatagatacatttagtatacacagaagatcagaaactgcattaaaaaaaaaaaaagagatggaggccaggtgtggtggctcacacctgtaatcccagcactttgggaggccaaggcaggtggccaaggcaggccaaggtcaggagttcgagactagcctgaccaacatggtgaaaccccatttatactaaaaatacaaaaattagcccagcgtggtggtacgcacctgtaatcccagctactcaggagactgaggcaggagaatcgctcgaacccaggaggtggagattgcactgagctgagatcataccattgcacttgagcctgcacgacagagagacattccgtctcaaaaaataaataaatacaataaaaaaaaaagagatggggtcttgctatgttgcccaggctggtctcaaagtcttggcctcaagcagtcctcctgtcttggcctcccaaagtgctgggattacaggagtgagcaactgtgcatggcccagaaaatttttttttgagaccgaatctcactccatcacccaggctagagtgcaatcttggctcactgcaggctccgcctcctgggttcaagtgattctcatgcctcagcctcctgagtagctgggactacaggcatgcaccaccacacctggctaattttttgtgtatttttggtagagatagggtttcataatgttggccaggctggtctcgaactcctgaggtcaggtgatctgcttgcctcagcctcccaaagtgtgagccactgcgcttggccaaaaaatgtcatatatgatcttaatatcattattatacttaactaaattaacagtaattttctactattgtctggtagtcgtgcttattaaaacttccccaattggctgggcatgatggctcatgcctgtaatcctagcactttgggrggctgaggcgggaggattgtttgagcctaggcgtttgaggctgcaaatgagctatggttgagccactgcactacaccctgggtgacagagcaagaccttatcttaaaaaaaaaaaaaaaaatccctaattgtcttttatagctggtttgttcaaatcaggatctagccaagtatcatcattgcatttggttattttaactgttaattcttcagagtcagaatttgaacatagtagtgtgtactccaatgcgtttgctttttgttatgtcattggaaagaagaaaagctttttaacaaccagaactttgcaataatagaacagactactgtagtgagctctttgttactggtgttgttttagtaggccaggctgactctgccttctgtagtgtccaatccagtggacagttttcttcataccatatactactttgtggtatttgatatgtgtgttgtttccacttttggtttctgtgacatattaggttggtgcaaaagtaattgtggtttttgtcattactatcaatggcaatatactttcttctggttttattcttgcgtttttcctttttagtctcatttgtatactcttcctttttttgtcctgtatatattgatgttcccttgaccacttacctgctttcacctaagcacaaaaagaaggtgcctgggctttggtgcatggtaggaactcggtattacctagagtcatattctgtactttgggaaattttttagtaagtgctagtgactttttttttttttttttgagacggagtcttactgtcttgccagggagtgcagtggcacgatctcggctcactgcaagctctgcctcccgggttcacaccattctcctgcctcagtctcccgattagctgggactacaggcacccgccaccacacctggctaatttttttgtatttttttttttttttttttttagtagagacagggtttcaccgtattacccaggatgatctcaatctcctgaccttgtgatccgcctgccttggcttcccaaagtgctgggattacaggcgtaagccaccgcgcccggcatgctagtaacttttaagtgtacatcttcagtctagtcctctctcctaagctccagtatggtgtctccaacagcctcctggacattgttaactggtgttccttcaggcaacttaaactcagtaagatctgagaagaatttgcgtctccttacacatcatatcctttaggtgaatggctagccattctcccagttacccaaaccagaaacatgggagggattctagttaaacttggagtcatctgggtacctcttgtacctcatatgtctacttgatcacctttttttttttttttttgagatggagttttgctcttgtcccccaggctggagtgcaatggcgcaatcttggttcactgcaatttctgcctcctgggttcaagcgattcttctgccttagcctcccaagtagctgggatcacaggtgcctgccaccatgcctggctaatttttgtatttttagtagaggtggggtttccccatgttggccaggctggtctcgaactcttgacctcaggtgatctgcccgccttggcctcccaaagtgctgggattacaggtgtgagccacggtgcccggacttgaacacctttttttttttttttgagatggagtcttgctctgtcgcccaggctggagtacagtggcactatctcggctcactgcaagctccgcctcccaggttcatgccattctcctgcctcagcctcccgagtagctgggactacaggtgccsgccaccatacccggctaatttttttgtatttttagtagagacrgggtttcaccgtgttagccaggatggtctcgatctcctgacctcatgatccacccgcctcggcctcccaaagtgctgggattacaggcgtgagccactgcgcctggccagaacacctttttaaaaatgtcacttatctctgctcagcatggtagtgctgaggcggctgaggtggctgaggcaaaggggatcccttgagcttaggagttcgaggctgtagtgtgcagtgatcatgcctgtaaagtccagcctgggcaacatagtgagacccccatctctaaaaaaatggtcacttatcttctctcacttctttttcctcactgccagtaccttaattaagccttccctcttatctgtcattaacaattatcttgtttgggtgcagtggctcatgcctgtaatctcagcactttgggaggctgagttgggcagatcaccaggtcaagagattgagaccatcctggccaacatagtgaaaccccatctccactaaaaatacaaaaaaattatctgggcatagtggtgcgtgcctgtagtcccagccactcgggaggtggaggcaggagaatcgcttgaacccgggaggcagaggttgcagtgagccgagatcgcaccactgttctccagcctgggcaacagagcaagactgtctcaaaaaaaaaattatcttattgtactctattatattcattgatttacatgtatctttcaggagactgagttcttggaaaggtggagtcatgttttattccattttgtacatcctcctaccagagaggcaatattaacatagcgattaagagtacagcctctgggtttgaattctggctcctccgcttcttttttttgagacggagtcttgctctgtcgaccaggctggagtgcagtggtgtgatcatagctcactgcaacctctgcctcctgggttcaagtgattcttctgcctcagcctcctgagtagctgggactataggtgcacgtcaccatgcctgactaatttttgtatttttagtagagatgggatttcaccatgttggccaggatggtctcracctcctgacctcgtgatccacctgcctcagcttcccaaagtgctaggattacaggtgtgagcctctgtgctcagccttctaccacttcttggttgtgagattgggcaagttaattccttaatgccttcgtttacacatttgtaaattgggggtaataatggcatctattttataggactgttatggatattaaatgtaaagcacttggaaaagcatctggattatagtaaatgctcagtaaatactatagcacctgtcctaaagccttgcacctagtggctacccaattaacatttgagtcagctaatagaggggattcctgaattggtctaaagattaaactagttyatctctaactgcctttataactttcaccctaagtttctgttttatgtcatggcttagggcctggtrgattgaagttacacagcaaatatgatgcttatttagaagagctaatacacttttaagaactggcttttgatctgtctggtactaatatatgccattgtgtatattcgtggttaattagataagggatgccagtttttatgctagattgcctttggtttgaatggaaactgcaactcattatttcacagcaggaaggtaagctcagcagtattgcttttatttttaattagatagtcatcctgaaacgtgtctgtattagctgtgttgstccatagaaagaataacagctgagcagacttgtcatgtagatttgccatgtgtttggtattgatacacagctaatgtacttgtcagtattcccattctagaaaataagtggccagttttcggggctacatattactcataatgaatccttaatttattctggattaggtggggactttttatgattatagaaagaaaacaatgtgatgaggatattggtatattatgtttgcagtctttttctactctttatatctagggtgtgaaagtccactgaattctcagaaatcttttttgatgactttgtgggataatattaccaactttgtgcacatatgattccatatttggatggacattgacaatttttgattgctggctgacactgccaaatccagctacctgttggtagatagctttctagtgcattgcaggattaaatttgtgtctggactattgtgaagttgtatctactttgttttgctgaaatgaaggggtgagaaacagcagatactgtgcattagaatggaaaatagagaatgattgggatttggcatattttccctgtcagcatggcatccattctttagaaagcctgtttaaatcaatactgatttttctgtctgtagaatgtgattgaatgactgaaggaaggcttttgcctcagagactggtagagccatcatttgtacactttttactcaccctgttgagggaagttggggaatagtagtagctttctacgtagctaacccacaaatcatttttcacagaaatttgatgtatttctgaaggagacatgttataatgggaagtgcttaggtttgaaactactagatttgaatcctgagtctcactagttgtttatatttggagaagtcataatctctcaggattttgatttctttttctttaaattagagatgataatacatgctttgcagagttgtcacaaagattasagataacatacaaaacccttggtagaatgcgtggtctgtagtaaatagtggctgcagttattatttccagaagcatatttcagacaggagtgtggtctgagagtcctaaaaatttccttgatatttctgaaaaatgatttttggaattcttactttggaaagattaaaaaatataatattgaagataggctatttagttcactaacttttttttaattggtagcttttcaaattactttccccaatcaaagcttttagttgtattttctttgtgaaaaacaaatcaactcctatataaatgaaattaatatttgaaaaaacaaacctacctatgtagaaaagaaaaagttttgaacttccaagtttataatatttaagttgagaacatagttactaaaaaattacttgtgtccttataagccacataatttgggcatttttgaaagactgctaaatgctatttcctagtctaagaacaaaaatgattaagcttytctaacacagtgtttctcaaccagggcattattggcatttagggcaggacaattctttgttttgtgcattgtaggacatttagcttccctagcacctgcccactaaaataccagtagtgctcatcccacacccccatcattgtgacaataacgccttatgtttttctggtaatgtgatggtaactgtagttatctctgttccaaaaaaagtatattaatactttgagggacactattagtatcaatagataatactcaatatataagaccaagagaggtaatccagaggcagaaaccatcataaaatgtcatatatttgaaataatgtattttcttattttaaaagtaatcattcccacattttataaaattgggcttggttttagggtttgtacrtgtatatctttgctgccttttattagttattaaaatttgtcagaataaattgacagccatttatagcttggttgatttcatttaaaatatagtcatttagtttgctcgccaagggagcagaaggcatggtttggaagttttctcttgctcagcacttctctaaaatggattaatacagttcttactcccatggagaggactctacttcttaccactcatctcagctatctaatcattagtattactttagcatgtgatagggtctctacactaaatatcagtgtttgttatgagctctctaattttttttttttttttgagacagacgtttgctctattgcccaggctggaatgcagtagcccaaacacggctcactgcagctttgacctcctgggctccagcaatcctcccaccttggcctcctgagtagctaggactacaggtgtgcaccaccatgccgggctaatttttgtattttttgtagagacggggatttcactatgttgcccaggctgatcttgaactcctgggctcaagcagtcatcctgcctgagcctctaaaattgttgggggattacagacgtgagccagtgatcccacccaatattttaagtttgtggacttaaataagttaggccatccaaaaattcacccatgattttgaagttttagcctaagatatatatattcctaggactaaaaactacggtggaaatttagcagaataaaagtttgagagtctagaggcttggcttgcacactggcatgctgtttatttgccaaattgttatcaatgttttggcttaagcatgctacatagctgttgcattagcaatagacttaaaaaaaaaaaaaactgtgaaggccgagcacagtggctcatgcctgtaatctcagaactttgggaggccaaggcgggcggatcatgaggtcaggagtttgagaccagcctgaccaacatggtgaaaccccatttctactaaaaatacaaaaattagccgggtgtggtggcgcgtgcctctagggaggctgaggcaggggaatcccttgaacctgggaggcggaggttgtggtgagccatgatcgcaccactgtactccagtctgggtgacagagcgagactgcatcttaaaaaaaaaacaacaaacctgttaaacttttttgaaattaaaaaaatttaaatgcagaaaagagtacagtataataaataacacccagaattaacaaatattaattaatgaaaaatgataaaattaacagatatatcattttgtgttrtttgccacaggtttgtttttcaatagaaggaaacaaaaatattattggcagtccatcaccttaaccacttggccacttcatcacgttaaggaaacaaaattttattagtatagtggatgtctcttttgtttccctttcttgtcatttcwctttctttcccctgaggcaaatactattatgaatttagtgtcttcatttttagttcatgcttttagatgttcactataaatatgtaatatctttaataattataataacaaacaggagttgaatgcttattgtttattaggtactatccatttaatcaataactttgtggttattgtaaggattaaatgagttaataaatataaaatgtaggcactgtttttattttcatttttcagatagggaactagagatgtagagaggttaaataacatatctaagttcatataactagaagttacggagcaaggatttgaacccagattgtttggctgtagatgtcatagcattcatgactatgctattctgcttttctgtaatatataatatataatatatattattattattattatttgagatagagtcttgctctgttgcccagactggagtgcagtggtgtggtcatggctcaytgcagccttgacctcctgggacccaactaatgcttctgcctcagcctcctgagtagctgggactacaggcgcatgccaccatgcctgggtaatttttgtttttgtttttgttttttttgagacggagtcttgctctgttgcccaggctggagtgcagtggcacgatctcagctcactcaacctctgcctcctgggttcaagcaattctcctgcctcagcctcctgagtagctgggactacaggtgcacaccaccacgcccagatattttttgcatttttagtagatacagggtttcaccatgttggccaggatggtctcgatctcttgaccttgtgatctgcctgcctcggcctcccaaagtgctgggattacaggtgtgagccaccgcgcctggtcaatttttgtattttttgtagagattaggtttaaccatgttgctcagactggcctcgaactcctgggctcaagctatccacctcctcggcctctcaaagtgttgggattatagacgtaaggcaccatgcccgattagtatatattattttgtgtatttttaaaatacatttttataaaaatggtatactgtggggtggttgtgcaattttttttcagtaacttctttgaaaaccttttcttgaattaaattttaataatatcgctaactacaacttgcttttctccccaactctacattactttttaaatacattcacattgctacttataatttgttcatctaagtgctgtatgttttattgagtaatatgccacagtttattatctattactcctacagatgaactttaggttgtttcctttctttccgctgattacacacactggtaaaatgaaatgaatatctttattcaggcctcttgtgtttatgtgcaagagtatctctaagcatataacatttaagaaatacatttacccctcttgaaaagtgctgtgaaccaagatacaaataccaaaatttagtctattgtgctattgtaaaacttctaacaagactcctaccaaagcagctcagttgcaattagcattctttctttctttctttttctctttttctttctttctttgtctctctctttcttcttcctttccttttttccttccttccttccttccttccttccatctcttttctctttctctctctctctctctctctctttcttttttggagtctcactctgtcacccaggctggagtacagtggtgccatctcagctcacttcaacctctgcctcatgggttcaagtgattctcttgccttagcctcctgagtaggtgggactacaggtgcacaccaccatgcctggttaattttcttttctttttcttttttttttgagatggagtcttgctctatctcccaggctggagtgcagtggcgtgatcttggctcattgcaaccttcgcctcctgtgttcaagtgattctcatgcctcagcctcctgagtggctgggattacagatgtgtgtcaccatgctggctaagttttgtatttttagtagagacggggtttcaccatgttggccaggccggtctcgaactcctgacctcaggtgatctacctgccttggcctcccaaagtgctgggattacagatgtgagccaccgtgtctggcctaatttttgtatttttagtagagacaaggttttgccatgttgaccagaccagtctggaactcctgacctcaagtgatccacctgccttggcctcccaaagtgctaggatgacaggagttagccactgtgccctgccacagttagcagtttcttacctcttcctagctagctgagaatgtaaaaccagacccattgagctgcaatgagcaattctgtcttctgtgctgtaatatggaaaactaggatttgccactctcagggaaccctgagggcactgaggaggttagtaaggtattttgttacgaatgaaacatatcttgataacaattcagtaaagttgtaggatacaaaatcagtatacaaaaatcagtagcatttctgtgtgccaacagcaaacaatctgaaaaagaaatcaggaaggtaatcccatttacaacagcttcaaataggataaaatacctaggaacaatcttaaccaaataagtgaaagatctttacaatgaaaactataagactttttttttttttttttatccagtgtcttgctctgtcgccaaggctggagtgcagtgatgtgatcttggctcatcgcaacctctgcctcccggcttcaagcaatttttgtgcctcagcctcctgagtagctgggactacaggtgtgccaccatgcctggctaatttttgtatttttagtagagacggggtttcaccatgttggccaggctataaactataaaatattgatgaaagaaattgaagaggacaccaaaaaatggaaagatatttaatgttcatgaattgaaagaatcgatattgttaaaatgtccatactacctaaaacgatctacagattcagtgcagtctgcatcaaaataccagtgacactcttcacagaaatagaaaaaaaatcctcaaattttagaaccacaaaagacctagaacagccaaaagcctcctgagcaaaaagaacaaaactggaggaatcacattacttgacttcaaattataccacagagctattgtaaccaaaacaacacgagaatactggcataaaaaccgacacataggctgggcatggtggctcatgcctataatcccagcactttaggaggctgaggagggtggatcgcttgagcctaggagtttgagatgatcctgggcaacttggcaaaaccttgtctctacaaaaaaaaagtacaaaaattagctgggtgtggttgtatgcacctgtagtcccagctacttgggaggctaagttgggaggatcacctgagccctaggagatcgaggctgcagtgagctgtgatcacgccactccattccagcctgggcaacagagtgagaccctgtctcaaaacaaaacaaaaacaaaaaaccagacacacagactgatggaacagaatagagaacccagaaataaatccatatacctacagtgaactcattttcaacaaaggtgccaagaccatacactggggaaaggacaatctcttcaatgaatggtgctgggaaaacaggatatccatatgcagaagaaaaacctaatcaaaaatctgatcaaaatggattaaagacttaaatctaagacctcaaactgtgaaagtactacaaggaaacattgggaaaactttccaggacattggtttgggcaaagatttcttgagtaatatccccaaagtacaggtaaccaaagcaaaaatggacacatgtgatcacatgaagttaaaaagcttctgcacagaaaatgaagcagtcaacaaagtgaagagacaactcacagaatgggagaaaatatttcaaactacccgtctgacaaagaattaataaccagaaaatataaggagttcagacaactctataggaaaaaatctaacaatctgattaaaaaatgggcaaaagatctgaacagacatttctcaaaaggaggcatacaaatggcaaacagatctatgtaaagttcctaaacatattgatcatcagagaaatgcacatcaaaactacaatgagttatcatctcacccttaaaatggcttttattcaaaagatgggcaaatartgctaaccaagatgtggagaagagggaaccctcgttcactattgatagaaatgtaaattagtacagccactatggagaacactatggaggtccctcaaaatagtaaaagtagagctacaatgtgatatagcaatcccactgctgaatatatacccaaaagaaaggatatcagtatagcgaagagacgtttgcactcccatgtttattacagcactgtttacaatagccaagatttggaagcaacctaaatgttcaacaaatgaatggataaagaaaatgtggcacctacacaaatggattattcagccataaaaaaatgagatcctctgccgggcgcggtggctcacgcctgtaatctcagcactttgggaggccgaggtgggcggatcacaatgtcaggagatcgagaccatcctggctaacacggtgaaacctcgtctctactaaaaatacaaaaaattagccgggtgtggtgtcaggcgcctgtagtcccagctactcgggaggctgaggcaggagaatggcatgaacctgggaggtggagcttgcagtgagcggagatcacgccactgcactccatcctgggcgacagagcgagaccccatctaaaaaataaaaaaaaaaagagatccctttttttgcaacagcatggatggaacttgaggacatcatgttaagtgaaataagtcaggcacagaaggacaaactttgcatgttcttackcattgctgaagctaaatattaagacaattgaactcatggagatagagaatagaatgatggttaccagagggtgggaagggtagtgtgttgggggtgttgagtgggaaatgggatggttaataggtacaataatatagttagatagaatgaataagatttagtatttgatagcacaacagaatgactacggtcggcaataattcattgtatattttagaataactgggagagtacgattggaatgtttgtaacacaaagaaatgatgaatgcttgaggtgatggatacctcatttaccctgatgtgattattacacattgtatgcctgtatcaaaatatctcatgtaccctgtaaatatatatacctactatgtacacataaaaattaaagagtttatatctcaaaaatgaaaaagtcagttgatggcaaacatcgaattgttcagtttagcagacaactatgttttatatagtcaacgatgttttatgtactttacatatgttttgtatattacttcaatatcttttatttttctaaagtttcttttttcttttctgtctctgttcaaattataatcagcctagccttcctctgcacttaagtctctgttctttctacagctctcatagtggaaaaatactgagctaagtaataatgaaatggaagaagtttgagctttggtgctggatagaacttggttccagttctggttctactagctctgtatccttagcaagttacttcatcttctgagcctgtatttctttttctgtaaaatggagatcagacctaccttgctgggtttttttgttgttgttgttttgagacggagtcttgctctgtcacccaggttggagtgtagtggtgtgatctgagctcactgcaatctctgcctcttgggttcaagggattctcaaagtgctgggattacaggtgtgagccaccgtgcctggccacgttttgagattaaatgaggaaatgcttttaaaattcctgatgtttaaaaaaaaaaaacagtggccaggggcagttcacacctgtaatcttagcactttgtgaggctaaggtgggaggatcacttgaggccaggagttcaagaccagcctgggcaatacagtgaaaccttgtgtttccaaaaaaaaagctattatgacccatgactctgggttttaaacaagctcctcaggtagtttgaagcacattatcaacagacatactttgagaaatacactacccttggctttttggtttcaagtctagctttgctagtaaataggttatagcattaacttttagcatttgcactttctgggccttatgtttcttcaaatataaaatgaatgactgaagttsatgttttctactggctctaaaattaagaaaatttggtttttaaaattattattattwttttagtgatgaggggtcttgctgtgttgcctagtctggtcttgaactggcaggcatgatggcacatgcttgtartcccagctacacaggtagctgaggcaggaagattgcctgaacccaggagtttgaggctgcagtgagctgtgatagcaccattgcacttcagcctgggcttggattaaaggaatgagcccstgcacccgaccctattttattttatttttattatttaatttatttactttgagacagaatttcactcttgttgcccaggctggagtacaatggcatgatctcggctcactgcaacctctgcctcccaggttcaagctattctcctgcctcagcttcccgagtagctgggattacaggtgactgccaccacgcccagctaatttttttgtgtttttcgtagagagagggttttgccatgttggccaagctggtctcaaactcatgacctcaggtgatctgcctgccttggcctcccaaagtgctgggatttttcaggcgtgagtcaccatgcctagcctctattttatttttaaaattccatttatattttagattcaggaggtatgtgtgcaggtttgttacaagggtatattgtgtggtgctgaggtttggacttctgttgatcccaccaccgagatagtgaacacagtacccaataggaagtttttcagcccctgcctgtctcccatttgggggcctccagtgtctgttgttcccatctttatgttcatgtgaactcaagatttagctcctagttataagtgagaacatgcgatatttggttttctgtttctgtgttagttcacttagaataatggcttccagctgcatccatgttgctgcaaaggacatgatttcattcttttttgtggctgcaaattttttgtcttataaccctaaatttttttgagacaaggtcttgccctgttgcccaggctggagtgcagtggtgctatcacagctcactgcagcctcaaactcctgggctcaggcaatcctcctgcctcagccacctgtgtagctgggactacaggcgtgtaccatcatgcctggctagtttttacattttttcatacagacgaggtctcactatgttgcccttactggtttcaaactcctgagctcaagtgatcctcttgccttggcctcccaaagtgttaggattataggtatgagctactgtggccagctaaccctaaatttttgttcttgtggatgtaagtatttggtctggtggtgctgatgccactttttggcataggttcaatagaggtacttaaatgttttgttatttgggaactcagagtattcttccttttttgaagactgtggtagaactagattaactagattcaggtagatctcatggaacctcaggatgcagttaggccttaagaattggggattagagcagaatagggaattcaaaaagttcccttcctttttttttctttgaaaattggcctcaatctcttgacttcttctgccttccaggcagtattatagaaaatgcccctggccagcagcttctgagtttacatggcttctattttagaaagccgccatattgagactggactatttaattccaattgcacattgccaggaaagaaactgtggttgtacacactgggtacggtgctgacttctggcaatgggtaaggaggcagactcatgttactaagatggccctgggattcctgccacttttctgagttgcagagctggttagaagtggtggtggtaaactgagtaggtatccacctcctttatgaaagcatttcactaattgaggagtcacaatgttgtattttgcatagaacccttacaattgagtctcatggaaaaaagtagaaagagggagagacaggctaaaagaaaaagtaggcttgtgcttttattcttagttatgtaccagatgggatggagccttctatagttacttctactggactgtgctttttcatcaacagtgaatttttagattgcttttggatatagttttcttttttaaaaattatataatatataattttgaagtctccttgtaatgtttgttttatatatttggaattaatttttgaaataaaatattatatgaggctataaagggtattgattggtagaaagaagcacaggcttttgaatcagacaggctttgcacttcaatttttttttttttttttgagacagtgtctcactctgttgcccagrctggagtgcagtggcacgatctcggctcactgcaacccctgcstcctgggttcaagtgattctcctacttcagcctcctgagtagctgagattacaggtgcttgccaccacgcctggctaatttttgtatttttagtagagatggggtttcaccatgttggccaggctggtctcaaactcctgacctcaagtgatccgcctgccttggcctcccaaagtgctgggattacaggcgtgagccactgcacccagcttccattttatctctgccttttagtgactgatttcttgatctctctgtgaaatgaacataataatccttatatcatggattatctgagaatcaaacgagatgatgtatgtcaagctcttatactatgtttcctagaaagtaggtgctcaatgaatgatagatattatcattgttattttgttacttagaatgtaattggtgatcttcatgatattctactcatggtaaagactgactatatcttgggctttaaatatatcagtgttatttgagggtaaagacataaaacattttttagatctgaaaaccaggaactagaatgtgaaaggaaatatttttgcattgagcatttattgctttacatgtatttattcattaaagatttcagtggaaatttttttgatctctttagtgtcaaaccagaagagaagtaaaattcaacaaaaatttatgtgtggagttccttcttaaaagaagaaaaaagtgattatttagactatggatcggagcaaacggaattcaattgcaggatttcctccacgtgtggagcgtcttgaagagtttgaaggaggtggtggaggagaaggaaatgtgagccaggtgggaagagtttggccatcttcgtatcgagctcttataagtgccttttccagactgacgcgtttggatgatttcacctgtgaaaaaatagggtctggcttcttttctgaagtgttcaaggtgagtgagtcttcagcttttctcatattgtcttgctgtggtcacatttactgcaggttgatagttgtgtttaattaggatgtaggatttgcctaataaaggtgctgtggatcttgaacactgttctaaattctcctttcaagctatttattaacttatattaagatattttgtttgaatcccaaaaataatatgctggttaaaaattcaaataacataggattctcttccacctcacctctacccccagccacacatgtgtgtatgtatccacacatacattctccagtaataaccactattaacaattcagtatgtatacttctggactctttctgtgcatatacatatattatgcacacaccttaaatacatatattaaaattatatatacacacacccacatatatagtttttgtttgcttatcttcagtaaaattgatagctgggtacaatggcatgcacctgtagcccgagctactcaggaggctcgcttgaggctgtgagtttgagagcagcctgggcaacatagcaaggccctgtctcaaaaaatatgagcccataatgctcctaagcaatcatatttccctgtttcactcactccctcaagagagtattttgtaccttttcttctctcatcaaatcccagtatttcctcactagtcctcattgtcagtaattaatgaattgcttcccaattcactgagaaaattgaagcaagcagaagagaacttctgcagacttccattactacaaatagctatcaacacacatctttacccagttacttggcctttataccttgtactatggatcaactactcatgctcctaagtccattatttctgtttatattgtacattccatttccacttgcctactaataggcattgcctaagaaattctcccctctcttttctacattgtattttcactactaagtattaccattaacatgttaaaaaaattcttttaaggaaaaaaaaaacccaaatattttggctctgttatttcccctttattttattttatttttattttttttgagatggagtctcactctgttgcccaggctggggtgcagtggcataatcttggctcactgcaacctctgcttcccgggttcaagcaattctcctgcctcagcctccctagtagctgggattacaggcgcctgccaccacacctggctaatttttgtatttttagtagagacagagtttcaccatttcggccaggctggtcttgaactcctgacctcaagtgatccacctacctcagcctcccaaagtgctgggattataggcatgagccaccgcgcccaacctattttattmtwttmtwttattttattttattttattttttgagacagggtttcgctctgtcacccaggctagagtgcagtgtggtgtgatcatggcttactgcagtcttgacctccctggactcagatgatccccccacctcagcctccagagtaactgggactacaggtgcatgacaccatgcccagctaatttttgtattttttggagagttggggtttcaccttgttgcccaggctgttcttgaactcctgggctcaagtgatcagcctgcctcggcctcccaaagtgttgggattacaggtaagagccaccacacccagcccctattgtttcttttattaataggtatactttcccatgtcttgtttttttttggaccaaaacaactccatagagttgtctctatgtaccatttccagcttctttctttctaatgtgtctttctctaaaatactttttattgcagtaaaatatatataacataaatttaccatcttagccattttttaagtgtacagttcagtgtcattaattacatttacaatgttgtacaaccatctccattatccttttccagaactttctcatcacctaaacagaatctctgtacccatgaaacgttaactcactaattctcccttctgtaactgtaaatgggttcattgcccaatgcacacagcaagtcaataagctgagactccaggttgcagcagagaaaggtctaatcatagggccgccaaatgaggagatggaggaaaacctcaaattcatctcccgtaagagatgggggctaaggttttttaagggttttgaagtgggccgaagtgtggcaattgtttatttgttaaagagtacaggatgaagtcatgggacagggagatgaagaagctgtattctcttgcagatcccgttcctctgtgggggacttcaaactggttgctggaattcaggggtctgaaaaacatattaagcaatccttaaacaaaagccttatgattataatgtcagagatcctgttataggaaagatggggatagaaataaaatcttaaagttttatgaccctaatgtcagaaatcctattctgtaggaacaataggaatgcaaatagtcagtatctagtgctatatgacttttagcaaccaggaagtgggccaaagtgcggcctgattaatgcttaattataactatatttctgtccagaacctggcatgcacttcttgtgaaccctgtgggggcagtttcactcccacccactaatatcttctacttgctgtttttatgaatttgcttattctaggtaccttatataagtgggttaatataatatttatccatttgtgttagagttaattcacttagcatagtgttttcagggttattcatgttgtagcatatattagaatttcattcctttttatggctaatattgcattgtgtatatatgtcatattttatctgtcgatggtggggctgtttccaccttttggctattgtgaytaatgctgctatggatattgatatacaggtatctatttggttctttgcttgcaattcttttgggtatttagctgtaaatagaattgctgagtcatatgagtaattctatgtttaagaaaagattatggtaaaatacatacaaaatttaccattttggctgggcattgtggttgacgcctgtaatcccagcactttgagaggccaagacgggagaattgcctgagcccaggagtttgagaccagcctgggcaacatgacgaaactctgtctctgggggaaaaataaaataaaataaaawaataaaaaaataaaaaataaatctttttcttactatcttaacagtatttaattatgttaagtacatacttaacacaactgttaagtatgtacacatggttgtgcctccaaactccagaactttttcattttgcaaaactgaaactctgtacccattaaacaactcctcatttctccattccccccaacccctggcaaccactatcctactttatttctaagagtttgactaccctagatatcttatgtaagtgaaaacatacagtatttgtctttttttgactgccttatttcacttagtcartctatgtttaactttttgaggacccaccagactgttttccgtagtggttgtgccattttacagttctatcagcaatatgtaagggttccagtttctccatgtgctcactgacacttatttttctttttcatggtaatcatcctatttggtgtgaaaagtggtatctcattgtggttttgatttgcatttttctaaacaactagtgatattgagcatcttttcatgtacttgttgaccttttttgtatatcttcttggagaaatgtgtatttgaatcctttgctcatttttgaattgcattgtatttatatattttatatatagggaatatttatcccttaccagatatatgatttgcaaatattttctcacaatttgtagtttgtcttttcactcccatgatggtgtccttttttgcacagaaattttaaattctgattaagtcaaattaattttttcttttgttaccttttgctttttgtgtcaatccaaggaatcatcaccaaatccaatatcatgaagattttccacaatgttttcttctaagagttttatagttttagctcttacatttaggttattgatcattttaagttaatttttcaatatcgtataaagtaagggtccaatttcattcttttgcttgaggataccaaattttacaagcaccatttgttgaaaagactgtcctttccccattgaatggttttggcacccttcatgtcacagtcaattaaccatgttagagagggtttatctctctctctctctyttttttttttttttttttttgagacagggtctcattctgttacctaggctggagtacagtggtgctatctcactgcagccttgacctcccagactcaagtgatcctcccacttcagcctcccgagtagctgggactacagacacacagcatcatacctggctaatttttgtatttttttttgtagagttgtggtttcaccatgttaaggctggtgttgaactcctgggctcaggtgatcagcctgcctctgcctcccaaagtgctgggattacaggtgtgcaccaccatgtccagcctcttttttttcttttcttagagacaggatctcactttgtcatccaggcggcagtgcagtggcgtgatcatagctgactgcatcctcctggactcaagtgactctcccatcccagcctcccaagtagctgggattacaggcatgttactgtcacgtcaggtaattttaaagtgttttgtacagatggagtcttgctctgttgcccaggctgatcttgaatttctggactcaaatgatcctcctgcttcagtctcccaaagtgctggcattataggcatgagccactgcactcagctttttttttttcttctttttttgagacagggtcttgctatgttgcccaggcttgtcttgaactcctgggcctggtcagtcctcctgcacctgcctcccaaagtccaaaatgctgggttataggcgttagccaccgtgcccaggctttttcttaagatggggtccctctctgtgttgcctaggctggtcaaactcctggccgcaagcaatcttcctgcttcaacttcctgacttgttaattcattttaatttttgtactctgattgttagtgaagtccttttgtttattggtcatttataaaacttgttcacttatgttcttacctgccttcttctgttgtgttgattttttttgtagttctttacatatcctgatagtaattcttttttgaagtcattattatgttaatttggcttctagatactttcttattcaagccaccattgcatttcacagtgaaaaacacaaagcctgtccaatgtatttgcatacatttaatgcagaatttgatcccaacactgtaatcaataaacatctaggaagatgtggtgaatattactgataaagtaatgggaagtaactgaagaattttgtgcagcctgagttttaactaagacttaatttttaattaaaagcaaaacttatattttcaaaagagtttgcccctccaaaaaaaaaccagattagatagcttctaaactatattaaattataccaaataaatttttttttttttttgagacggagtcttgttctgtctcccaggctggaatgcagtggtgtgatcttggctcactacaacctctgcctcccggattcaagtgattctcctgcttcagccttctgagtagctgggattacaggcacctgccatcatgcctggctaatttttatatttttgtagagacagggtttcaccatgctggccaggctggtcttgaactcctgacctcaggtgatctgcctgcctcggcctcccaaagtgttgagattacaggtgtgagccaccactcccagccaccaaataaagattttaattattataaaacaaaggttcgtgcttcaaagaaacaccacctccacaaatgtcgagccagtttaggtgctgccaatagaatcctaaagagtgatatctctggttcatgtgaacaatttccacagtccatgcgctttgaggacaattcaggtcctaaggcagaccatgctctacagagctgccccttcaccaccccgggtaccaccctaccttgtgctgggcaggcagcatgtggctaggaatgctgcctccctcaggcttcccaaatcaaatcaagggcacatatggctcagccacacttttgcactcatatttactacatacttctgcttaactttatccctgaaaaatgttagatggtttgctgtcacacatctgctgccccagatgagttacatggatgtagcaatggacacatcctcaaacacagcatgaaaagggcacaggaagactctggtccagcccactcccacttcaaaataatttggccttgggttcttcctctaaaaacacaagtagatataaactctaactataaaatcatgaatctatggaactttagaataattaacagctcccaacactaaagtccagctgtaaggcagtgtttgtccatgctgatgaggcaccatcagcaccaaatcccagactccagtgtgctggggacatctgacgcctgcctgatagtaattctttattatgtatgttgcaagtattttctccttgcccatcttttatcattttagtttttatgtagttaaaccttggtttggcagtggtggcttacacctgtaaccccagcactttgggaagctaagacaggaggattgcttgagtccaagagttcaagaccagcctaggcaacagcacaccaacatggcacatgtatacatatgtaacaaacctgcacgttgtgcacatgtaccctaaaacttaaagtataataataataaaatttaaaaaaaaagaaaaagaaataaataaataaatacaaaataaacatatcagtcttttcatttacaacttgtggattttgcatatagcctaagaggttttgaaaatactgttttcctcatgcttttatgacagatttcgttgaatataagatgccattgattataagatgtacttcttgccaattaaactatgacaattcccattacttagaagtttaattttttatttaagaggcctttatggacttgatgcagcatagttgtgggttttgtgagtctcgttttgttgcccagggtagagtgcagtggtgcgatctcagctcactgcagcctcgacctcccgggtttaagcaattctcctgcctcagcctcccaagtagctgggatttcaggctcatgccaccacgcccaggtaatttttgtacttttagtagagacgggatttcaccatattggtcaggctggtctcgaactcctgacctcaggtgatccacctgccttggcctcccaaagtgctgggattacaggcgtgagccactgtgcccagcctattaatttwaaaaaaattaattcttccatattctgctatagaacttttataattttaatatttaaatttttgatccattcggaatttatcctagtgtaaggtataaaacattgatccaattctatttgcttttcagatgactacctagttatgttaacatcttttgactagttcatcttttccttactagtttaagaaaatatctctatcatacactaaattagcatatatatttcagcctacttctggattttctgttttattccattgttctgtctattcaaatgtcaatcacaccagaattcaaggataaaaatgaaatttcaacccactggggggagagtagactaattaaaaaattgtatttagacaattaactatctgaaaaaagataaaattaaatgtttatacctaatttcaaacactgaaataaactcgagatgagttaagcataaaaaactgtctactacatttcatcatttctaacactttcactattttgaaattgagatgtcttaaaattacttccaggcacttgtacgtgtgcatcaaaacttgtaaaatgggtgtcagtggttaaagaaacacctggatataataatgtagcaatctcaagaaattatgcatcaccacactcttgatagcatgaaattaattaattaattaattaatctatcctccatgctttttcatggcttaatagctcattcctgtttagcactgaataatatcccattgtctcaatctaccacagcttatctgctcacctattgaaggacatcttggttgcttcaatatgttgacaattatgaataaagctgctgtcaacacgcatgtgtggggtttttttgtggacataagttttcagttcatttggataaatatcacagagtgcaattggtggactgtatggtaaaaatatgtttagttttataaaaaactgccaaactcttccaaagtggcagtgccattttgcattcctttttttttttcttttttttttttttgagacagagtctcgctctgtcacccaggctcgggtgcagtggtgtgatcttggctcactgcaacctgtgccttccgggttcaagcaataccctccctcagcttcctgagtagctgggattacagatgtccactaccacgcccagctaatttttgtgtttttagtagaggtggggtttcaccatcttggccaggctggtcttgaactcctgaccttgtgatccacctgcctcagccttccaccgtgctaggattgcaggcgtgagccactgcaccctgccccattttgcatttcaaccaggaatgaataaagagttcctgttggtccatatccttgtcagtatttgatgtcagtgttttggattttggccattctaagtggtatatagtagtatctcattgttattttaattttcaaatatctaatggcataagatatagtttggatgtttgttccctccaaatctcatgttgaaatgtgattcccaatgttgaaggtggggcctagtgggaagtgattggatcatggtagtggatccctcatgaatggtttagtaccatcccgtcggtgataagtgagttcttgctcagtttgttcatgtgacatctggctgtttaaaagaatctgggacctccccctcctctctgtctcttgatctcactctccccatgtgacatgctgcccccaccccgtcaccttcctccatggttgtaagcttccagaggccctcaccagaagtagatgctggcactgtgtttcatatacagcttccagaactgtgagccaattaaacctcttttctttataaattacttgatctcaggtatttctttatagcagtgcaagwatggcctaacacaacatatgatgttgagtatttttcaaatacttacttgccatctgtatatcttatttggtgaggtatctgttcaattttttaatcaggttgttttctttttcttttttcttttttttttttttttttgagacagggtctcactctgtctcccaggctggagtgcggtggtgtggtcatggctcacagaagccttgaattaccaagctcaagtgatcctcccacctcagcctcctgagtagctgagagtacaagtgtgcattagcatgcttggctaatttttgtattttttttgtagacacaaggtctctaccaaaaaaaaaaaacaaaatacacacacacacacacacacattgagtcttcctatctgtgaatgtgaaatatctctccattttatttagttcttctttgatgtctttcatcagagttttgtggtttttctcatatagatcctgtatatacagtcataatgacatttcagacaatgatggactgcatataaaatggtggtcctataaggttataatagagatggaaaattcctgtggcctagtgacattgtgtacctgttgtaatatcatagtgcaatgtattacccgtgacggtggtattgcaggtgctaataatcctaccacagtgccaattgtataaagtatagcacatataattatgtacagaatgtaatacttgataaagataataattgactatgttaatggtttatatatatactacattatacttttaattgttattttagagtgtactcctatttattaaaaaaaaaagttaactgcaaaaccatctcaggcaggccctttaggagatattccagaataaggcactgttatcataggatatgatagctccatgtgtgttattgtccctgaagaccttctgttgagacaagatgtggagatgggtgacagtgatattatgatcctgacctctgtaggcctaggctaatgtgtgtgtttgtgtcttagtttttaacataaatgtttaaagagtaaaaaaaaaaaatttaatagaaaaagcttataaagaaagaaaatatttttgtacagcttggtaaatgtgtttgtgttttaagctaagtgttactgtgaaagaagcaattatatttttaaatttcattttttgttgtttttgagatagacctcactcagtcacctagtctggagtgcagtggcactatcttggctcactgcagccttgaactcctgggctcaggagatcttcttgcttcagcctcctgagtatctgggactactagcatattaccgtgcctggctaatttttaaaattatttgtagagttgaggtctcactatgttgcccaggctggtctctaactcctgggcttacatgatccccctaccttggcttcccaaagtactgggattataggtgtgaacaactgtacctggctgaggccccattttaaaaaatcacacttaacacaaatttatgttttctttcaaaggataccccttctttcttttttaaactagctgttgtttactgataaatggaaagcttaaaaaatggattatggaggcaggggtatttggttttgccctgtacctgccttagggaagtttgactttgtatatttgccaagcctgctgatagctttaccctgggcagaacctgacagtcaaataattactctttgattgtactgattacctactgtttgtatgcattttatagttcattgttttctaattctatcttcggttactttcttttgcctactttcttggtcctatttttttgttctttctctaggatctggaatgttattcttatctcagtttttcctaatatttcatattttctaatatatgcatttaagctttaatgtttcctcttttttatttttatttaaaatttttttagagacgacagggtctctttctgttgcccaggctggagtgcagtagtacgatcatagctccctggtgcttccagctccttggctcaagggatcctcctgcctcagcctcctgagtagctaggcctacagatrtgcaacaatatacccagctaatttttttgacttttttgtagagatggagtctcactatgttgcccatgctggttcaaactcctggcctcaagtgatccgcctaccttggatatcttgagctatcctgggcagaatagtgagaccctgtctaaaaaaaaaaaaaaggaagttttttttcttctatgctttgaaacagcttaagtggtattaaaatgatttatttcttaaatatttggtagaattccactgtgaaattctgtgccaagtacttggaaaamttttcctattcttctaggataattggtctacttaagtttttgtttctcctgaggacaatttttgtaaattatattttactagaaaattataatttcttacaacttttctaatatacttgcaaagagctgagtaaaatttgacctttaaaattttttttgttatatacttttcagattagttgcaactcttagagtgtagatcataagtcctgctattaattgtgtttactggtacttcttcatggtttatttatttcttggagacagggtcttgctctgtcacctagtttgcagtgtggtgatgtgatcatggcttagtgtggccttgacttcctgggctcaggtgaccttcctgcctcagcctcccaagtatctgggatcacaggtgcatgctgccatgcccactgattttttttttttttttttttttggtagagacagggtctcattatgttgcccaggctggtcttgaattcctggcctcaagtgatcctcccacctcagcctcccaaagtgttgggattacaagtgtgagccactgcacctggtcgtggctttttgtttctactttgagttttaattttttattgaaagcccatcttcaagggtagatgtttttgtaattgtccaactggttcttcttacccatttcccagaaaagccaataaattgagaacagcaggagttgcagcagagaaataatttaataatcacagagcaagccaagcaatgagaatgagagctatttctcaagtctatctccccaagaatttagaggctagggtttttcgaggatagtttggcaggcagggggctagggattggggagtgctgattggttgggtcaaggttgagatcatagtgggttgaaactgccttctttcactgagttagttactagatggtggtggttgggggtgtcacaagaccagtcaagctggtttctcgttataggttgccaatccaggtggtgccatctgatgcatcagaatgcaaggtccgaaaaatactcaaacaccagtcttaggttttgcaatagtgatgttatctgtaggagcaattggggaagttacaaatcttgtgacctctggctgcatgacccctgaaccataattctaactgtgtggccagtctgttagttttataaaggcagtttcatccccaagcaagcagggggttagtttcctgaagggactgttatcatctttgttttaaagttaaaccatgagctaaattcctcccatagttagcttggcttatgcccggatatggacagggacagtttagcttatgtggttagaagcaagatggagtcagcgatgttagatttctcttactgttacaattttgcaaaagcggtttcattttccctgggagttattttattctaggttgtggatatgttccaatatggtgaactaacttttgcctctgctggggtcaaatagattctggatgtgaacctaaatgctttatttttatttattggctcagtctttctgtacagtgtgtgtggttcaaatctgaatcctaaacctgaatctcatagttggctgttattcctcatttgaggcaatagggatagcattatcccactatgaatgcctattacaaaatagaagaaagctagttaaatgtattttgtggtattttagaaagtaattgtttaattttatggtgaaaacattatcaatgggaaaggggggaataggtctgtttatttttggttgcayataatatagtctgatacagtatttggtaaactacagcccttggaccaawgttttagaaataaagttttattggaacacatctgtactcatcgagtactttgtaacagagaccatatggccctcaaagccttttttttttttttttaatagagtctcattttgtcacacaggctggagtgcagtagcatgatcataactcactgtaactttgaactcctgagctcaagggatcctcccatcttagcttcacaagtagataggactgcaggcatgtgccaccacacccggctaatttttaaatttttttgtagagatagtgtatcgctatgttgcctaggctggtgtcaaactcctgcctcaagcaatcctcccaccttggcctctcaaagcattgagattacgggcatgagccactgtacctggccttcaaagcctaagatatttactgttttaccctttacagaaaaaattgccgactcctgatctaatagctgtagtgcaccggtaggtgatgtttagttttatctttgattacaaagtacagatgattatcgagctttaaaggtcaggttaaataaaaagtatatcagtggtgataaaaggaaatatttgacttctagtgcaggtaacttaaggacttttagttgtcctagatagcaaaataaagattggttgatggattactttacaattagagtgtggatttatgtagtttatttgtatgcctttttttttttttttttttttttttttgcgatggatctcgctctgccacccaggctggagtacagtggcgtgatcttaactcactgcaaactccaccttccgggttcaagcgattatcctgcctcagcctctcgagtagctgggaccacaggcatgcaccacatgttcggctaattttttttttgtattttttagtagagatggggttttgccatgttggccaggctggtctcaaactcttgacctcaagcgatcctcctgccttggtctcccaaagtgttgggattacaggcatgaaccaccatgcccggccagtttatttgtcttcctttaaaataatttagttttggaatttaggatcatctggtcatccttaaaaatagaccttagttggccgggcacagtggttcacgccaggtctcaagtgatccccccaccttggccacacaaagtgctgagattacagaaaatctcctcttttaagtgtgtttagcttcttagaaataatgaaagtaggccggatatgttggcttactcctgtaatcccagaactttgccaagaaaggcagatcacctgcgctcaggagttcaagaccagcctggccaacatactgaaaccccgtcattactaaaaatactaaaattagccaggtgcgatggcacatgcctgtagtcccagctacttgggaggctgaggcaggagaattgcttgaacccaggaggtggaggttgcagtaagccgagatcacgccactgcactccagcctgggtgatagagagagactgtctcaaaaagaaaaaagaaaattggaacgatttggatgttagtgaaatttatttagggaagaactgaagtatgtggaagtggaagtggcacatgtgtgtgcagttgtgaaaataaaagcaaatggaataattgtgccagcttctaccctctagtaagtggaaaagcttttcagctgcagcgtagcagtggccgacaacctgtttaatgtttcaaattaagagtgcttctgttgaggatgtcaaaaagaaaaaagagtggttctgttgggatacagtaaaaggctcttgctttctttttataatagtcctagttttgtttgggagtataattggaaacttcctagaaagtctccttccttgaaatcttgtaagaaaatgattgttctagtctcatgagataattcaagtacacgtcattacccatgatgtaagtctgttggtatgtattgtgaaaactataaaacctggaatcccatcccacagcaaagtatcaatgtaaatttaaaaaaaaaaaagctttagtgagaaataattcacataccataaaagtctctctttaaaaatgaacaattttggccaggcgaggtggctcacgcctataatcctagcactttgggaggctgaggtgggtggatcacctgaggttgggagtttgagaccagcctgaccaacatggagaaacctcatctctactaaaaatacagaattagccaggcatggtggtgcatgcstgtaatcccagctactcgggagggtggggcaggagaatcatttgaacctgggaggtggaggttgcggtgagccgagatagcaccattgcaatccagcttgggcaacaagagcagaaccttgtctcaaaaacaaaacaaaacaaaacaaaaacaattttgctgggcacagtggcttatgcctgtaatcccagcacagcactttgggaggccagtgcaggtggatcacttgaggtcacgagttcgagagcagcgtggccaacatggtgaaaccccgtctctactaaaaatacaaaaattagctgggcgtggtggcacgtacctgtaatctcactactcggaggctgaggcaggagaatcacttgaacctgagaggcggaggctgcaatgagctgagatcgcaccactgtactccagcctgggcaacagagtgagactctgtctcaaaaaaaaaaaaaaaaaaagaataattttggctgggtgcagtggttcatgcttgtaatctcagcactttgggacgctgaggcagaaggattgcttgaggccaggagttcaagaccagcctaggcaacatagcaagagtctgtctctattaaaaaacaacaggctgggtgcggtggctcacgcctgtaatctcagcacactgggaggacgaggcaggcggatcacctgaggtcaggagttcgagaccagtctgaccaacatggcgaatggcaaaaccccatctctattaaaaatacaaaattagctgggcgtgatggtaggcacctgtaatcccagctactcaggatgctgaggcaggagaattgcttgaacccgggaggcagaggttgcagtgagccaagatcatgccattgcactccagcctgggcgatgtagcgagactctgtctcaaaaaacaaacaaacaaaaaaacaaaattacaacaacaaagcaatattaccacaaatgtagtgatttaaaagagcatatatttattatatctttttctgtagtttaagagtccaagtctgactcaactggattactggattgccttcttcaaggtctctgaaagctacagtgaaggtgtcagtcagagctgctctcttatgtgaagttcagctggggaaggatctgctactaactttatgtggttgttggaagcattcagttccttgcaggtcactgaactgagggcctcaagttcttgctgaaggctgccttcagttccttgccattgtggccttttctctatgacagcacacagtgtggctgcctgattcattaaagtcagcaaacgagagtgtcaggatctcactctgtcacctgcagtggtacaaatatatatatattttgtttgtttgtttgtttgttttttttttttgagaccgagtcttgctctgtcacccaggctggagtacagtagtgcgatcttggctcactgcagcctctgcctccccggtttaagtgattcttctgcctcagcctcctgggtagctgggaatacaagcacacaccaccatgcccagctaatttttttatatttttagtagaggcggggttttgccatgttggccaggctggtcttgaactcctggcctcaagtgatccacctgccttgacctcccaaagtgctgggattacgggcatgagccaccgcgcccagcccctggccccactattttttaggtgtgattttatttttgatgattatgtgaaatgagatgccttgttttcttaccattatcatagttttcatagcatgattgatcattccctcctttgtccgttctgtatgttttatacaggcttttattggagcaatgatacctttttttgggggggccttggcaaagtgtggtggctcacaccttaatcccagcactttgggaggcagaggcggacagatcacatgaggccaagagtctgagatcagcctggtcaacttggtgaatccccgtctctacaaaaagtacaaaagttagccaggtgtactggtgcatgtctgtaattccagctactccggaggttgaggaatgggaatcgcttgaggcagagattgcagtgagccaagatcatgccactgcactccagcccaggtgacctagcgatactctgtctcaaaaaaaaaaaaagtggcagtgggggggcgcttgctttgttgcccaggctggagtgcagtggcacaactttagctcactgtaacctggaactgctgggctcaagtgatcctcctgcctcagcctcttgaatggctaggactacaggcatgtaccaccagcatgcctggctaatttttaaatttttttgagagatggggtcttgctatgctgcccagccttgtcttgaactcccgrgctcaagcaattctcctgtctcagcttcctgcgtagctgggactacaggtgtttgctaccatgcctagctgggtttgagtcttggctgtaccacttacaaactttctgaccttgacttctgtgcctccgtttcctcatctgcaaaatgaggattgtaataatatctacctttagagttgttgagaaaatataatgaactattatgcgtaaagcattagaataatgttataaataattcaccctatttaagggctagttattatttctgttatataggtagctgatatctatggagctatttctttgagctaggtactgtattaagaacatgtatatattttattgcatagtatctataacaatcttgtaagtagttacactttcatttcataaatgagaaaactgagcttcaaagatgtagaaactaaaagagctagtatctgccatctgcttgatactgaaaaattgattcattcgcattcatggttatacatttattatttagtgcatatgcagtttgtcatgcaaactgtaaatttcttgcagtgttgtaacagttgtggtttaaggaaagtaagaggaacattttagtaagtgaatgttatgttattttgggatattttatttttgtgcttgaataggtaaaggtttttatattttctgtttgggagctttgtctgaaaacttagatactggatctcaaaatgctggtgcttctacggtggcctcagtgtcacaactgtactaaaaactgactaattttttaactttccaaacagtaacttatgaaattgtctagagagtgaatcttttctcttttaaatgttgattattgttgtagtctgaatctaaaatacttaaggtttttcctcagattatcagtatcttatttcatggttgtgtttatttctctgtatgcctttctgagatctcactgtaaaagttttcatcaaaccaaatactgcatattctcacttataagtgggggctaaatggtgagaacacatggacacatagaggggaagaacacacaatggggcctatcatagagtggagggagaggatcagggaaaataactaatgggtactaggcttaatacctaggtgatgaaataatctgaacaacaaaccctcatgatacaagtttacctatgtaacaaatctgcatgtgtactcctgaacttaaaacttttattaaaagttaaaaacttaaaaaagtgtcttcatcagtggtatgtgatattattttaacagagtcttactctgtcgctgaggctggagtacagtggcaccgtgtcagctcactgcaacctccatctcctgggttcaagcaattctgctgtctcagcctcccaagtagctgggattacaggtgcctaccaccatgcctggctagtttttatatttttagtagagatggggtttcaccatgttggccaggttggtctcgaactcctgacctcaggtgatccacctgcctcagcctcccaaagtgctgggattacaggcgtgagccaccgtgcccagccagtgcttctatgttttaataactactctatcagaaaagagtttagctctatagtcatggaattatatgaagtaacttttgttaagatggctaagaactgggcagtaaggatgatgtgagatagtagatgttctacttaaaggtaaaagttaggagaaagcctattaggtatttctgacataccagttttcagagtcattgggtgactgagatgtcagtatataccaatactgtttggggaacaaaaattaaatgctcccaaaaagactacttggaagtattcagaaccatccccaaaccccaacatctatgagcaacacttatgtgtgtctgtaaccaagaagctttgcttgtctgtctcatatcaaaccagccatttcagaatttaactgttccaggtagtcagagttaaggtaaccttcaaaatctagaaaaagtattttataaaattcaacatccctttatgataaaaactctcaacaaactagtcatagacagaacatacctcaacataataaaggccatatatgacaaacccacacctaatagcatactgatagggaaaagctgtgaaagccttttctctgaaaactggaacaargatgctcactttcaccactcctattcagcatagtactggaagtcctagctgcaacagtgaggtaagagaaagaaagaaaaggcatccaaattggaaaagaggaagtcaaattgttcctctttggagataaaatgatcttatatctagaaaaacctaaagattccaccaaaatcttttagatctgataaattcagtaaagttacaggattcaaaaatcaatgcacaaaaatcagcatttctatacaccactaattagctgaaaaaaatctagaaggcaatcccaattacagtacagctacaaaaattataataaaatacctatgaataaatgtaaccaagaaagtgaaagaccctacaagaagaactgcaaaacgctaatgaaagaaattgaagaggacacaaaaaaatagaaagatatcttatgctcatggattggaagaattaatattgttaaaacgaccatgctacccaaaaacaatctacagattcagtgaaatccctatcaagataccaatgttgggtcaggcgcagcggctcactcctgtaatcccagcactttgggaggccaaggtgggtggattgaggccaggagttgaagaccagccttgccaacaatggtgaaaccctatctctactaaaaatacaaatattagccaggcatgatggcacatgcctgtagttccaagtacttgggaagctgaggcgggaggatcgcttgagcctgggaggcagaggttgcagtgagccgagattgtgccactgcactccagcctgggtgacagagtgagactctgtctaaaaaaaaaaaaaaaaagatactaatgttggctgggcacagtggctcatgcctgtaatcccagcactttgggaggccaaggcrggaggatcacctgaggtcaggagttcgagaccagcctgcccaacatggagaaaacctgtctctactaaaaatacaaaattagctgtgtgtggtggcacatgcctgtaatcccagctactcgggaggggaggtaggagaatcgcttgaacccggaaggtggaggttgcggtgagccaagatcgggccattgcactccagcctgggcaacaagagtgaaactccgtctcaaaaaaaaaaaaaaaaaaaaaaaaaaaaggccaggcacggtggctcatgatcccagcactttgggaggccgaagtaggcggatcttctgaggtcaggagtttgcgaccagcctggccaacatggtgaaacyccatctctactaaaaatacaaaaattatccaggtgtggtggtgtgtgcctgtaatcccagctactcaggaggctgaggcaggagaatcgcttgagcctgggaggtggaggttgcagtgaaccgagatcacgccactgcactccagcctgggtgacagagtgagtctccatctcaaaaaaaaaaaaaaaaaaaaagaagatmccaatgtcatttttcacagaaatagaaaaagcagtcctaaaattttgtatggaaacaaaaaagagaccaaatagccaaagcagtcctgagcaaaaagaacaaagctggaggcatcatactacctgacttcaatatatattacaaggctatactgagcacaacagcatgatatttgtataaatcagacacatagaccaatggaacagaataaatccacgtgtttacagccaactgattttcaacaaaggtaccaagaacgtacactggggacaagacactttcttgaataaatggtgctgagaacatggtatattatatatgcagaagaatgaaactggatctccatctcttactatatacaaaagtcaaatccagtcacaccagtacactccagcctgggcaaaagagtgagactctgtctcaaataataaaataaaataaaataaagataatttaaagacttaaatgtaaaacccyaaactacaaaactactagaagaaaacataggggtttcagcatgttattctgggtcttaaaaaaaaaaaaaaaaagaatactgagcaacatagtgagaccttgtctctacaaaaaaaaaaaaaaaaaaaaaaaaawttagaccacagkggcttacacctataatcccagtactttgggaggctaaggcaggaggatcacatgagcccaggagttcgagatgagtctgggtaatatagtgagaccctgtctttagaaaaaaaaaaaaaaatggctgggtgcagtagcccatgcctgtaatcccagcactttgggaggccaagccaggcagattgcctgagctcaagagcttgaaactagcctggccaacgtggtgaaaccctgtctctgcaaacaatacaaaaaaattagctgggtgtggtggygtgtgcctgtagtcccaactacctgggagactgaggtgagaggattggttgagcctaggaagttgaggctgcagtgagctgtgatcacaccactgcactccagcctgggtaacagagtgataccctgactcaaaaaaataaaaaattagccagccatggtggtgcacacctgtagtcccagctacttgggaggctgaagtgggaggatttcttgagcctaggagttcaagattgcagtgaattatgatcaagccactgcactccagccttggtaagagagagagaccttgtctcaaaaaaagaaaaaaaaaaaaaagaaagaaaagtaaacagaggaaacacttcaagacattggtctaggcaaagattttatggcaaagacctcaaaagtataggcagcaaaaccaaaaatcgacaaatgggactatattagactaaaaatcttctgcacagcaaaggaaacaatagagtgaagagacaaccttttgaatgggaggaaatactcgtaaactatttatccaaaaaggggctaatatttggaatatacaaggaactcaaacaactcaacagtaaaaaataaaaaaccatctctccctaccccgaaaatcccatttaaaaatgggcaaaggacatgaacagaaatttcttgaaagaaaacataggaatggtcaacaggtatacgaaaaatgctcaacatcataaaaaatttgctaatcagggaaatgcaaatcaatacaatgaggtattatcttatctcrtttagaatggctaccatcaaaaagacaaaaagaccccatctctacaaaaaaaaaaaaaatagctggatgtagtggtgcacacctgtagtttaagctactcgagaggcttaggtgggaggatcgcttgagcccagattgacactagagtgagctgtgatcatgccactgcaccccagcctggcaatagagcaggaccctgtcttagacaaacaaacaaaaacaggccaggcacggtggccagtgcctgtgatctcaacactttggaagatggaggcaggtgcgattgcttgagctccggagttcgagaccagcctgggcagcatggtgaaacctcgtctctaccaaaaatacaaaaattaactgggtgtgctggcacatgcctgtagtcccagcyattcaggaggctgaggcaggaggatccctagagccaggaggttgaggctgcagtaagctatgatcatgccactgcactccagcctgggagacagagtgagatcccatctcaaaaacaacaacaataacaacaacaacaaaccccaaaaccccaaaaatgaacaaacaaaaaacaaaccagatctgatgaagatacagcgtaaagggaactcttatattcttggggggaatgtaaattagtatggtcactatggaaaacagtatggagatgtctcaaaaaagtaaaaaatagaactaccatatgatccagcaatctcattagtgggtatttatccaaaggaagggaaatcaatataccaaagggatacttgcatctccatgtttattgcagcactattcacagtagcaaatatatggaaccaacctaagcattcattgatggataagtggaaaaagaaaatgtggtatatataaaaaatggatcactatttggacataaaaatgtatgaaatcctgtcattttcagcaacgcagatggaactggaagtcattatgttaagtgaaataagccaagcacagagagactaatattgcaagttctcacttatatgtgagagctgaaatagttgatctcatagaggtaaagagtagaatgatagttaccagaggctgggaagggtgcgtgggatagagaaagttggttaataggtacaaacatatagttggatagaaagtgtaagttataggctgggcatagtgtctcatgcctgtaatctcagcactttgggaggccaaggagggcagatcacttgaggccaggagttcaagaccagcctggccaacatggcaaaaccctgtctctactgaaattacaaaaaaaattagctgggcatggtgggtacgtgcctgtagtcccagctacttgggaggctgaggtacaagaatcgcttgaacccaggaggtggaggttgcagtgagccgagattgcmccmctgcaaccagcctgagtgacagagtgagactcggtctcaaaaaaaaaaaaaaaaaaaaaaaaaagcggctgggcgcggtggctcatgcttgtaatcctagcactttgggaggccaaggtgggcagattgcccaagctcaggagtttgagaccagcctgggcaacacagtgaaactccatctctactaaaatacaaaaaattagctgggtgtggcggcatgtgcctgttgtcccagctactcaggatgctgaggcagaagaattgcttgaacctgggaggcggagattgcagtgaggcgagatcatgccactgcactccagcctgggtgacagagcgaaactccatctccaaaaaaaaaaaaaaaaaaaaaagttataatattcaataggagagtatggtgactatcattaataatgtattgtatatatcttttttttttgagacggagtctggctcttttgcccaggctggagtgcagtggcttgatctcggctcactgcaagctccgcctccccagttcacgccattctcctgcctcagcctcccgagtagctgggactacaggcgcctgccaccatgcccggctaattttttgtatttttagtagagatggggtttcaccgtgttagccaggatggtcttgatctcctgaccttgtgatctgcccgcctcggcctccaaaagtgctgggattacaggcgtgagccaccgtgcctggacaatgtattgtatatttctaagtaggtagaagagcggacttgaaatgttcccaatacatataaatgataaatactcggcctagtgtagtggctcacacctgtaatcctagcactttggaaggccgaggcaggaggatcccttaatgccaggtgttcaagacctacttcctaagtagctgggaccactatgcctgactatttttatttctgtagagacagggtattgctttgttgcccaggctcaagtgatcctcccatctcagcctcccaagtatctgggaccacagacatgcaccaccatgcctgggtaacgttttttgtattttttgtagagatggggtttcaccatgtttcccaggctggccttgaactcttgggtttaagtgatcctcctgtctcagcctcccagagtgctgggattacaggcatgagctactgtgccttgccctaaaaattttttattttctggttcttgctttccatgctaggctcatcacaagcttgcaattccttaacatgtacccaccaggccttgagccaaacccagtttctcaccattccttagaatatcccatgctcttattcctctgagactctgcacatgcttttacacctgctcagtatgccctttccttgcttgttctatttgacaagctctttcttattcttgaagaaaactgaaggatgacttcctctgggaatccttctctgaccccttcaagcaaggtttttactggtggccagtaaaaggttgagtatcccttatccacaagctgggaaccagaggtgttttggattttggaaaatttttttgaatatttgcattatacttactggttgagcatccctaataactactctttatgtgcgcatcatgtctttgttccaggctataataagggggaagtaaaaagtacaatttcatcaagaaagcaatagcatccccagaaattccatgcagcaatttccacttgcatctttttttttttcttttagataggttctcgctctattgcccaggctggagtgcagtggcacaatcttggctcactgcaacctccgtctcccgggttcaagcgattcttctgcctcagcctcctgagtagctgggactacaggcacgtgccaacatgcccggccaattttttgtatttttagtagagacagagtttcaccatattagccaggatggtctcgatctcctgacctcgtgatccgccgacctcggcctcccaaagtgctgggattgcaggcgtgagccactgtgcccggcctcttgcatcttcttactagcactrtgtaayatagactctcctagttgcaaggaagattgccaggttgggtttctttcagtcacaaaaaagaagaaaattggtgttgagtaaataattcgtattgtttaatctgcttacttttcagtagatgggttctaggccataagctcaatttttgtccaggaagtgtaagtcactggaggattatctccagaattttttgggtgattctgccttataaaactgtagctctttacgctaactacaaatataacgcaacctctatttctgtccgtccatatattagtagcaagtgaggtgtaacccacatttctgtccagccatattcttgggggcttggctcaagacttttatagaaccacacatgaaatgtcgccaaagaggaagcaaaaagatgcaacccttgccagtgacttgtcagccaccacaaacccaaaagtcatgtgccatgctacagtacaaactaaccctagctgtctcatcatcaagtgctctctcacaacacaaactaacccttggtatcccaaaaggcaaagagatcagagagatcaaaggcaaaagagcagagctcagacctgagagaggtttactcacgactctattttttctgtttgtttgtttgttttagatagggtctcactgtgttgcccaggctggagtgcaatgtcttgatcatggctcactgtagccttgatctcctgggctcaagcgatcctcccacctcagcctcctgagtagcygggaccacaggtgcacaccaccacaaccagctaatttttgtatttttttttgtagagatgtgttttaccatgttgcccaggctatctcgaactcctgggctcaagcagcctacctgcctcagccttccgaagtgttgggattacagctgtgagccaccatacccatcttcacaactctttaggctccatgagaagacagattctcatccaaaaaggggttagcagagcttagggtctcagggtcttcagcagtctccttcaggtccctttgtggtagccacatctgttaaaggacaaaattagaataaatatagtttaaagacttcaatagtctttattgctattctagagtccagcaactcttcatttcctaaaatagaataagtgtaccaatgagctgagtggaagaatttggctttatagtcagagaagggcttaaaaaagcagaagcaaagacctgagagtgtattattagccctttcaaagttcttataatgcaaaggcagggatatcaaacaacagaaaagtaactgatttgttagtatcaactaacttcaggctacttcttttgtgtaagagttaaagcggagggactttagttatgccaattgaagattgaagctggtcagtttgggtgattggctgttatctctctttcctgatttcttggaaagtcagataacaacttagtggaacaacttagtagaactttagcacgggtaactccgttttcatttttagtctcgtctgttaaagcctagtgcaggaactcaatccaaaactgttatgcctcctgtaatttttgtttagtagcattttgataaattttgtcatatatactttaaaaaaaatgcctgtctttgaggaaggattagatcaaagatgccacttttgttattgaaatgttccatatccttactaatttcttgtcttcttgagctttcaggtttaaaaaaaaaatttttttttaatctgttttttagatggagttgcgctctgtcacccaggctggagtgcaatggcacaatctcggctcactgcaacctctgcctctcgggttcaagcgattcttctgcctcagcctcccaggtagctgggactacagacacgcaccatcacgcctggctaattttgtatttttaagagatgggttttcmccatattggccaggctggtctcgaactcctgatctctaccgcacctggcgagctttcagtttttgagagatgtgttaaaatgtctcataatatttaggggccgggcgcggtggctcacgcctgtaatcccagcattttgggaggccaaggcaggcagatcacgaggtcaggagatcgagaccatcctggctaacatggtgaaaccccgtctctactaaaaatacaaaaaattagtcgggcatggtggcacgtgcctgtagtcccagatacttgggaggctgaggcaggagaatggcgtgaacccgggaggcggagcttgcagcgagccaagatcacgccactgcactccagcctgggtgacagagcgagactccgtctcaaaaaaaaaaaaaaaaaaaaaaatcaggaatttaagagctgggcgcagtggctcatgtttgtaatcccagcactttgggaggccgaggcaggcagactgcttgagcccaggagtttgagaccagcctggacaacatggcgaaaccctgtctctaaaaaaatatataaaaattagctgggcatggtggtgcacagctgtggtcccagcttctcaagtggctgaggtgggaggattgcttgatctcaggagggggaggctgcagtgagctgaggtcatgccactgcaytcaaacatgggtgacagagtgagaccctgtttaaaaaaaaataaaaataaagatcatagatttgtcacatttgccttacattgtcagtttttgttttctatattacaagaccatgttgtgagatacatacaagatcatgattattatcccttggtagaatatttatgcaatgttcacacagtgctttttttcttgaatcagttggtctgactgtatcaggctcaatattctttgcatagtttgtattcaaattgtgtctctgccatttaatagatgtacgatcttgagaaagatttaatttctctgtgcctcagtttccatggctgtaaaatgaggttattagtgatacttgtctcacaggattatcttcaagattaaataagttaatatgtataaagaagttatacagcagtacctagtatgtagcaaatgctgtaaatgttagctatgttattgctgttttataactgtgtatgatggttggggcatcttttttaaacttttatttttatgggtacatagtagataatatttatggggtacatgagatattttgatacagccatacaatgtgtaataatcacattgggataaatgggatatccatcacctcaagcatttatcatttctttgtgttgcaaacattccaattatactctgttattttaaaatatacaattaaattattgttgagtgtaatcaccctgttgtactaaatcttcttcattctatcaagctatatttttgtacccattaactgcccccactcccccacaccccacactacccttcccagcctctgttaaccatcatcattctactctgtctctatgagttcaattgttttatttgagctcccacaaataaatgagaacatgtgaagtttgtctttctatgtctggcttatttaactgaacataatgtcctcaagttccacccatgttgttgcaaatgacaggttctaatcctttcttatggctgaatagtactccattgtgtgtatgtaccacattttctttatccatttgtttgttgatggacacttaggttgcatccaaatcttggctattgtgaatagtgctacaataaacatggaagtgcagatatgtatttgacataccgatttcccttcttttggtatatacccagcagtgggattgctggatcatatggtagctctattcttagttttttgaggaacctccaaactgttctccatagtggctataccaatttacattcctaccaacagtgcacgaggcttacccctttctctacatctttgcaagaattctttttttttttttgagacagagtcttgctgaggctgaagtgcagtggcgtgatcttggctcactgcaacctctgcctcccaggttcaagtgattctcatgcctcagcctcccaagtagctggaattacagacgtgcactaccatgcccagctaatttttgtatttttagtggagacggggttttaccatgttggccaggctggtctccaactcccgacctcaggtaatcctccacctcggcctctcaaaagtgctaggattacaggcgtgagccaccgtgcccagcctgcaagaattctttattgcccttcttttggataaaaaccattttaactagggtgagatgatatctcattgtagtttggatttgcatttctgtgatgatcagtgatgttgaatacctttacatatacctgtttgctgttcgtatgtcttcttttgagaaatgtctgttcagatcttttgcccatttaaaaaatctgattgttagatttttttttcctatagagttgtttgaacttcttatatattctggttattaatcctttgtcagatggatattttgcaaatattttctcccattccatggattgactcttcactttgtttcatttgctgtgcagaagctttttaaccggatgtgatcccatttgtccatttttgctttagttgcctgtgcttttggagtattactcgagcaatctttgcagaccaatgggagagtttcccccgatgttttcttgtagtagtttcatagtttgaggtcctagatcgaaatctttaatccattttgattagatttttgcatatggctagagataggagtctagtttcattcttctgcatgtaactatacagttttcccagcactatttrttgaagagactgtcctttccccaatgtatgttcttggtacttttgttgaaaatgagagtttattgtagatttatggatttgttattggattctctattctgttccattggtctatgtttctgtttttatgccaataccatgttattttggttacaatagctctgtggtataatttgaatcaggtaatgtgattcctccagtttctttctttttttcttttgagacaaagtctcagctctgtcacctaggctggagtgcagtggtgcaatcttggctcactgcaacytctgcctcccgggttcaagccattctcctgctcagcctcccgagtagctgggattacaggggcatgccatcacgctcagctagtttttgtattttttttttttagtagagacagggtttcaccatgttggccaggctgatctcaaactcctgacttcaggtgatccacccacctcggcctcccaaagtgctgggattacaggcataagctactgcacccggcccagctttttttcttttcctcaggatggctttggcgattctgggtctttgtgattccatagaaagtttagtatytgagtagtatgggaattttaaaaataccgattsttgcaattcatgaacatggaatatctttccatttttttgtatctttagtttcttacatcaatgttttataactttcattgtagagaacttttttgtttgtttttgagacagtcttgctctgtcacccaggctggagtatagtggcacgatcacagctcactgcagccttgacctcctgggctcaagcaatcctcccacctcagcttcccgactagctgggaccacaggcttgaaccaccaagcccagttaatttttttgtattttttgtagagatartgtctcactatgttgcccaggctggtctcgaactcctggactcaagcaatccttttgtcttggcctcccaaagtattgggattacaggcgtgaaccactgtgcctggccttttagagctcttttaattcattggctaacttaatttctaggtatttaattttatttggagctactataaattggattactttttggtttctttttcagattgttcactgttggcatatagaaatgctactgatttttgtatgttgattttgtatgctgtaacttttctgaatttatcagttctaatagtttttttagtgtagtcttaggtttttccaaatacaagatcataatcatctgcagacaagaataatttggcttcttcctttccaatttggatgccctttatttctttctcttgtctgattgctctagctagggtgtccagtactatgttaaataacagtggtaaaagtggggatcctttttgtgttccatatcccagaggaaaggctttcagtttttcttcattaagtatgatactagctttgggtctgtcatatatggctttttgagctatgttccttctatacctagttttttgagggtttttattatgaagagatgttgaattttatcaaatgctttttcagcattaattgaaatgatcatatggtttttgtccctcattctgttgatataatgtatcacattgattgatttacgtatgttgaactatccttacatcccagggataaatcccrgttggtcaggatgaatgatcttttcatgggttttgccattttgttaaaatcttagtgtgacagttttcagatgatggaaaaataagaagagtgactttcagctggagagtccttattaaaacacagatgtcttctgtaaatagagttggaaaaatactaccagtgagctctttgtttataaatgtttcttttaacttatccatgcaggatctgaartggaaagctacttctctttcatcagtcragaggtacrttacaacagaatccttgatgcactgagaagagagctgggttccaaatctcactcagtgatctaggagaggagaggcagccagtgttctgcctgccttagtttttccgatcagggttcctgtggctctttgtgttttggcccggcctccccctcaacagccttccctcttctgcctggcctctctgaaacactgtttgaattctaagataagctgtgatgtctgacctgtattaatagctatgataaacttgtggagctattgtcatttcaaggagtttttggatattgaagagtttaagtaagttgtcatgttttcttttggaattcccatttggttgagtatagcatactgaaatgatactcctgaagtccgtaggatgatgacatttttgcatagtaaagtccctgttgtgcaagatatgaaatgaaatttttttaacgagaaagatctttgtgacttcatgatttttctactgcctcattcataattcctaagcaggaaacacacatatctcagtttagcttctttgaatcacacaaaatgttttgtctggtggtcttattttgctaccaatgagaccacatttacagggtgaaaacaatctttctcaagtaaagtgttatggtttatgaaacctgtggagtgtgcattgaaatgataaataatatttacacatgcacaatagattgagttctatagagggcgaatacttttagaagtagactttcctctgtgcatatgggtaatagtgtgagtggtgtggcccatgtttgttgtatttaacttgagtgtgtttaaatgattataaggtgctttgggtagagttactacaatattagctctaaaaggttcacggacttctttctatatttagcatgaaattttttttttttatagatttttttttttttcgcgagacggaatctcgctctgtcacccaggctggagtgcagtggcacaatctccactcactgcgggccccgcctcccaggctcatgccattctcctggctcagcctcccgagtagctgggactacaggtgcccgccaccacgcccagctaattttttgtgtttttagtagagacgggatttcaccatgttagccaggctggtctcgattttgtgacctcgtgatctgtcccccttggtctcccaaagtcctgggattacaggcgtgagccactgtgcccggcctatggatttttatggtacttgggggagactttgagtatgtgggtttagcatcttataaagacagtttcattaagtgttacataaggctcatgcatatatcttcgttttgcacacttagaatgccacagaagggactcttttctgttggtgtcttaagactcaccaaggtcagccatgaggaatcagcttaaaaattttccctcattttttttttctaaggtattaaaaacaggccaggcacggtggctgggaggccaaggctggtggatcacaaggtcaggagttcgagaccagcctggccaacatggtgaaaccccgtctctactaaaaatacaaaaattagctgggcgcggtggcaggcgcttgtaatcccagctactcgggaggcttaggcaggagaattgcttgaacccggaaggtggaggtttcagtgagccgagatcacgccactgcactctagcctgggtgacagagcaagactctgtctcaaaacaaaaacaacaacaacaacaacaacaacaacaacaacaacaacaaaaaaccagacatgattggctgggcatggtggctcacacctgtaatcccagcattttgggaggccgaggcaggcagatcacctgaggtcaagagtttgagaccagcctggccaacatggtgaaaacctgtctctactaaaaatacaaaaattagccgggtgtgttggcacatgcctgtaatcccagctactcaggaggctgaggcaggagaatcacttgaacctgggaggtggaggttgcagtgagccgagattgtgccactacactccagtctgggtgacacagtgagaccctgtctcaaacaaaaacaacaacagcaacaaaccagacatgatttcttttatttatttcttcatttttttctttatttcttctaaaaaaaagaaaacatgggatacatgtgcagaacatgcaggtttgtgccatggtggtttgctgcacctgttgactaagttctaagttcccttccttcaccccccacccgctaacaggccctggtgcgtgttgtttccctctctgtgtccatgtgttctcaatgttcaaaacatgcagtgttggttttctgttcctgtgttaatttgctgaggatgatggcttccagcttcatttatgtccctgcaaaggacatgacctcattcctttttatgactgcatagtattccatggtgtatatcagacatgttttcttgagatgttagtaacagtgtttttctggccaactcaatgtgaaataatactgttcttgggtagaataattcatcttcattcatggaagtgatactttaatgtaattagatgtatattttatctaaagtggcacaaaaatatcttggcatattgtacatttggagatgttgacctcacatataactattgcccttgaccctcttttcttgttctatttaatattctaggtacgacaccgagcttctggtcaggtgatggctcttaagatgaacacattgagcagtaaccgggcaaacatgctgaaagaagtacagctcatgaatagactctcccatcccaacatccttaggtaatggcttttccttccttctgatcaatgagaaaactgaaacattggaggcttgctagaatagcactaataggaaaaaaaggagggattcaggatttatcatgctgaatctatcttgctggggtttagtggtactctaggtcgttttctacccattgagacttaatttattggtaattaactgcatttaataaagcaacttcctttatctcttaagttgctttactctcattagaacattagtagcagctcattagaacaattgttttctattgctgactggtaatttatcaaagaggagagattggtctttatgtggttatttacttttcctgattactttttgggaaattgtaattaaatcaatgagtggcaataaatgtaaaattacaccctcaagttatctatccttaacttttagcactcacttgaggagacacattttgcctttgagaattgttatttttttgagatagggtctcactctgtcacccaggctggagtayagtggcatgatcatggttcactgcagccttgacctccagggcccagttgagcttccccacctcagactcctgagcagctggaactacaggcgcaccaccacatccagctaattttcacatttttcgtaaagtcagagttccaccatttgcccaggctggtctcaagttcctgggctcaagcaattcaccctccttggcctcccaaagtggacaattatttttataagtttatgtaattgtcactttttaataatccgtatctgaatctttcttgctttaattattttgatattttagtcaggcaagtatattttctttttaaaaaaaatttggctgggcgcgatggctcacgcctgtaatcccagcactttgggaggccgaggcaggcggatcatgaggtcaggagattgagaccatcctggctaacatggtgaaaccccatctctactaaaaatacaaaaaaacagttagccgggcgtggtggcacgtgcctatagtcccagccacttgggaggctgaggcaggagaattgcttgaacccgggaagtggaggttccccctgggaacctagtgcagtgagctgagattgcactactgcactccagccagggtgacagagcaagactccgtctcaaaaaaaaaaaaaaaaaaaaattttatttggccaggcatgatggctcatgcctgtaatctcagtactttgggaggccaaggtgggtggatctcttgagcctaggagtttaagaccagcctgggcaacatggtgaaaccccatctctacaaacaacaacaacaacaaacaacaaaaaaaattagccaggtataatggcatgtgcctgtagtttcagctactcgggaggctgaggtgggaggatctcttgagccaatagttcacagctacagtgagccatgatygcagcactgcactccagcctgagtgacagagtgagaccctatattaaaaacaaaaatgattttgttaaaaaaaatttttcttaaatgagataaggtctcactgtgttgttcaggctgggattacaggtgtgatccaccacacctggccagtatatttttaaatgagaccaaataagacaatttaattcaatgtatatttagttagggtttatgtgcaggatgctttgtaaagtttaaagtactatttacttagggtcatttattgctattttttgtatgtttatattaggctagagagaactcatatggcttaagtatgacttacatgtttggtcaatggtattaaattatggaattaaattatactgcttacttgaaackttttatccttatatagaattattggcttcctagtctactacaaaaatattcagccagtatttttattgtggtgactttctttcaaatttataagtcaaattaacactttttttttgagacggagtttcactcttgtcgcccaggctggagtgcaatggctcgatctcagctctctgcaacctccacctcctgggttcaagtgattctcctgcctcagcctcccaagtagctgggattacagacactcgccatcacacccggctaatttttgtatttttagtagagacggggttttaccacgttggccaggcttgtcttgaactcctgacctcaggtaatccacctgcttcggcctcccaaagtgctgggattacaggtgtgagccaccgcacctggccagattaacacattttttgagcatctactatatgcctggtgatatattcagacatcagaaagatatcaagatatatataaaatagagtgtctgctagcaaggaatttatactttacttgctctacttacattgatggaaagagaactaataaattaactaagacaccaccatttgagtagaataaactcttaagtgccttaggagttcaaatgagtgaggggtcatattaactttgaagagtcagggaagtctgggcgtgacggctcacgcctgtaatcccagcactttgggaggctgaggcaggcagatcacaaggtcaagagttcgagaccatcctggccaacatggtgaaaccccgtctctactaaaaatacaaaaattagctgggtgtggtggcatgcacctgtagtcccagctactcgggaggctgaggcaggagaagctcttgaacctgggaggcagtggtttcagtgagctgagattgcgccactgtattccagcctggcaacagagcaagactctgtctcaaaaaaaaaaaaaaagggtcagggaagccttctaggaggggacttgaaccggactttgaatttttttttaaattacttttaatttttgtgattacatagtaagtatatctgcttatgggttacataaaatattttgatgcaggcatgtcgtgcataataatgaaccttgatttttaaaaggattttagaagataggggaggaactcagagcaaatagtgatatagaaagcacagatataaaaatgcaaagctttttgaggagtcagtgaataaaatcctatttggctaataatgacaataataataatgaccatttattgaaggcatgttgtatactgggtgtgttacttatttaaagatttcatcttcacactcactctccattgaggccaagagattatgtatgggccaaagtctcctctaaggcctatgttctttctaccaggcttctcttagaagaactgaggatttgataggatagtattggtagataaaggtggaaaagtagaattgggtcaaattatccagaaatgctttgcataaatccaaaggattgtagtttatgatctgtgattggattctgagcagaaactagaatgataaggtaattgatgacaagatgcagaatggtttagtgttagagagactggtagcaaagagatcagttagggggcttccaccatgtttgagagtgaggtagatgaggctttgatattctgcttaggaatttttaagatgatcatattttaagtaatatctagcttaagaagtaatattttaatttttttattattacagaagtgatacataattgcaatgcaaacatttagaaaatagaattagtaagaaaaagaaaataaaacttgcccttaatctcagcatgtagggctaaaactagtattagcattttggcatctttcctgctaatctttttattttatcattccttttcttactctcttcactgtgaactgaactagcaaatgcatggaaagttgactttaaataaattttattccattacascaaaatctttagatatacttgttatataataaaatggtatagtataacctgaaactgtaaaactactaaaagaaaacatatgctgggtacggtggctcacgcctgtaatcccagcactttaggaggccraggtgggcggatcacgaggtcaggagatcgagaccatcctggctaatactgtgaaaccccgtctctactaaaaatataaaaaattagccaggtgtggtggtgggtgcctgtagtcccagccactcgggaggctgagacaggagaatggcgtgaaccctggaggcagagcttgcagtgagccgagatcgcgccaccgcactccagcccaggcgacagagcgagactctgtctcaaaaaaaaaaagaaaacataatagaaaaatctccatgagattgggtagacaattttttggatgtgcacaagcaacaaaagcaaaaatagacaaatgagattgcatcaaactaaaagcttggaaggccgaggcaggtggatcacctgagtcgggagttcgagaccagcctgactaacatggagaaaccctgtctctactaaaaaatataaaattagccgggtgtggtggtgcatgcctgtaaccccagctactcagggggctgaggcaggagaatcacttgaacctgggaggcagaggttgcagtgagctgagattgcaccattgcgttccagcctgggcaacaagagcgaaactgtctcaaaaaacaacaaaaaagaaggaaatactgtcatttgggacaacttggatgaacctggaggatgttacactaaatgaaataagccagacacagaaagacaaataactcatgatctcatttatgtatgaactctaaaaaagtcgatctcatagaagtagagagaagaggctgggtgcagtggctcatgcctgtaatcccagcactttgggaggctgaggtgggtggatcacgaggtcaagagatcgagaccatcctggctaacacggtgaaaccccatctctactaaaaatacaaaaaatcagccgggtgtggtggcacacacctgtagtcccagttactcaggaggctgaggcaggagaatcacttgaacccgagaggcggaggttgcagtgagccgagatcgcaccactgcgctccagcctgggtgacagagcaagactctgtctcaaaaaaaaaaaaaatgtggagagaagaatggtggttaccagaggatggggtgagtggatgggatgggggaggaaatagggggaagttggtcagagacacaaagtttcagttacataggaggaatacatttctgaaatctgttgtgcagtatggtgactatagttaataataatgtatatttccaaaaacagaaaatagaactgctatatgatccaggaataggagtaaattttaaatatgtcaccacaaaaaatgatgtgaggtagtagatatgttaattagcttgatttaatcattctacactgtatacatttatgtttgatctattttaaaaagtagtactatagtatgattaaaaatgaaggctttaggttgggtgtgcccacacctgtaatcccagcactttgggaagccgaggcagacagattccttgagctcacaagttcaagaccagcctgggcaagatggtgaaaccatgttttcttttgtattttttgtagagaaaacatggtttttgtagagaaaaccttgttttctctacaaaaaatacaaaaattaactgggcatggtggtgtgcgcctgtagccctagcgactttagaggctgaggtgggaggatggcttgagcctaggaggcagaacttgtagtgagctgagatcataccacttcactccagcctgggtgatacagccagagcttgtctcaaaaaaaaaaaaaaaaaaaaaaaaaaaaaggctctagattagaggtgtccaatcttttggcttccctgggccatattggaagaagaattatctggggtcacatataaaatacactaacactaacaatagctgatgagctaaaacaaacaattgcaaaaaaaaaatctcatagtgttttaagaaagtttatgaatttgtgttgtgccacattgaaagccattctgggctacatgtggcccatgggctgtgggttggacaagcttgctctagattctagatcaaactgcctggattcaaatcctggatcttaggaaagtttagttaacctctctaagccttagttttcccatctataaaatgagggtaatgacagtaaatattttacggagttgttattgaagattaattaaattagtacacgtaaatcacttagaatagtacctggtatgtggtaagtgctcagtaaatgttagctattattattagtttcttttcctctggctgcttctttyagtggcctattatagcctttgttgttgttgttgttgttgttatttagtttttatttcgtaatcataaacttaactctgcaatccagctatgcatggaagggaacaaggaaaacatggaacccaaagggaactgcagcgaaagcacaaagattatgggatattgcgagcaaatggggtggaggagtgctctcctgagccacagaaggaatggtctggtggttaaaataaaacacaagtcaaatttattagagttgtccacagtcagcaatggtgatctccttgctggtcttgccattcccagacccaaagtgccccatggcctccacaatattcatgccttctttcaccttgccaaagaccacatgcttgccatccaaccggacacataaaccctggaataattctgtgaaagcaggaacccttataaccaaatcctttctctccagtggtcagagcacaaaagttttctgttgtctttggaaacttgtctgcaaacagctcgaaggagacrtggcccaagggctcgctgtttgactgtgatgttgaagaacatggtggggttgaccatggctgatagtacggggctcctggcggtggcagcagtgtccacaaagcacctatcttttttttattcatttactcactaaacacttgttgagtgcctactgttgcttttaatagattcaacggttttctactaaagcattgctgtccaatagaaccttctgcagtgatggaaatgttctatatttctgctgtccagtagccacatgtggctaataagcacagaaatattgctaatgcaaacaagaaattaaaattttatttggattgstttaaatttaaattgccacatgaagctagtgcctactgtatttgataatgctgggctacctacatctttgcctttgctttgctacgggtatatgtattccagcctagaaacatgtagggttgtgatgagaccaacattaccattcctattccatatctccttgatgtactttcttagcttatctccttttgatcctattgcttaggaatgatccccacctccaccctcatcccccttaacttaaaaaagtaatgttctttgctctcagccaagttttctaatgtatgaaaggtagcattcagtctatctaaatcttcccaataagcccacaaatgagatgatatatataaagyctctggcacaggaactgtcacactgcaagtataatacatgagaatgtaattattgttagccacgtgggtttgccctctgatggtgaccatttttgttctgcataagccatctgtctcaaagatactgtggtttaaaagcctgaaatggattactttttaaaagaagcttctaattatttatatcatttatgtttttatgtcttcactttcactatatattttgaagacaacaaaaggaaattattctaaccagtggcctagagcaaacaaagtccttttggcttttgttacccagacgagtattaatgtaatggaaacatttattatacttccctgtgactccttaaatgccaaactaagcatgactatgttttattctcaaggttcttagaatttgtattttctaaatgctttctggttgtcttagcaatttgctgttaatacttaggatttaaattttttggttactatttgttagtatggctcttagtctattttcaagctgtaaacattataagctttcttttataggtgcagaagtatgaaccagaatttttccccaaattgagattagatctacattggraagaatccatctcttggaaccctakgattacacagatgtgccttctcaggtgctggccccgggtatgggaggtggctgagtagatgagacttctgttctcttggcttcatctagtcagaacagttgcactttttatcttttttatattgaacttctgtataagagttttgaagaaaaggtctcttgcttaaaagaaagagagagagagagaaatgaaggaaagaaagaaagaaagaaaaagaaaaagaatgagttgaaaattcttctgttagtgctttggaaaggctacttgggaaagaagcctatctgcatgatctgccaggtggtaggcatttaatcctctgggcataccttggttctcttctgccagagctattgtgtgcccagcaggagtgagtgagctgaacctttgtagttctctttttcttgaccccaacctcctagtttccctttttccctttatctcccttcctcctaagatttctatttgggaggaaaagtgtgggcctggtaagtcatagaggtagtacttgtgtaaattttgttcatgtgtgtgtattctgtttatacatgggcccagtgaagattggttattttatcatcagttgctcaaagttatcagttaaaaaaaggaacaataaagtactttgttgaatgcagggactgattgtttaggtctcttgtgaataaggttgtttacgccaggaagtcttatgctcaagatctgtaacccagttctatgccccactcacttccactccccagtggcctttttgaggaactatacactcagatttgttctcatacctccccacgaccccaagacagggcctcactctgttgcccaggctcactgcaatctctgccttctgggctcaagcaatcctcccacctcagcctcctgagtagctgggactgcaggcgtatgccgccacacttggctaactttgaaaatttttttgtagagaaagttctcactatattgcccaggctggtctcgaactcctgagctcaagcaatcctcccacctcggcctcccaaaatgctgggattataggcttgagccactgcactgggtctctctgttatttatgccatgagaaatttaatatttcttttagactccttcaattcaccaaatatgccttcaattcaccaaatatgaaattgaagactatgccttcaattcacaaatatttgcttggaactactcagtccctccctgtgctaggtaatatcatgattaatgcaagagaaatagaggcttcttgtctcccagagagtctccttaagaagtaaattatactatgtaggaaatagactagcattagctaatgctgtgagaatatggcaggatattttcccagtctcagttattaagacagccatctttccagttatccatcctgaaaaattccagccatttttggttatcatgtattccttgcttctaatgagaagctaagctgtgattctaaatattcaaaggcttttgcatctattccttcccgtatatgtgggctgtaattcagccttcttcactttcacctggagtgaattattttccctgtctctttgccctttttcactcttcctgatactcagctctggttgtatagtttatttcttaaaactttttgtggctcacattggtttcaaaatcgagtcaaaaattatttagactgacagttaaggttcagtctgtttttccagccttttcttccactctttctcttgtacaattcacacagctccacaatttcctaattatattctctaggacaagttatttaacctctgtgctttgatttcttctgtttaatgagaatggaccagatcagttgttagaaatcacaytgaggcagggcatggtggcttacacctataatctgagcacttgggagactgaggcrggaggatccatttgagcctaggagtagtgagctatgatggcttcttcctgccagctgcacagacaaaatcaattccctgagatcgtggcattgcagtaagaaagagtttaattgactcaaggccagccatgccaaagaggcagttatcacttaaatcagtcttcctgaagccctctagaggttagagtttttatggacaatttggtgggcagggctgagggaatgggtgctgctgattaattgggggtgtggaaaagtccttgtgcgctgagtgtgcctctgtgtagggctacagcaggagtcctcaacccccaggttatggaccggtatcagcctgtggcctgttaggaactgggccacacagcaggaggtgaacaggtgagcaagcattgctgcctgagctctgcttcctgtcagatcagcggtggcattatattttcatagaagcgtgaaccctgttgtgaactgtgcatgcgagggatcttggttgcacgtcccttatgagaatcaaatgcctgatgatctcaggtggaacagtttcatcccaaaaccatccctccacctgaccctcacccragtctgtggaaaaattgtcttccacaaaaccagtccctggtgccaaaaaggttggggaaggctgggctacaggaccagttgagtcatgagtcatgagtctgggtggggttggtctgaaaaaaatctctcagaaaaccagtcttaggttctataatagtgatgttatctataggagcagttggagaagtcacaaatcttgtgatctctagccacatgactcccaagcagtaagaaattgtagaactatacctacattttagcagaattctctcccctcccataatcctaaccttgtggcctttccttagttttacaaaggtagtttagttttgggaagggctattatcatccttgctttaaggttaaactgtaaactaaattcctcccaaagttagcttggcctatgcccaggaatgaccaaagacaaacagcttgaggttggaggcaagatagagttaacgatgtcagatttctcttttgcaaaggtggtttcagttgtgccactgaaacacagactgggtgatatagtgagaccatgtatgttaaaaaaaaaataaaaaataaaataaataaatatataaataagaaatcacattgaattaaatgttgaacaatttttaaataatcaggtttttaaaatatcttaagggtgagtgaatgtggatgtggagtgtgttccagaataaatgggcagtgttttaaaaaaaaattttttttttttgagttggagtttcgctcttgttgcccaagctggggtgcaatggtgcaatctcagctyactacaacctctgcctctcaggttcaagtgattctcctgcctcagcctcccgagtagctgggattacaggcacgcgccaccatgcccagctaattttttgtatttttaggagaaacagggtttcaccatgttagccaggctggcctcgaactcctaacctcaggtgatccgtttgcctcggcctcccaaagtactgggattacaggcgtgagccactgctcccagcctaaaatgtttttttgcatctgttgaaggttgaaaaaaaaataataaagtggatctctctgattttatcattgtaatcctggtgggtaactaggtgaaagactctcaagagagttcacaaagcatcttttgtaacactagactgtaaggtgatcttaatttttttttgagacagagtctcactctgtcacccaggctggagtacagtggcatgatctctgctcactgcaacctccgcctcccaggttctcgtgcttcagcctcccgagtagctgggattacaggcatgtgtcaccacacccagctaatttttgtatttttagtagagataggatttcaccatgttggccaggctggtctcaaactcctggcctcaagtgatctgcccccgttggcctcccaaagtgctggtattacaggtgtgagccactgtgtcttggctgaagatttttaatataaacaatgattactaattattgagtacccattatggaccactattaatttcctgccgcattccctttcttctttccagacctctcccaccattcatccatcacttgagccaaaaacttaccattcttattatctttctcttacaccctatttcaaaccatcaagtagttcagcattatcttcaaaatatgtcctgagtctttttacctctacacttactactctagcccaaccatcctaattgatctcttgtcttccccttttaccccacaatagccagattgaattttaagagggtaaatcagattatgtcatttccctgctgaatttcctaatacagctttttgtcattcttcaaagttcatactctgggctttaacctatcaggccctaaatgatttggcctacgtggctctgaccatatttccaatcattcttcctttttcttacatcattctaaccacactcactaaccctcttgtttctcagacacattaagcttttttccctgcttcagggcctttgtacttactttattccagaatcatatgatatatttctgctgagatagcccctcttcaaagaaatctttttgactagtctaaaatagacatcgatatttgttacaagttctcattacttctgaaaagaaccttattcatttgtttacctattgcttaaagcctccagtattgaatgagctctctgagggtagaagtttatctttttcaccactgtatttgtagtgcctatagtgtagtatctctagaagctgatgccaattagaaccaagccagtttgcatcacagaaacttataaaagctcaggaactgaaggtgggtgtcaggcttgggctaaaaataagagggctattcaaagtcttttaaggggtaactgggcctgaaagtcaacatccccatttcttgtaactaatcagttaaatatcacccaccccaataagacatggtttatttttggagaaaaattgaaccagaaatacttcatactagtgaacatctgatagaatgcaatacctaaaagaggagatggggggatagtctgcatactggaatggtgaggctcataagacttctagtcaccttccatcacctggctctcaggcaggcaagaatcattcctatcctaccctcaaccctgccacttgccaggaaattgatggattttttcctggagaaaatgaatagacccaaataaaggaagacagttttttaaaaatgacaacctttctcagaagtatttggctttggcaatataataaaattaaaacattttttatatgagccataggctcatgctctttgagttctcaccattcagtatgcagactaacccattgtgccgggcctggctaatacctggaggggagaaccaaaggacatgtgcttccagattgaaagggcccagcacaatgaatgaaaaaacagccacccagagcatatcattatgaaattttagaatatgggtaataaaaatattctaaacatttccacagaggaaaaaatttaaaaaaaaatcccatacaaaaaagctagagcaatggaagatgctttctgagagaaaatgatttcctacttagaatcctatgtccagctgaactaccaatcaagcatgagagtagagtgaagatatttttagataggcaaattgtcaaaaaatttgcctctcatgagccccttctcatgatgctattggaggatgtgtcccttcaaaacagggaagtaaacaaaacaccctaataaaaataaaaaggaagccttgagacctagaaagaagtgggtataaaggtaatgggaagtcccaggatgactgttgtgcaacagtctacaaaataagcagttcaggttggattcgaaggattacaagattcaggagagatgttgggaagtgggggtgtgaggaaagaacttatgtatttcctgatatgtttggcagggtggaaatccatattcagaagaattttacaattttgttggaggctttggaaagaagtagcagtaggcatgcatataagtcctttctcatgctgctaataaagacacacccaagactgggtaatttataaaggaaagaggtttaatggactcgtagttccacgtggctggggaggcctcacagtcatggcaaaagatgaaggaaaagcacagggacatcttacatggctgcaggcaagagaacatgtgcaggggaactcccctttataaaactatcagatatcgtgagacttactcactatcacgaaaacagcatgggagagacctgtccccatgattcaattacctcccaccaggtccctccaaaatgggaattatgggagctacaattcaagatgagatttgggtgggacacaaccaaaccatgatagcatgtaataactaagcaaatgaaaaaaggggtaaaatacaaacaattatagaagaaataaagtgaaatcataatatagtacttggcctcatagtgattataatcagtcataataatgtaaatgctggccaggcacggtggctcacacctataatcctagcactttgggaggctgagaccagcctgggcaacatagtgggaccctgtctcagcaaaagattaaaaaaacaaaaaaaacccattgtggggccaccacctgtggtcctacctacccaggaggctgaggtgggaggatctcttgagcccaagagttcaaggtttcagtgagctgtaatcacaccgctgcactctagcctgtgtgacagagcaagaccctgtctctaaaaaataataataattttaacgatgtaatcctgagtcttgatttttttcccctgaatgtcaattttaccccaaattatcttataacaatattggaagggaaatatttaagartgctaaatcctcagctgctacactgtaaaatcagtagataaggtcagaaatggcagtgtatgttagctagatgtatgaaggtaaatagaataaatagctaaaaagagttgaaagtggttccctctgaggaggtgattcaatgtggtgtgggcagggtaggggactgttattttttattatatgcctatttgaagctatgtaagtgtgtaacttaagttacttaaggaggctattgcaatcatctagatagagctcatgatgactgggaccacatggtggtagtaaaggtgaagaggagttgggttttgaatttttttatttttatttttatttttagacagagccttgctctgtcacccaggctggagtgcagtgggtgtgatcatgggttactgcagcctcgacctcctgggctcaaacgatcctcctgcctcagccttcacaacagctggtactacaggtgtgtaccacctaaatgtgtcacacccagctaattgtcttatttttgtagagacaaggtctctctatgttgcccaaactggtctctaactcctggcctcaagtgatcatcccacttcagcctcccaaagtgctgggattacaggcatgagccaccacaccctggagactttgagttcttactcatttggtaaagtctttattttgccctaacatttagttggcaggccaaccacataattttaggttcaaaatattttattgagaaattttaaaatactgttcataattatttattttgagataagatcttgctctgttgtccatgttggagtgcagtggcatgatcacagctcattgcagcctccaacccctggctcaagcaattcttctgcctcagcctgccaagtagctgagactacaggtgagcaccaccacactgggataatttttttgttttaatttttttatagagacagactgacccactatgttggccaggctagtcttggacttctgggctcaagcagtcctcccaccctggcctcccaaaatactgggattgcaggtgtgagccactgcaaccagctgggttctgaatatcttctttcttttaatttttcttatttctccaagaaaaaatagagatttttttttgagacagggtcttgctctgttgcccaggctggagtgcagtgacaccatcatggctcactgcagccttggcctcctgctgggctaaaatcatcctcccacctcagcctcccgagtagcagggactacacgtatacaccaccacacctggctaatttttgtgtgtgtgtgtatatatatgtagatatatacacacactaagattttatatatatatctatatatagatatagatatakatatattttttagagatggggtttcaccacgttgtgcagactggttttgaactcctgagctcaagcgatctgcccgcctcggcctcccaaagtgctgggattacaggtgtaagccattgcacctggccctgaatattttttaaagagraaatcggtgagggatattagcacaagggaaggaggcataaaggatgcctcttaattaggttttttgtttgtcaatttttaaactttaaatttattcattttttatttcaaaccaccatacacatgtgcagattacttaggttttgacttgaacaactggaagaattgaattgccagtaactgtgctggggagacattgtggggaacagttttggaaatgggagatcaggagatatcaacttggcagttggataaacaagtttggaattcaaaggagagattcaggatggttgtgcctcgtagtaatttaggggatcttgagcaaattgtgaaatatctataacctcagttttcttacctgtgaagtaggaaataatagtagtactgctgtatcagcttgatgggaagattaaattagataatatacataaagaattgatcacagtacaaaggcactaaatcttacctgtcactattttttattattgttattactactgtcacaataatctgaagtatcatatattgaggctgtatagcttaaagtttaagaggtaaaaatccactccctgactccgccatttgctcattgtgtgcccttaggtgagccacttaatctttatttttcttatctctaaaatagaaataggcctggtgtggtggctcaggcctgtaatcctagtactttgggaggccaaggtgggcagatcacctaagttcaggtattcgagactaacctggccaacatagtgaaaccccgtctctaataaaaatacaaaaatagcccggcgtggtggcgcatgcctgtaatcccagctactcgggaggctgaggcaggagaattgcttgaacccaggaggtggaggttgcagtgagccaagatcgcgccactgcaatccagcctgggtgatcaagtgagactacatctcaaaaaaaaaaaaataattaaataaaatagaaatatacttatcacatatttttacaaggattaaatgagataagctctgtaaaagtatttagaacagtgtctgacacgtccttaggtgctcagtaaatgttatacatcaccatcgtttgttcccttgaagaagggaacatcacatttatttctgtagcccccacttaatcccctttgcatggcactgtacttaatatatatgtgacaggcattacaaaaatttcaagtactctaatatttatctgtggagagcacaaaccttgcaaatattaattgcttgatacatacttagtagattgacattttctttcctccatacatttcattcactttgggagagggagaagaaataaatcattgtgagagtattgtttcagaaatgtgctcacatagattgaagtctatatttctattttgttactttggtgtaaatttataagtaattttagaataaaggagaaatttggaaaggaagaagaaactttttcagggcttgggaagacaacttaaatacttgagtttgtggatattagttctcttttgaacttcctggattaagaaaaagctttttggccatatttaaagtcactgtatgtatatgtattaatagttctgcctttgtcaggagacttgtttttttttttttttttcgcttgcatggcagttttgagcaatgtgatttaaaatttttgttaaactacttataaattcattctttgtttaatttcagtttgttattcaagatagagggtatatattttcctcccagaaatcttggctgttttctatttattaaactgttctaatatttgtaagcaagcagatctgactttaactttttagatctttgtattgctttaccccaaaaaagtaaaattggaccatgaacttgattgggcctcttgttattatgtgtagtgctattgacatgatctgattgctaagcaatgtttgttctgcctttggctgtcttaaaattggactgttaaaaaccaaagacaaaaaggagaaagcgagactgaaccagctctgcttagtgtcacctgatgtgagactctggtggttaatgtctgttcagctgagttttccttatgaattctcctatctaagacctagcacaaccagttttccatgatgtaatacctctaaaacatgtttgaactgcacttacccgaggatattactgcctttttacgggtttagattcatagttcttctgggacttgagatctcagccattgccttctcttcttctttcttcttcttcatctttttctttctttctttttttttttttttcccatcacggctcactgtagtctcaacctctcaggctcaagccttccacttcagcctcctgagtagctaggaccacaggcgtgccccacacccagctaattttttgatatttagtagagatgaggtctccctatgttgcccaggctgatcttgaactcctgggctcaagcaatcctcccacctcagcctcccaaagtgctgggattacaggtgtgagctgctgtacctggcctttttgttgttgttattggtgattttttttttctagcccaagtccaagaaatgatggtatctttgtattatttgggagtaaaatgcaaagcaatttattttgtgctacgtgttaaaggttagtggagtctggtagagtacgttacaggtccctttcttccaaaattatgagaggaaattagataaaaattctggaaaaacatactttttaaaaaagaataggctggatgcattggctcatgcctgtaatcccagcactttgggaggccgaggtgggcggatcamctgaagtcgggagtttgagactagcctgaccaacatggagaaaccccatctctactaaaaatacaaaattagcttggtgtggtgctgcatgcctgtaatcccagctacttgggaggctgaggcaggagaatcgcttgaacccaggaagcagaggttgtggtcagccaagatcgcaccattgcactccagcctgggcaacaagagctaaactcagtctcaaaaaaaaaaaaagaaaaaatagtacaccaatttatttaggtttcatcaatctttgcatgcatctgtttctttttcttttttctttttcttttttttttttttttaaagacaagatcttgctgttttgcccaggcagagaagtgcagtggtatggtcatagctcactatagccttgaccttctgacctcaagtgatcctcctggctgtcttctgagtagctgggactacaagcacacaccaccatgcctggctaatttaatttttttatttttttagagacagggtctcactatgttgcccagactggtcctgaactcctggcctcaagtggtcctcccaccttgatctcccaaagtgctgggattacaggtgtgagtcactgtgcctggcctcttttcttttcttttttttttttttwatggttattagcagggtttcagtgttttagatgtaggccttttagaaaacataagtatcaaaattatgtccacgttttaacattgtattataggtttatttaggcctcttaattgttgttaccataacctttagaatcacatttttctggaaagaccagtatgggtcagaagaacccctatgatatgtatgctgcttactgctcaacgttggcagcagaaaagcttgtaaagcaaaccaggtagattttcattggttcgtagaagggcagttcttttttatgaatcaaaaaccaaaagtggttttattgaaccactggcctttttttctttctttctcattatcacaaggcaaaacacagactttggagccaaacatccagattccagtaccctctttaacctttgtcaagtcatttaaatactccaaacctcattttcctagatgataaagtgggggtaatttcatctcaggtaatatatttataaagcaattagcacagtttccaggtatattgtaggtaagcagtaagtaattttcttgacagctttgatacagtggccccagaactcttcctaccaggtgctgttattcagccttcaggaggtccatgaacagtagtaatagcagtgtcagtgtttttttaatttttattatttatttatttattattattatttctttgagatggagttttgctcttgttgcccaggctggagtgcaatggtgagatctcggctcactgcaatctccgcctcccaagttcaagcaattctcctgcctcagcctactgagtagctgggattacaggcagctgcaaccacgcccagctaatttttatatttttagtagagacagggtttcaccacgttggtcaggctggtctcaaacttctgacctcaggtgatccacctgccttggcctcccaaagtgctgggattacagatgtgagccaccacacttggccagtagtgtcagtgttttttaaatcagagtaaggatatgttttagactatgtcacacctctttcttcacttctttttttttttttttttttaagacagagtctcgctctgttgtccaggctggatggagtacagtggcatgataccggctcactgcaacctccgcctcctggtttcaagcaattcttgtgcctcagcctcctgagtagctgggattacaggtgtgtgccaccacatccggttaatttttatatttttagtagagatggggtttcatcatgttggccaggctggtcttgaactcctggcctcaggtgattcacctgccttggcctcccaaagtgctgggattataggtgtgagccaccatgcctggctcttcgttcacttctttgtttaggtaataaagtttgagggaggacatttatgctttaatgtttaactctgagctttatacagaaccgtgaatttgataaatatttgactgactgaatgcgaatgccaccaaggaacatgttaatgttattttccttatgctagtttacaaagagttaaagtctaaaatttgttttagatctgttaatgttatatcacaggggagtgacccatacaattttttgtgttatgtacctattattagttttctgtggctatcataacgaattaccacaaacttagtagcttaaaacaacacacgtttattttatcttactgttctataagtcagaggtctgacaagagtctcactgggctaaaatcaaggtatcagcagggctgcattcctctctggaggctctagaggagaatccatttccttacttttttcagctgccagtggctgtttgcattcctcggctcatagaccccttccgtcttcaaacccagcaatgagtctttctcacattgcatcactctgatattgactcttctgcctccctcttccacctatgaggaccttgtgattactttggacccacagtgataatccaggataatctctcttttaaagtcttctgaccagcaactttaattgcatctacaattttgatttatttcccttgccatataatgcgacacagtcacaggttctggggattaggacatagacatctctggggggccattagtctgcctacctcagtatcccattaggaaagcatttttgagcacatccccatgtgctactattaacccataattaaatattagtaaaatgaaatttctctttttatcaaaaataagtaaaagttttcattttcttcccatactccaacggataatgcggctcattacccattttggagactgctggctaatagtaggtcctaggaaaagacctgccttggaataagaatttcaacttttggcagggtgcagtgtcttcgtgcctgtgaaatcccagcaatttgggaggccgaggcaggcagattgcttgagcacaggagttcaagaccagcctgggtaacatgacaaaaccccatctctacaaaaatacaaaaattaggcctggtgcagtggctcacgcctgtaatcccagcactttgggaggccaaggcgggcggattacctgaggtcgggagtttgagaccaccctgaccaacatggagaaaccccatctctactaaaaatacaaaaattagctgggtgtggtggcgcatgcctataatcccagctactcgggatgctgaggcaggagaattgcttgaacctgggaggtggaggttgcagtgagctgagatcatgccacttcactctagcctgggtaacaagagcaaaactccatctcaaaaaaaatacaaaaattagctgggtgtggtggtgcgtacctgtagtcccagctacttgggaggctgaggtgggaggatcgcttgagcccaggaagtggaggctacagtgagccaagatcgtgccactgcactccagcctgggcaaaagatggagaccttgtctcaaaaaaaaaaaaaaaaaaaaaaaaaatttcaacttttatttaagttcaatgaatactgagaactaactgtgaacaaggcaatgttttaagtgtatggagaggcacaaaactacatggtatatgttgtccaggtggactaactagtggcttaaaggcttgtttttttttttttttttttttttttcaggtcctagtccaatggaggttgggtagaggtggaaggagagctcattttcacctagaagagggcctcaggttcctccactggatcttctgcatctgctggcagatgaaggaagaagctgtggaaaatagtgttgaggttttatggaacaggcctagaaatgacataatcacttctgcccatataccactggccagaacttagtgttacagtcttaaccaactataataaacactgggaaatgtaatctacttcaggaggaaaggggaagcaatttgttgaacaagtagctattctcttccacacacaggatccctgccctcaaaaaccttttaatatcatggaagaggtagacattaggtaaaacttgatgtagaaggcagggcctaataaatgctccagtagaggtttatttttatttttattattatttttttgaaacggaggcttgctctgtcacccaggctggagtgcagtggctcaatctcggctcactgcagcctctgcctcctgggttcaagcaattttcttctgcctcagcctcctgagtaactgggactacaggtgcacgccaccacacccagctaattttttttgtatttttggtagagattgggtttctccatgttggccaggctggtcttgaacccttgacctcaagtgattctcccgcctcgagaaagattaattatgattggaaatatttgaaattacatctctgagctagagattcttataaccaacttcaaagagctattttaagaattcagtgacaggccaggcacagtggctcccacctgtaatcccagccctttgggaggctgaaacagaagaattgcttgaggccaggagttcgagagtagcctggacaacataaggaaaccccatctctacaaaaaaattaaaaaattagccaggtgagatggtgcatgcttgtagtctcagctattttggaggccgaggtgggaggatcgtgtgagcccatgagttcaaggctgcagttagctatgatcacgccactgcactccagcctgagtgatagagtgagatcctgtctctaaaaaacacaaaaagagttaggtgatttaatatgtggacatgtctggcacactaaatgctatataaatgtttggtgctattattgttgttgttatttggaggtgttcttgagccaagtttttaaggattcatagagctttgaaaaatggattccagacagagagactcattctcacaacaatatggaagtaggaggattcaggacatatttagaagtggcaggttgtataactgcaacatagagaatgcaggtggtgcctgtggcctcagagcctgcaggcggtgctggctctgggtccgggttggaaaaataagaattttataaaatgcaaaakaaaaagaaaagagagagaatgcaggtggatgtaataggagataaagcaagagaggtttggatcagatcattcagacctttgaataacatggtaaggaatttggactttaatcgggatctgtaagctgccacaaaagctttttgagtagcagtttctcaagggaagtgattgtgtcttgctcatctttatatactttgtataactatacagagaggtaatatagcattgtgattaagaacacagactctataatcaactgtttaggtttgactcccggctctgccttttattagctgtatgatttggggcaagttacttaatctctgtgcctcagtttctttattggtatgattgggataataaaagtactacttcattgggttattatgaggattaaatgatttcatataaggtaaagtgcttagaacaatgcctgcatagtaagtgctcattaagagttagctgataccaggctgggtgtggtggctcacacctgtaatcccagcacttcagsaggccgaggatggcggatcacttgaggtcaggagtttgagacccgcctggccaacatggtaaaatgctgtctctaataaaaataccaaaattagtcaggcatggtggtgcacgcttgtaatcccagctgcttgggaggctgaggcaggagaatcccctgaacctgggaggtggaggttgcagtgagccaagattgtgccactgcactccagcctgggcaacagagcaacgaagtgagactccatctcaaaaaaaaaaaaaaaaaaaaaaacaacttagctgataccaggccgggcgtggtggctcatgcctgtaatcccagcactttgggaggccgaggcaggtggatcacctgaggtcaggagttcgagaccagcctggccaacgtggcaaaaccctgtctctactaaaaatataaaaattagccaggcatggtggcaggcgcctgtaatcccagctactcgggaggctgaggcaggagaattgcttgaacctgggaggcagaggttgcagtaagctgagattgcactactgcactccagcgtgggcaacagagtgagactctgtttcaaaaaaaaaaaagagttatctcataccatcatcattatcatcgttgccagtgcctggcacataataggtactcaaaaaattttgagttgtgttttaaatttacccagtgaaggctgggcgcagtagctcacacctgtaatcccagtactttgggaggctgaggcgggtggatcacttgaggtcaggagttcaagaccagcctggccaacatggtgaaaccctgtctctactaaaaatacaaaaaaattagccaggtatgggggcacatgcctgtaatcttagctacttgggaggctgaggtgggagaatcacttgaacatggaggccagatagcgctgctgcaytctagcctgggtgacagagcaagacccagtctcaaaataaaaataaataaaaawaaataaaaataaatttacccagtgaagaatcacttgagcccaggagtttgaggctgcagtgagctatgatggtgccactgctctccagcgtagttgacagagctagatcttgcctcaaaaacaaaacaaaacaaaacaaaccataatttacccagcaagtgttttttatttttaacctccttcagagaaagactaacaagcgtttatatattgtcatatgccaggcaagagaatggtatcttgctgttaagaagcttgtggtctagtaaaaaagttataaggcatgtgataaaacatagttaaagcttggaaatgatgctataggaaggtgatataggctgggcatggtggctcacacctgtaatcctagcatatttgggagggtgaggcagaaagattgtttgagcccaggagttcaaggttgcagtgagctgtaattgcaacactgcactccagcctgggtgacagagtgggaccttgtctcaaaaaaaaaaaaaaagaaaagaaaagaaaagaaaggagtgtaaatggctgccttggtagttgaagaacatgagaaggaagtatttgaactggtatttgaggatgagtagaatctaactacagtaatgcagtgcataagatgttttggtcaacaacagaccgcatacatgatggtggttccatgagattataataccatatttttactgtaccttttctatgtttagatatgttaagatacacaaaacttaccattttgttgcagttgtctacagtattcagtacagtaatatgctgtacaggcttgtagcctaggatcaatagactctaccgtatagcctgagggtattgtaggctataccatccaggtttatgtaagtacactctatgattatgcaaccacaaaatcacctaagaatgcatttctcagaatgtatccccatcgttaagtaaggtatgtggaaatgaagagaggggcattttaggtagtgggaacagtctgagaaaaggcaaagatgtggaaaagcttaataatgacactttatggggaatggtaaatcatgctatagaaaagactctagtctctagacaaagtctagtttaccagtagtatcagagttaagagtttcctgttggggccgggtgcagtggctaatgcctgtaatcccagccttttgggaggctgagacgggcggatcacttgaggtcaggagttcgagaccagcctagccaacatggtgaaacaccccgtctctactaaaaatacaaaaattagccaggtgtggtggccgcctctaatcccagctactcgggaggctgaggcaggagaatcgcttgaactcaggaggcagaggtgcagtgaaccaagattgagccattgtactgcagcctgggcaacagagtgcggctctgtctttaaaaaaaaaaaaaaaaaaaaaaaaaaaaaagagtttcctgttggtcttactatctttagagcagtgataaacagtcatttgtttaaaggctttgctactcactgcatgtagtctgtagaccaagcgacatcagcatcacctgggagtttagaaattcagattcttaggccccatccctgacctacagagtgcgagtctgcattttgacaagatccttcatgggtttgtttccacagtggtctaaagtacaaaagcaatccttggcctagtgtggtggcttactttgggaagccaaggcaggaagatcacttgaggccaggaacttgagaccagcctaggcaacacagtgagaccctgtctctaccaaaaaaaaaaaaaaaaaaaaagccagctgtggtgtgtgcctgtagtcccagctgctcaggaggctgagacagtgagacaggagagtcacttgagactgggaggttgaggctgcagcgagcttatgatcacactattgcactgtgccaccgcactccagactgggcgacagagcaagaccttgtctcaaaaaaaaaagcaaccctccttctcaacatgaatctgtatgtcatatgaaactaaaaataacaaagttgagtaatcacttactctcaaagcacatgcattaagaaagcacccccttcctgagttaagtaattctagctggtatgatttggggtggggtatggggataggggaataaaaatcattcagaatataaatttttaaggtcttgtgacatgacaatgatttgaggcttcatttcgatttttgatatagttagcaataaaaactttagtgaaaacttattgttgatgttacgtgcttttctaggcacatgtcacttccctgtcaaggatgagtaatatttcctctttatagtatattgtttttttacaacatttagagtgattaactctgttcaagctctttttttttttttttttgagacggagtctcactgtcacccaggctgaagtgcagtggcacaatcttagctcactgcaacctccatctcccaggttcaagctattctcctgcctcagcctcccgagtagctgggactacagacgcccaccaccacgcctggctaatttttgtatttttagtagagatggggtttcaccatgttggccaggatggtcttgatctcttgacctcgtgatcctcccaccttggcctcccaaagtgctgggattacagacatgagccactatgcccggccgctctttttccaatataaagctaatgcatgtctcagcttgccagctctgtgacaccactttggatgtggtggtggttttccattaggaatgatttgggagaggttaggcagtaaagttgcacgtagaagtagagttgtgtgacacrattgtgatatggttatttgagtagagggtgggaagaaagcagacagaaaactctcctatgaagccagtgcctgcctggatgtgctatgacatctctgtagatggtgtggtcaaaataatagtgggcctgggaggaagaaaagcaagggtgtgtcacatccaaaccaggtcttttcagcttctagaaaaacccatgattttaaaatgtagccattgtttttctagtagaatcctattgcctgacttctttataaatatttgattaaagaaaatcaaatacctcttggctttactgccttgtacttgcctctaatgttctttaatgtaacacgagtttacattgtgaagttaatttggtaattattgcttcttcattcaataaatgtgtgtttagcaacttgtgtacgaaacattttgtgtgagacattgtatatagaaacaaatgagacaagatctgtactcttaaaagccttggcccggcatagtggctcatgcctgtaatcctagcactttgggaggccgaggtgggaggatcacttgagcccaggaatttgagaccagcctgggcaacaaagcaatactatctctaaaaaataaattttttttttttttttgagacagagtttcactcttgttgcccaggccggagtgcaatggtgcgctctcggctcaccacaacctccacctcctgggttcaagcaattctcctgcctcagcctcccgagtatctgggattacaggcatgtgccaccacacctggctaattttgtatttttagtagagacagggttttccatgttggtcaggctggtctcaaactcccgacctgaggtgatccgccagcttctgcctcgcaaagtgctgggattacaggcgtgagccaccgcgccgggctaaaaaatattcaaataggccaagcacggtggcttatgcctgtaatcccagcactttgggaggctaaggcaggcagatcacctgaggtgggtggatcacctaaggtgaggaagtttaagaccagcctggccaacatggtgaagccctgtctgtactaaaaatacaaaaattacctgggcatggtggcaggtgcctgtaatctcagctactcaggaggctgaggcaggagaattgcttgaacccgggaggcggaggttgcagtgaggcaagattgcaccactgcacttcagcctgggtgacagagcgagacagtctcaatcagtcaatcaatcaatcaatcaataccttatattccagtctggggaaggagtcagaaatgttagattagcaagaatagctaacattttctagtgtttattatgttccagaagcccaagttatcttatttcatcttcacaataaccatatgggttaggtaatattaatatttacattttgcatgtgaagaaactgaattgcagagaggtcatcagtaaatggtagagccaggattcaaatcaaagcagtctaactctagatccagaccacttaacttaatgctaattagcagtcattcaaagtagggtgaaaagtgctagttatactgtgggaggtagggagagacaaaagagagagagaagagattaatgctaagggcgtccaggagatcctttgtatagaagatgaaattttagctgatcttggatgattttcagtaaatatagtattccaattcaaggaaggaacttcaaccaagtttccaagtcataaaaatcattcatgccatttaataaatctttactgataactagcttactgtgttccagacactatactaggtagtagaaatgcagagataaatgaagctctgaatcttcsatagtgagaaaagtttcaagagtgatatggggccaatgcaggaggattgcttgacacaaacagttcaagaccaacctggacaacagcaagaccccagctctatttaaaaaattaaaaaatttgctcgctgtggtgatgtgtgcctgtagtcccagctactcaggaggctgaggtgggaggatcacgtgagccaatgaggttgaggttgcagtgagctataatcacactgttgtactccagcctggacaacaaagcaagaccctgtctcaaaaaaaaaaaaaaaaaaagggctgggcgcagtggctcacacctgtaatcccagcactttgggaggctgaggggggcggatcacgaggtcaggagatcaagaccatcctggctaacacagtgaaaccccatctctactaaaaatacaaaaattagctgggtgtggtggcatgcgcctatagttccagctactcgggaggctggggcaggagaatggcatgaacccgggaggcagagcttacagtgagccgagatcgcgccactgcactccagcctgggcgcagagtgagactccatctcaaaaaaaaaaaaaaagaaatgtagctagaggctgggtgcaatggctcacgcctgtaagctcagcactttaggaagctgaggtgggaggatttcttgaggccaggagttccagaccagcctaggcaacataatgagaccctatcgctatgataataataataataacaataacaataataataataataccaaaattagccaggcgtggtggtgcacacctatagtcctagctgctcatgaggctgaggtgggaggattgcttgagcccagaagttcaaggttgcaatgagcagtgatcacaccactgcactccagcctgggcaacaaagtaagactctttttaaagaaaaaaaaaaaaccttagaaacatagatagagaatgtaacctattcttaaagtttggtaacaaataaaaagtgaattagattcatattttagtgagggggcaagggaagatttctatttttattttttagacagagtctcgctctgttgcccaggctggagtgcagtggcgtgatcttggctcactgcaacttctgcctccctggctaaagtgatcctcctgcctcagcctactgagtagctgggaccacaggcatgccaccatgcctggctaatttttgtatttttttgtataaaaaatacaattattattttgtattttttgtaaagatcatatttcaccgtattctccaggctggtcttgatctcctgggctcaagagatctgcccgccttggcctccccaagtgccaggattccaggtgtgagccactgtgcctggcggaagaattttttaagatgagggaaatttaactatatatttgtaggctagggtcatagagcccagaggaaaaggacaggtggatgaagaataaggctcatgggaaaatgtgaggtttcaaagataagttggagtggatcatgggaagttttaatgttattctgtaggcagaagggaaccattgaagggttatgaaaaagagaatgacatattttgtgttttgaaaaggtaactctcatagccatgtaaaggataatgtaatttaggattgttaataatgataaaataaaaaccactgacctttatttgagcatacactaggcattgctacacagtatacttgaaaatatcccatttaattctcataacaaccttttaaggtggtgttatttttctgtccatttttatagatgaggaaattgcgatttataaagattaggtaactttcttaatgtctcccaggtggaaatggagagatatccctgtgctctagaggaagggtcaatgccttagtgttttctattgcttagaataccagaaactgggtaatttataaagaaaaggaaactatttcttacagttatggaggctgagaagtccagggttgagaggccacatctggtgagagtcttcttgctggtggggactctctgcagagtcccgaagtggctcagggcatcacatggcaaaggggctgagtatgccagatcaggtctctcttcctgtgtatttttgttggagacagggtctcacgctgtcacccaggcttgagtacagtggcatgatctcagctcactgcagcctcaacttcctgggctcaagtggtcctcccacctcagcctcctgagtaactgagaccacaaaagtgtgtgaccacacccagctaacatatgtatatgacgaggtctcaggtctccctatattgcccaggctagtcttgaactcctggattcaagcgatccttctgccttgaccactcaaagtgttgggattatatgcatgaaccactgtgcccagtctcttcctcctcttagaaagctaccagactcattcctgcaataatccattaatccatgaatggattaggcagagccctcatgacccaatcacctcttaaaagccatacctctcggccgggcgcggtggctcacgcctgtaatcccagcactttgggaggctgagacgggcagatcacaaggtcaggagatcgagaccatctcagctaacacggtgaaaccccgtccctactaaacatacaaaaaattagccgggcgtggtggcgggcgcctgtagtcccagctacttgggaggctgaggcaggagaatggcgtgaaccagggaggcggagcttgcagtgagccgagattgcgccactgcactccagcctgggcaacagaatgagactccgtctcaaaaaaaaaaaaaaaaaaaaagccgtacctctcaatactgccacgttgggaattaagtttcactatgagttttggagggagcaaacattcaaaccattgtagtcagcagactttttctataaagggctagatagtaaatattttagtctttacaagtcacacagtctctgtcacaactattcaactctgccattataacatcaaagaagccatagataataccatatctatgttctagtaaaacttaatttataaaaacaggtagttggccatagttagccaattcctgctagtacccatcatagtttggaaagccttaatcawgcaggaaatgtagcttatcatattttactttaactgtttttgttatagtaggataatgggaatagaattattcctaggcagggatataatttaatctcagagaagcagtctttctaaaagaggctgactagaaacagcagttcatgtatacaatttaaccacattctgcataatttatctttttattataattgccctccaacagaatgaccctagaatgaaagtttttatttactctctgtccttaatactttcaacatagcagccattcaataaataattgtttaataaattaatggcataccctcaaaattctagtgattggggagttgtatgaacatttagagaaaaatgacccatcttattttatttttattattaattaattaatcaatttatttatttttgaggcagagttttgctctggttgcccaggctggagtgcaatggcacgatctcggctcactgcagcctccgcctcccgggttcaagtgattttcctgcctcagcctcctgagtagctgggactacaggcacctgctaccatgcccagctaacttttgtatttttagtagagacagggtttcaccatgttggccagggtggtcttgaactcctgacctcaggtgatccacccgccttggcctcccaaaatgctgggatatttccacattagttgaaatgtggaagcagcatgttttaaaaactctgctgtgatattatagccaaccaggcattctcctttgtttcttctcactcagcaatcatttactgaatttgcttactctttgtttactaggtggtgttaggttctgtgaacacagggaagaatatgacatggaccctgtcttcctggaaattttatgatcctttctaacacagtcactgctgtgccttacactctgcttgtagtcagtctcttcccattcctttgctcttctaaactagaacttacttgggacttgggtattgttaatggctttaagacgtttatcttctcctactttatgatcatcatcagtcatactcattgatttatggtttttatttaaaaatcattcatatatataaatataacctgttggttgagaaaaacttcaaatatcacttaaatgtgtaaactaaaaagaaatagtgactttgtgtctgtgtgtaagcatttagttaggtaatggcagagctgaaaccagcatcaagtttatttacttccaattggggctttttccattataccatgctgttttcaagactactctccttcttccaccattgctttttaccaccaggtcttgctacaaccagatacttcatggtaaatttagaaatttatcagcctggcatcttaatcaagattaagagtcttatgccaaatcttatgcaaaggcgtaagaatgatataatgaaccctgaggacctggggggaaaggttgggagggggatgaaggataaaaaactacatatggggctgggtgcggtggctcacgcctgtaatcccatcactttgggaggccgaggcgggtggatcacaaggtcaagagattgagaccatcctggccaacatgatgaaaccccgtctctactaaaaatacaaaaattagctgggcgtggtggcgcatgcctgtagtcccagctactctggaggctgaggcaggagaattgcttgaacccgggaggcggaggttgcagtgagacaagatcatgccactgtactccagcttggcaacagggtgagactctgtctcaaaaaaaaagcaacaaaaccacatatggggtacagtgtacaatgctcaggtgacaggtgttccaaaatcccagaaatcaccagtaaaaaaactaatccatataaccaaaaaccacctgtacccctaaaactcttgaaataattaaaaacaacaaaaagattaagagtctacagggctgtacaagatagcagggggcttcacaggttctttcttcctttcctttccctttccctttctctttgcctttccctttcccttcctttcttttctatctatctttcctttttttttttttagatgcagtctcttttttttttttttttttttgagtcaaagtctcgctcttgtcccctaggctggagtgcaatggtgcgatctcagctcactgcaacctctgccttccaggttcaagggattctcctgcctcagtctcctgagcagctcggactacaggcgcatgccaccacacctgcctaatttttgtatttttaatagagatgtggtttcaccatgttggccaggatggtcttgaactcctgacctcaggtgatccgcacacctctgcctcctaaagtgcggggattacagatgtaagccatcatgccgcaccccacaggttgtttctaatgcatgggtaactaacctgatttctctatatgaatttatatttgtgtccttttcacttgttaaataattctgtcttgttctttaggttcatgggtgtatgtgttcatcaaggacaattgcatgcacttacagaggtaagacatcagtaagtgttgaagtaacgtatttgccttagtttcagcatttatagttccatagtaagtgttgcttgcatatgtaaacaaaatgtatgtgcatttatgtttatgcaaaaatggcagtgttaataatgctttattctgttgcctgggaacaatggcagtatttctttatatatatatatatatatatatatwcacacacacacacatacactttaagttctggggtacatgtgcagaatgggcagtatttcttaatgtccttctattccctcataatacttggtgaatactctgacaatatgagtgctcaagtattaaagtattaagttagctcttgctgcctagatatgactccatcctaagccaagggatgacagcacttgactgcaaactctctatggcaacaaattaccagaccacctggtaatgtttgctgtcctgatctagaattccacagtccctgctgtggtttcctggttggtcttattacttgttggaatcagtttacatcttcattctcgtttcatttccagcctctgctaggcggaatatgtgatagtcattattcatcctccgaggatcagagaactctctttagagccaattcaggtaccaagttatcaacttcagaccttgcttgggtgctccttggaaacacagattcctggaatcttctaggtttaataggtttgtatagggcctattacatctatatttttaaaagctcctcagattatttcatgagcatctggatttgagaatctatgttctagattcttttcacattcctccttgagaagcaattaccaaagtacaaagtgaagaaacttaggaaggaaagttgtttaacagaatttgcaagagtgttggttttttactggcttggtaactggtattagtccttaatagcttatgaaagagggtcccatgtgcctcagtctctctcttttctcagttactgaaggcactagaatgtggaatgtgygcagctatgccctgcctcttaaatggaaagccaaagaagacagaatggtgaagaggttaagagcatggcctctgaagtcttgattacatacgtttgaatctgtctgtatctcaaagtttccatctgtataatggggataataataattaataatacctgccccagggagtttagatagagaagatgaccaagagctgagccctagaatatttgggagtctgaggtgagaggattacctaagaccaggatttcgagaccagcctgggcaacrtagcaaggctctgtctctacaaaaaaaaaaaaaawaaaaaaaaaaaaaaaaaattaataattagctggatgtgatggcatgtacctgtagtcctatttactcaggagtctggggcagcaagattgcttgagcccaggagtttgaggctatagtgagccatgattgtgccactgcactccagcctgggcaacagagtgagaccctgtctctagatacatagatagatagatagatagatagatagatagatagayagayagatagatagatagatagatacgtacgtacrtacrtacatacatacatacatacatacatagagtgagaccctgtcgatagatagatagatgaatgaatgaatgaaagtctggggagaaggacagactgagaaggagcagttagtgaggtaggtagaaaaccagaagaacgtgctggcctgtaatgaaaaggaaagagtttcaaggaaggagtattaattgtggcaaatgctgttgatataatgttgacctcacaaggatgttgkgaggatgaaatataaaatacttatttagtacagtgcctggcatgtataaattatttaatacatgttaactctttgaacaaaataacagtgactagtccctcttctgaactctgaattgttaatatttttcattttgtacttagtcctataccgctgttagtgtcattaaattagactttttactgaagtataacatatcagaaaaagtatacatatgaaaagtaccactcacaaaatttttacaaatgaacacacccataaccagcaccccagatcaagaaacatttgccatgtattttttttcttggaagtgagtctataaattcttcagagataaaattctccccttccttctgtctaccagagttctgacgctaacaagcataaaagtatttgatgcattccctgcatgtgtgattgttctctgaaatgtgaattcattggaagggctggtgtgttaattttgccgacagagaagaacatcctttaaaatctgtgttaagttgcatattttaaagcaggttgtggtggaaatgacagtaatgagtgatcataatgcaatattctcttggccatgttgtacttaatctgctgcttgttagcttctttatagccatataaaacatacaatgtgtactttatggaagagtatttattgccagtctttccagcagcattaatgagattttgacatagcttatratattagtaatttttaatatgatgttaatagactggtagtgatgaagcccaaatagccaaatgctcttggttatttttagaagggatcagcaaaggccttgatggcataggtctttcgagacttctaggtttaattgccttataatttgacttggcagmacaactatatggtaaggataataaaaaataaattattaaaaatatctagcacagtccttgaaacttagatgacattcaccaaatacttttcagttggtggaatgcttgtcctccaaagtaatgtgagtaccattcttcatttctcttcacatttatttgtcaataattacagtagacaagcatggcactcattaatacctataaaacattgacattattaggaagaatatttcccatatacattagtgatctggactttcctgggcttgaaccatttccatgagtcttctttgtaattgtagacattaattgaacttggaacagtcagacacttagtttttatttttaaactacctgtagtaatgatagactaaagattttttttttggggggacggagtttcactcttgttgcccaggctggagtgcaatggcccgatctcagctcactgcaatccacctcccagattcaagcaattctcctgcctcagcctcctgagtagctgggattacaggcatgcgccaccatgaccggctaattttgtatttttagtagagacggggtttctccatgttggtcaggctggtcttgaactcctgacctcaggtgatccgcctgccttggcctcccaaagtgctgggattacaggtgtgagccaccgcgcccggccagctgactcaagtttttaagcaaactagtatttgttaaagtgaaagcatagtctgggcatggtagttcacgcctgtaatcccaacacttccagaggccaaggtgggcagattgcttgagctcagaaatttgagaccagcctgggcaacatggcaaaagcctgtctctacaaaaaatacaaaaattagtcaggtgtggtagcatgcacctgtagtcccagctattggagaggctgaggtaggaggatcacctgagcccaggaggttgaggctgcagtgagycatacttgcactactgtattccagccttggtgacagagcaagaccctgtttcaaaaaatatatagtgaaaacggtttggtgaaaagtcacatgaaaccttttaaatttaatgagttgaaatatgaatctgtattgaggctgggtgcagtggctcatgcctataatcccaacacttttaggaggtagaggcagaaggattgcctgaggccatgattttgaaaccagccttggcaacatagtgagacccagactctacaaaaaattaaaaaaatcagccagatgtggtgatacacacctacagtctcagctacttgggaggctgagacaggatgattgcttgagcccaggaggttgaaggttgagaatgcaatgagccatgattgtaccactgcacttcagcctgagcaacagagagagayctcwtaaaaaaaaaaaaaaaaaaaaaaaagaataggaatgtaccataagtatgtctttcattcacaagacctaaccttgtctttcacttagtcacaagtatcagggaagtgtaaatctttgttttttttttaacagaaaatataattctgtgtattggttagctgttgccctccagccacaaaacctcaaaagcatacaataaacgtttatttctcatacatttccagagttagctgaactgagtggggctagatttggcagttgtgctgatctcaggctcactcatgcatctgcaggtcagctggtggtctgctctaggctgaaatttgctgggagaactttgctctggctcatcctccttctggggccagtgggctagactggacttgtcctttttaagatgataccagaatagcaagaatatgacagtccatttgcacaactgattttcatgactctccttatgttcagatttgcttggccaacatcccattggacaaagcaagtcacatgcttgagtccaggggtaggaagtatgctctgcccttatcaggaatatgccgcaaagttatgtgtcaaaaggcacagattcagtagaaggcgaagaattggaacctttgacaatcaaccatgccctgtaaatatcccagtcagcagatcataagtatttgtgttttctgccccattggagagtaaagaatttctcccatttcttaaaccataacaactattagttatttaaactcccactatgggcagaatgctatggttgatactgtatattaactataattctcacaatgctataatcttatttcttccattttgtagatgagaaaactaaagcttagagaaattaagttacttccccaaagtaggattgcatccaggttcatctgacttcaaagtctatttctattacaacatgctgtgcttaattgatttttatattccccacggtgctaagcacaagatcttatgtgtgtagcatgcatagtatttgtagaattcaattctgactcactttttatgtattctgggttatttggaaaagatactttcttcctggtcattgggtgtattagaatgtgtttgggagcaagtaacagaaaatagttaaatgggctttaaacaacaaaaggactcatataactggaattttagcagtttattagattaagtattgatataattcaatggttaaattgacgctgtccagagaccttattctttctctttgctctgtctttatgttgtcagtttcatcctaaaataaagatgtctgtcactcataatcaaaaagtagctgccaaaaacttacatggtatatgttttctcttctatagccaagatgagtgggaggttgggatggagaggagaggaagaaagagagaagagaaagagatgcctctggatagattgtatgtcatctcaaagcgctttttccttttaatattgttaagaaaggcacagagaaggaaataccgtcaaaatcaagcagtttgggaacctgttagtgcagaaactctcagtggctagaagattggggaactgggtaaggtatatggttgtggagagggttcacaaatggcagtactctctgatcaggagagtcagcaattgaattgcttggtgagcaggatgttttgggggtctctcttgccttttctgccatgaagaaaactatccagccaggtgcagtggctcatgcctgtaatcccaacactttgggaggccgaggcgggtggatcacctgaggccaggagtttgagaccagcctggccaacatggtgaaactccgtctctataaaaaatacaaaaattagccaggcatgggtggcacaagcccatggtcccagttactccggaggctgaggcaggagaatcacttgaacctgggaggtggaggttgcagtgagccgagatcatgccactacactctagccaacagagctctaggcaacagagcgagactctgcctaaaaaaaaaattwaaaaaaaaataaactattcttattttcttctgtggcgatgagaaccactcagccaattctgcagttgcagaatattccttggcctagtcgaggtgattcggtctttttacaacagagccatctcagtcgagcagatgtttggtactgaaagaaatgcttttagctaaaggctattgcagagagtttgttattcacatagctctgatcctcctgtcactccctattcccacccaaccatacatcttctttctttattaaagagtattagtgactttggaaatttcttgtttatgcgggttgatatgtattgcttctgagttggttttgtcagacttataagaagccttatataatcagacagcttacaatgaaactccatgggttcagtgaccaaactcatgcgttatttataaaaatgagcaagccaaggccatgtccagtggcttcacacctgtgaccccagcactttgggaggttgagaggcaggaggattatatgaggccaggcgttcaagaccagcctaggcagcatagtgagaccttatctctacaaaaaaatttaaaaattagccaggcatgatagtttgtgcctgtggtcccagctactcctgctgaggcagaaggattacttgagcccaggagggcaaggcttcaatgagctaggattctgccactgcaccccagcctgcacaacaaagtgagaccccatctcaaagaaaggaaaagtgagcaaggcagaccctgattccagtttttttggtgtgctgtgatatgtgatattgttattagttgtgcctgcttcttatttttttgtgtgtttcagtacagaatattttcctatccttatttaccatgataaagatgtgaagttgcttggtgccctgccttgggttaactttggcagcaaaggcatacctatctttcaagtttgggactggcagctgttaaccaccacatggtagtttagagacacaccagaggtactaacagtgattgcatctgtgattcaggttttcctaaaaggacaagtgagggggaaacgacaaagatgtaaattagaaaatacacgggaaggtagagattcacttgatacacaccattttgagtgaatctactatgggctaggtactttgctaggctttaggtttaggataaaaagacatctgctcccatgatctattgttacataacaagctaccccaaaacttagtggctttctaattttagtttgcttgtgattttgtaggtcaggtatgcagaagggctttcctggatctttgatccatatgtgtcagctggagtgactgagctggcaaatccatttccaagatggcttcttcatttgcatatctggtgccatggtactccttggttcttctctttttccacatggtgtctcattctttagatcatctccatatggcttaggcttcccacagcatggtgatctcaggatagttagactggtacaaaccactcaagtggaagctgcaagccttttatgacctagccttgcaagttccagaatgtcccttaagctgcattttattggtcaagcaagtcactaaggccatctgtcaatgaccatctttagttcactggagtgtctttcatgaactcaatggttaatggctgggatagtgagaaaattcttactgtgcccttccttagaaactgttttttaaaaatctgttatcccatgctgttaactctcagatctctctgtatattaatagttgttactcattatagttcattttctttttttccactcagttattttgctagtgtttgcagtacagcttagcttggttaccttccccaaactggccatccattccaaccttatcatttcatttctttattttttgnnnnnnnnnnnnnnnnnnnnnnnnnnnnnnnnnnnnnnnnnnnnnnnnnnnnnnnnnnnnnnnnnnnnnnnnnnnnnnnnnnnnnnnnnnnnnnnnnnnnnnnnnnnnnnnnnnnnnnnnnnnnnnnnnnnnnnnnnnnnnnnnnnnnnnnnnnnnnnnnnnnnnnnnnnnnnnnnnnnnnnnnnnnnnnnnnnnnnnnnnnnnnnnngttggccactgtgtcggcccttatcattattagaatccttgttcttggccgggcacagtggctcacacctgtaatcccagcactttgggaggccaaggtgggcagattacctgaggtcaggagttcgagaccagcctggccaacatggtgaaaccctgtctctactaaaaatacaaaaattagctgggcatggtggcacatgcttgtaatcccagctactcgggaggctaaggcaggagaatcacttgagcctgggaggcagaggtggcagtgagccgggatcgcaccactgcactccagcctggcaaacagagcaagactgtctcaaaaaaaaaaaaaaaaaatccttgttctcttattagaatcctttgttctttggggttagttttgattttttctcatcacttgaatttaatcggtccgccgtcttttcctattttcttctttgtgatatctttctgattatttttctttctcttcattccaaagccataatattatttcatgcctcaattcctacaaatactttttttttttcttaagagacaaggtcttgctgctctgtcacctaagatggaatacagtggcaccatcatagctcactgcagcctcaaacccttgggctcaaatgatcctcctgtctcagcctccccattagctggaactacaggtgcatgccaccacacccagctaatttttacattttttgtagagatggagtctcactatatcacccaggctggtctcgaactcctgaccttaagggatcctcccacctgggcctcccagagtgctgggattacaggtgtgagctatcacacctgacctgttttcttcattttgacatactactatctgaataatcatcatcaagcacacctgataatgtgatgcttctgtctaaaaaattatgtttcctattctaaattctctctaatctcgtttgataatacgaatccctcccttagttacatgggtctttttgctctcttctatacattcttgctttaggtgtcccttccagtactaggaatgtccttatctctcttctctccaagctgtgtcaaatcccaggttctctaatggaactaagtctcctagatagagcttataataatactctgtgtggctgggcccatagtatatgcttagtgtgtgtttgtagttgatggtctagtgtagacccaactctaagaaagctgaattagccctagcggaaagagccagaaatcaaaaatagtgtgaaggccaggcacagtggctcacgcctgtaatcctagcactttgggaggccaaggcagatggataacttgaggtcaggagtacaagaccagcctggccaacatggtgaaaccctgtctctactaaaaaaaaaaaaaaaattagccagacgtggtggcgggggcctgtaatcccagctacttgagaggctgaggcaggagaattgcttcatccctggaggcagaggctacaaagccgaaatcacaccactatgctctatcctgggtgacagagtgagactctgtctcaaaaaaaaaaaaaaaaaaaargagagagaaagaaatgtcacatctcaaatcctttcataattagaagtttatttcacttaaacttctatgtgcaaaaaatatttctacaaatacagtttgacatgtactttgcttttggaaaaagtaatttttatttaatttttttgctttgctcatttagtaataaaaaactctcaaactgtggtacatttctgttcttatttttagtaactccctgtgacatttgagaaacaagaatttgaggttggcaagctagcccacaaataatagaagagtttatttagtttactttatccttaaaacagtttttctctgacttgcttgcttgcttttggctcatttattcatccaaaagatatttatttggctcctaccatgtctggcactattccaggtactgggaatacaataatgaacaaataaaaatccctgtcccacgttttaattttttttaagtttaactttattttatattttttatttttggtagtgacatgggtcttgctgtgttgcccaggctggtcctgggctcaagtgatcctcccaccttggcctctcaaagcactgggactacaggcatgagccactgtacccagctggaatttatattttaatcagcagggggcgggcagaggagttaaactaaacaagggaacaaattgtaatatatgtgatgttaagtgctaggtggtttacaattttcaacatgtagacagggaaggcctcataaaagaggctaaaatttaagaaggtgggctgggtgcagtggctcacaaaaaaaaaaaaaaaagggtgaaggaactagctgtgtggatatcaaagtgttctaggtagttggaatagtatatgcaaaggcgtggaggcagaagtgtgcctggtctggttgaataactccaaggtgggtgatgtgactgcagtggagagcatgaagagaacagtagtagatggggtcagagaggaaacactggctagatcagagtctcatatatactgctgtaagaactttagattttactcaggataaattgtgaagtctttggaggtttttgtgacttattctttaatgggatcatcctggctactgtttggtgaatgactgaaaaaagagaaagggtggaagcaggaaaaccagttaagagactgttacaataaagtctgtgcaatacataaagactgcaaaaaaggtgagagttaatggtaatggaccagaatgatagcagtggagctgggaattctggatccattttgaaagcagaagaaaaacaaacaaataggctttcctgatgcattggctgtggggtatgagaggatgagagaagtcaaggataactctgaggtttttggcctgaacacctaaaaaatagagttgccattaatggagatgggaagactataggaggtacacaatgggagatgatcaagaggtcatttttgaataggttcagtttgagatatttattggacattcgagttgagatatcttcatagagtactggtgtctgaaggagtactctgagtgataccttccttgttcatatcctgtttatcaacattttcattagagagtgtttcattgatttggaaggaggcatttttcaactgctgtattatctcctgagtaacaaaaataaaaaaatcattcagtgatttttcatactaaatgttttctatgtgccagggtctgctaagctttttttttctccctctcaatatattatttaattagcatgcaatcctatgaaataggtaatatttttcccattttacagatgacaaatctgaggctcagaaagagattaagttagctaaggtcttgtagctgagctaggatttaaatcaagttttggctgactataatcctgtacttactagtctttgagctccttgggcttggctattgttcactgctgaattgtcagtaactggagcataaaggcatgcaataaatatttgttgggtaaatggaaaatggataaataagtactgctcccaacacttgagcttttaacagttaaactgttagctgcaaagatatctgcctctttcaaggtcatttcagccatccatttgatgaatctttttacagcattggtagtatgaggacagcagaaggatttagaaagttcttcagaggatttctagctaatctttctcctaatcccctcatgattgttaaactagtgtgacacttgaattcacagagttctttttgagtttaggctagatatgtttctaatagattygccaagtgtaattttcctaacttgataagtggtatcattcccaggagttggttctatgttggctcctgggagctgttccaactttggaatctgtagcaagtaggaccatggaaggagggtctcccaatatacctctcacacattgctactactcaggggcatttctgcatccctgtgcctgatacataatcactgtctgcactttctgtatttactttctctttctctttatgtggtcttttcttgttatcctggtcaccattatttgcttagataataaattcttagatcagtgttttccagagtcagtcataggcatttatttccttacttgctcattttagctcatttcaatgcaattgcttgtgtctgtttcctatttaacaaataattattaagcaggtactgtgtcaatggctagtttagtgaacttcaaaaaatgagaagttgttctatcatagtggcagaatgattgtctaaaatcttctgtaatactaggcacaagtagctgctcaatgaatgtttgttaaatgaattaataacttgcaaaagtattaatatagtgaatggctcttctacaaatgatagtttccttttcctttatccctaatctatcccttttccaaatcttaccaatcaccatgtcctgttcatcttacctctttactattcttgaatcatttatcttacatcattccttctgccatcattatgtcttgccataaccttttaactagtctctttgtcagtcttgttccacactttaaatctatagtctctattgccagctggagtggtcctgaaatacaaatctttttttgttgttttgaatcatcttagccatttttaaatatatagttcagcagttagtattaagtattatcacgttgttgtgcaacagatctccagacctttttcttttctttttttttttttttttttgagacggagattcgctcttgttgcccaggctggagtgcaatggcgtgatctcggctcaccgcaacctccgcctcccaggttcgagcaattctcctgcctcagcctcccaagtagctgggattacaggcatgcaccactacgcccagctaattttgtatttttagtagagatggggtttctccatgttgaggctggtctcgaactccagatgatccacccgtctcagcctcccaaagtgctgggattacaggcatgaaccaccgtgcctggccttcttttctttttttttttaagaaagaagcagagtcttgctctgttgcccagactagagttcatagtgcattacagccgcaaattcttgggctcaagcagtcctcctgccttagcctcccacgtaatagggacagtagctactgtaccaggccagatcttgttttgttgttgttgttgttgagacagtctcgctctgtcacccaggctggagtgcagtggcacgatcttggctcactgcaacctctgcctcctgggttcaagcgattctcctgcctcagcctctcgagtagctgggattacaggcatgcaccaccacacccggctaattttttgtatttttagtggaaacagagtttcaccatgttgcgcaggctggtcttgaactcctgagctcaggtgatctgcctgcctcggcctcccaaagtgctgggattacaggcttgagccactgtgcctggctgccagatctttttcatctttttttttttaattgttattttttcaaaaataagatgggtctcactccatcacccaggctggaatgcagtgggatgatcatggcttactgcagccttgatctcccaagctcaagtgattctcctgtctcagcctttcgagtagctgatactacaggcgtgtgccaccacatctggctaattttttattttttgtaaatatgaggtctcgctaagttgcccaggctggtctcaaactcctgggctcaagcaatcctctcaccttgttctaaagtgctgggagtatagaagtgagccactatggctggcctttttcatcttgtgaaacaaactctatacccattaaacaacaactactcatttctccctcttcccagctcctggtaacaaccattctattttctttttacttttgagacaggatctcgctgtcacccaggctggagtgcaatggtgtaatctcggctgcctgcaacctccacctcccaggctcaagggattctcccacctcagcctcccaagtagctgggactacaggcgtgcatcaccatgcccagctaatttttttttggtattttttgtagagatggggtttcaccatgttgcccaggctggtctcgaactcctgagctcaggcaattcgcccacctcagcctcctaaagtgctgggattacaggcgtgagccaccacacccagcctgtactttcagtttctatgaatttgactacttttgatacctcatataagtggaatcatatggtatttgtcttttggggatcacattatttcacttagtataatatccacaaggttcatccatgttgttgcatgtgatagtattttcttcctttttatggctgcataaatattttattgtatgtatataccatactttgttgatccattcatgggttgatgaacatttgggttgctttcacctcttggctagtgtaaattatgctgctatgaacatgggtatgcaaatatctctttgaaaccttactttccagacttttgggtacatacccagaagtaggattgctggaccatatagtagttctatttttaactttttgaggaactgccatattttttttctgtagcagttgcaccattttacaatccattgatggtgcataagggttccagtttctccacatcctcaccaatacttgttattttctgtgttttttttttttgatagtagctatcttaatggatgtgaggtgatatctcattgtggtttgatttgcatttctcatttgttgcaaagactgtcctttcccagttgataggtgtttatttctgggctctctattccattacattggtctatatgtctgtttttatgccagtaccacttttgaatacacatctaattttgtttctccctgaaaaaacccttctgtggctcctcattgtcctcagggtaaagtcaaaactgatcttgctactgcttatctctatggcctcactcctcacttctcttgcctctctattcctgtctcaactgtgtgctacagctgtactgaacctctttcagttccacaaatggaacatgaccctttccacctttagagctctgcaccagactttttctttgcccagaacacacctcttcatcccccctggcccaaccaattcctcaggccccagcttagaattcattttctctgggaagccttttctgatcttccaagagtagtttggtacccctcctatgtgctctcataatacaatataatttatcattgatttcaactgactgtttgtatgtgtagattataaattccttgagggcaacgattgttttatttacattgacatccactggttcctagcacagtgcctgacaaatggtagctgcttatcatatttgttgattgaataaataaattaacaatcaatggcatttcctggctcagaaaccttcagtgatttcctcattgattaaagtcttaggtgagatgcagatatctgtatttaaaaataaataaataaagttctacaaattattttgattcacagctagagtttaaaaatggaattcaggataaactcagcctgatatcctagtcctttatgccctactataatactacttttctcctagttctcctcttctttaacaagtactctataattcaggcaaactggatttcttattgtttactgaacatggtctgtgttttcctgcctctttatccatatggtttcttcaacctagaatatgctctttccctctgtcctatagaaatcatcttccctggctggacgcggtggctgacgcctgtaatcccagcactttgggaggtcaaggtgggtggatcatgaggtcaggagttcgagaccagcctggccaacatggtgaaacccccatctctactaaaaatacaaaaattagctgggtgtgatggtgcgcacctttaatcccagctactggggaggttgaggcaggagaattgcttgaacccaggaggtggaggttgcagtgagctgagattgtaccgctgcactccagcctgggtgatagagcaagactccatctcaaaaaaaaaaaaagaaaaattatcttaccttcaagacctggcctcagagtccgcttatttccccataaaacctttcctgattctttttctcggccgcatcctctctgcccgcctccactgccaccactcatttgatcataatgtttccctccattcatcttctcctatatagaatttttgtacctttgttattacacattctttcttttctttccttttatttatttatttatttagagatggagtttcacttttgttgcccaggctggagtgcagtggtgcaatctcggctaactgcaacctccaccttctggtttcaagtgattctcctgcctcagcctcctgggattacaggtgcccaccaccatgcccagctaattttgttgtatttttagtagagacggggtttcacaatgttggccaggctggtcttgaactcttgacctcgtgatccacctgccttggcctcccaaagtgctgagattacaggcgtgagccactgcactcagccccattctttcatttattaaagctttttttgctttagcttccctacataaatgtacactcctagggtagaagaaacccaggcttttaggtcacaaggcttggatacaaatccaagctgtactatttactagttgaataatcataggcaagttatttaagttctctgggccagcctggtggctcatacccataatcccagcactttgggaggccgaggcaggtggatcacttaaggtcaggagttcaagaccagcctgaccaacatggtgaaaccccatctccactaaaaacacacacacaaaaattagccaggcatggtggcgcacacctgtaattccagcttcttgggaggctgaggcaggagaattgcttgaacccaggaggtggaggttgcagtgagccaagatggcgccattgcactccagcctgggcaacaagaacaaaactccatctcaaaaaacaaacaaacaaaaaccagccaggtgcagtggctcacacctgggcaacaagagcaaaactccgtctcaaaaaacaaacaaccaaccagccgggtgcggtggctcatgcctgtaatcycagcactttgggaggccgaggcaggtggatcacctgaggtcaggagttcgagaccagcctgaccaataaggtgaaacctcgtctctactaaaaaatacaaaaattagccgggcgtggtggcaggcgcctgtagtcccaggtactcgggaggctgagacaggagaattgcttgaacccagaggcggaggttgcagtgagctgagattgcgccactgcagcccagcctgggcaatggagcgggactccgtctgaaaaacaaaacaaaagaaaaccaaaaaaaacaaaaaacacacacaaaaaaacaaaaacaaaaagatgacaagaatgtttcaagatattacaatggtcaggccgggtgtggtggctcacacctgtaatcccagcacttcgggaggccaagatgggtggatcacctgaagtcaggagttcaagaccagcctggccaacatggtgaaacccatctctattaaatatacaaaaaattagccgggtgtggtggcaggcgcctgtaatcccagctactcgggaggctgaggcaggagaatcatttgaacccaggaggcggaggttgcagtgagccaagatcgcgccattgcactccagcctgggcaacaagagtgaaactccatctcaaaaaaaaaaaaaaaaatttcaatggtcaaatgaggtaactatgaaagtgctttgccaggcatggtggcttacgcctgtaatcccagcactttgagaggctgaggtgggtagatcacctgaggtcaggagttcgagaccagcctggccaacatggtgaaaccccgtctctactaaaaatacaaaaaattagctgggcgtggtgggaggcacctgtaatcccagctactcgggaggctgaggcaggagaattgcttgaacctgggaggcagaggttgcagtgagccaagatcactccattgcactgcagcctgggcaacaagagagaaactccatctcaaaaaaaaaaaaaaaaaatgctttgtgaccagatgcagtggctcacgcctgtaatccctacactttgggaggccgaggcaggtggatcacctgaggtcaggatttggatagcaacctgacaaacatggtgaaaccctatctctactaaaaatacaacaattagccaggcatggtggcacatgcctgtaatcccagctacttgggagactgaggcaagagaattgcttgaacccggagtcaacagagactccatctcaaaaaaaaaaaaaaaggagaacgaggaaccaaatgatgcccagtttctaggtgggtggcgatgccgtttactgagatgtagaaaacttggagggtgcagctggaatacttccttctttcagctgtgtatgcattacttgggaattggtttttttgaatataacactaatcaacatggtctcctcaatgtagaagatcagactcagtcttttgcctgagcctttctttgtctgagtaggcattattaaacattttattttattttattttattttatttattttttgagactaggtctggctctaatgcccaggctggggtgcagtgttgcaatgttggctcactgcagcctctgcctcctcagctcaagccatcctcccacctcagcctcctgagtagctgagactacaggcatgcaccactatgcccagctaatttttgtattttttgcagagacaaggttttgccatgttacccaggctggtctcgaactcgtgagctcaagcaatctgcccaccttggcctccaaaagtgctgggattacaggcatgagcctctgcgcccagccagcattattaaatatttgtttttgcatgatatttattggaaagttcctctaaaagcacatttctcttttatatcttaaattacattttaatgattaaattgaggggtggggcttccaataaaagagggaacttaaaacccacctccatttatttaaatgcacttaattatgtatttgtttgttcaacaatttcactgagttttacaaaggggcttacaaaattgagcaggacctagttcctgccataaatgttatagtacagtgtgatgaacaatagtagaaacatgtgcaggatgctaaagtggcaccaagaatgggctcgaactcctgggctcaagcaatactcctgcctcagcctcccaaagtactgggattacaggtgtgagctactgtgcccagcctagcactaagaatgggatggagtatcaaggaatgctttccatgagttcagaaggatgaataagtggctggccgtggtggctcacacctgtaatcccaacactttgggaggcttaagcggtcagatcacttgaggtcaggagtttgagaccagctggccaacatgttgaaactccgtctctgctaaaaataccaaaaattagccaggtctggtggtccatgcctgtaatcccagttactcaggaggctgatgcaggagaattgcttaaaccctggaggtggaggttgcagtgagctgggatcacgccactgcactccagcctgggtgacaaataaataaataagggccagtgtggtggttcatgcttgtaatcccagcactttgggaggtcgaggcaggcggatcacctgaggtcaggagtttgagaccagcctggccaacatggtgaaaccccgtctctactaaaaatacaaaattaggctgggtgcagtggctcatgcctgtaatcccagcactttgggaggccaaggtaggtggatcacaaggtcaggagttcaaaaccagcctgaccaacatggtgaaaccccatctctactaaaaatacaaaaattagccaggtgtggtggcacacgcctgtaatcccagctactcaggaggctgaggcagaattgcttgaacccgggaggcagaggttgcagtgagctgagattacgccactgcactgcagcctgggcaacagagtgagactctgtctcaaaaaaaaaaaaaaaaaaagccgggcgtggtggtgcacgcctgtaatcccagctactcaggaggcagaggcaggagaatcacttgaacgcaagaggaggaggttgcaacgagctgagatcatgccattgtgctccagcctgggcaacgagggaaactttatctcaaaataataataataaaaaaaatgaaaataaataaacaaggaggatgaataagaattagcaaagctatgaagaagggtattcagcaagcatatatgaaggccaagagttaaacacttaaatattctgaaatatattttgggttattaacaacgttttactctgtggctagaactagtgttccctttttctttttgagtcagctcattactactgactgtttcagtcaggcaggccctggtgaacctcctggagcggtaggcaaattcagtccttggcagatatacggatgtacgcttgtagtggctgtggatcctcgagctgagaacaggaggcttctttggagcacaagcctcccacagggcactcttgggatgtctgtyctggaattacccagagcagtaacaaagctttcttttcttccttaacccaagccagcaggatgggatgtcggctagcctttgtgtttggagcctaccaacaaacatacggtggccagcacaaaagtattgttgggctacagtgaaaactaggtcggggcccaaacccttttctgcaaagagcccctccaaagagtagagtgccaacaagccactaatttggctgtttgacattgatactggtttctgacaggtttctgacttactgatggcacattgagtcatttaagattctgaaatctttttccattgctgtctgaacctttcaatttggaatctctgagatgtctttgactctttttccttatttctcatatctatcactcagttgctaaaaagctttatattctgactatagccaactttttcttgcccataaatagcactgttagttagatgtttggtcacctctcatctggctgttgcagtaccctccaaaactgcctctaattccttctctatcctgctaccagaatgatctttctaaaatgcagtttgggtcatgtattagtttcttagagctgccatagcaaagcactacaatgtgggtgacatagcagaaacttattatctcagagttctgaaggctggaagtccaaaatcaaagtgttggtagggccttgttctctctgaaggctctacgggaagatccttcttgccttttcctagcttctggtaggtttttggtgttctttggcttgtagatgtctcagtccaatttctgcctctatcttaacatgacattttccctgtgtgcctatatctcttgccactctttttataaggattccagtcgtattggattaagggcctgccctactccaatgtgacctcatcttaacttgattacattggcaaagaccctatttccaaataaggtcacatttatagttaccttaccagggtttaggacttgcatgcatcttttggggggatgtaattcaacccccattagatcatattatacctttacctataaaccttcagtggcccctgtggtctgctgaattaactgtagatgcttcatcttggtattccagaacttctgcactaataacaaatataataataataatagaaatagtcataactgacatattgagcactttccttgacattattcttagcattttacatgtatcaacttactgaatcttcacaacaactctgtgggttaggcactattattattcccattttatagatgtgtattaaacaaactgagtaaccaactcagggctctacaactattatagtctgagatgagattcaatcctagccagcctaactgcagtcaccactatattatactgcccatcttaactttttagcttcatactttctcccctacttatacagaaaaaaaaaaaagaataattactaatctctgtgctttgttatctttgtgttccttttgcatagactgtctttcttatccccaaccctgcctatgggttaccatgaaatggaattaaatcctcaacaatgagtgaatattagccaggcctaggtggggaaaggggaaggatattagaggtaaagggaccagcaatgtgtacaaatgtgcaggtgagcaggagtcagacttttataagcaggagtgaaaggctttgtgtgcctttctaaggattgtgggttttatcctacaagtaatagcacatcactgaataattttaacaggagagtggcttcaggttggcatttcagaaagattgtcttggctatattgtggaaaatggattggaatgagggctaaatcttttcaagatgcaaaagggggcaagaaaacaggttagaaagctaatggaataacctaagggaggcgtgagaatgataagttattgatagtgggttctacctgttgtaaaaaatgaaaataaattttaaaaagatactgttaaatgggagaatgagttgtgtactatgagctaaacaccaaactggactgactttgtatttagaccttatctctttaattactccttgcctttgaacaaacaccaaatcttgctgattctacctctaatgtctctgagataataacctcctttccattcttgctgccattgtcttattcaggccttggttatcctaactcttctcccagcctcagttcctgaccttttcatacaatttttatactactgttagaatatttctatgtagcatatctgatcatgttattctcctgtgtgaaaaaaaaaaagtgttagttgattgtatggcatccctactagaccatctaggctagactagtctctgtgggcagagactggccccatttatctttgtgtttcacattgtaggttttcagtgtttgggtaggtgaacagaaggatggatgaatctttctcagtaccatgttgctaattagatggtagcaaattatctctgctagttagatgacagcacagttatcttctttgggtaaatgccctaactcctggccagttgggtagatttttcaaaaaggaataataattcttagagttgatattttctccagaccttctctgaatgcctttgaaccactgttcagagataagcttatttggttgcaggtatcagtacactggtaattcaaatttttttaaaactaccattttgtcttattgttctgaatagttataattggttgaaactactgtagctgactagaatcagcaagaattgggaactggagtcctgggtgcatttacctcagagagaggtacatattccctagagccagtccagaatattctctgtatggatatgtttatgtgcttgtctgtgcctgaattggtacctaccagaccatatagggatatgtgggaagaacctatactctttagcctaggcagttgtcttagtccatttatgctgctataagaatatatcatagactgggtagcttataaacaacaaaaatttatttctcacacttctggaggctgggcaatctaagatctaggcacaggcagattcagtgtttggtgagggcctacttcatggttcataaatgcctgtctttttgttgtgtccttacatagtggaagggactaaagaactatggggacacttgtacacacattctctatcgtggtaaaatacatataacatataatttaccatcttttttttgagtgggggtcttgctatgttgcccaggctggtcttgagctcctggcctcaagcgatcctcccacatcagcttctcaaagtgctgggattacaggcgagagccactgtgcctggccaagagacaagttcttactctcatatggaagtggcagtagggggaggagtgctcaataaatgtttgtagaaataacctgaattgatattcctgagtggagaactgagtgtccacttctctgtgcctttggtgattttaaaaaagatgttggcatatgatttcttgcattttagtaataaaggtttatttacataatatagttgaattaccaatacactttagaaagttattgagtgccttctaggaaaaggctgtatatatttaatgaaaccaagtatcaaacacaaatgaaatggaagaaactctgttattttattagaccgtgaggaagtgaggcaagttttggtataggtaaagttggtatagaaaaaggtaacagccactgagaggtattgaagtatctataacacattttattgactgtattatagttttctaacttgaaaggttaaaataacaacaattaaaaatattaaaacttctgtattaattaaatgtattaccaatgccttgggtcattttatagggctgaccgagggagtagtctagctgaaaatgaaagcaaagcagctgttatccccatccgggaaagctgaacatgctaatgcagttgctcttgtctctgcttcctgcagagggatttgtttagaggccacaccagctgagtctgcactgggagttgcttatggagaagtgaacattccagctaatgggcacagagaccgtgtagcaatcttctggctgggtgcggtagctcacgcctgtaatcctagcactttgggaggctgaggcgggtggatcacctgaggtcaggagttcgagacaagcctggccaacatgggaaaaccctgtctctactaaaaaatacaaaaattagctgggtgtggtgacacagcctgtaatcccagctacacgggaagctgaggctggagaatcacttgaacctgggaggtggaggttgcagtgagccgagatggcgccactgcactccagcctgagggacagagtgagactccgtctcaaaaaaaagaaagaaatcttccttgttgacaaatctcaaatttccttttcttatgcatgcagaggtcttgaaacattgagaagcggtttctgagggcctacaggcttatcagcccaactaatgtattcaccaaaggcaggcaagagaaatgggttgtaaaagcaaattccatttgttttccctctctggtccttggtttgcgctttttccagtttgcctggagaagccagaatctattagccaagtgtgattcctcatcttttgtcaccttttcctgtgctctccaccctctggctttgcatatggatttccagggccttcagagacactgctgaacagagtaaacaagtgtttcccagaaccaagagtcctggtgtcacctggcctatagagagtgcacatacagtcttttcattatagtgtcttctgcctggcactcagttgggaaacctgagtggctcctgaagacaggcccgacatatcacactgtcatcatgctaaagaagtgaaccactgcctaccttttgactttcagagctaaagaaatctgcctgcatgattagatgtcagcttcactgcccacttataaccctgaagttcayaagctcagtttcttttcagcaaatgggcacctcaaatgtgaatcttgggcagattcaactagaatgaagagagcaaggcgctgtgcttatgccgtcattatgccttattttaagattttcaaagatggattatcaagcaggatgaagcagatcaacaagtttcccttttgagaagttggaagatttatttttagtcattctttctgtcttgccaaaactggtccgacgcttccaaggatctgaagtgctgcatggtgctgcccccaactggttctttttggtgcttatattattaccacatcagaaaatatatgacatttaaatttttttcgaagcgctttcacatattttattttattattatttttttgagacagagtctcaccctgttgcccaggctggagtgcagtgatatgatctctgcccaccgcaacctctgcctccaaggttcaagtgattctcgtgcctcagcctcccaagtagctgggatcacagtcgtctgccaccatgccctgcttatttttgtatctttagtagagatggggtttcaccatgttggccagactggtctcgaactcctagcctcaggggatccacctgccttggcctcccaaagtgctaggaatacaggtgtgagccatctcgcctggccaacttttacatatttttttttcaagacagggtctcactctgttgcctaggctggagtgcagtggctcaatctcacttcactgcagcctccgcctcccgggttcaagtgattctcctgcctcagcctcccgagtagctgggattacaggcacccaccaccatgcccggctaatttttgtatttttagtagagatggggtttcactatgttggccaggctagtcttgaactcctgaccttaggtgatctgcccgccttggcctcccaaagtgctgagattacaggcgtgagccacggcgcctggccaactttcacatattttattagattctcataacaacactgcaaattaggtgaatcagggattatcatacctacttatagttgagaaaagtgaaagatggatagccttattagttgatttgtccaagttaaatggctattaggaggctgaattgggctagaattcagatatttctcctcttatcccattaagttccctagtcctttgtaaatgcaatggtacccaaaaatatgtattaagatataaattttaggcttagaggaatttccctctttttctcccttgggaggaggagggagataatacatcatataaggtttgagtaaattcatttttgagctcctgtgctgcatgaggctctcttactcagatgctgtggtctctaagtctccagtgcaacgtagtggtaaagagtatggactctggagccagactgcagagtctgccagtctctgccacttaataactggataactttaagcaagttgcttaatttctaaatgccttctctaaaatgagtaatagtatgtagtcattttgtagtccatagcacgatgattggattttcatgtgcatgtgtgaggtgtactaccctcaaaccttattaatgtctgcacgttgtctgacatgaaaaaaaaaaggaaaaaaagtaccagtgtacctaccttatagggttattgtgcagattaaatgagataatatatgcaaaactctcagaacagtgcctgaaacaatttagatactatataaataacagctgctattattatttataaatacatatacttactcacttttttttgagactgggtctctctctgttgcctaggctggaatctagtggcacaatcatggctcactacagccttgacctcctgaggttcaagtgatcatcccaacctcaacctgtgagtagctgtgactataggcacacaccaccacacccagctaatttttttttttttttgagatggagtctcgctctgttgcccaggctggagtgcagtggtacagtctcggctcactgcaagctccgcctcctgggttcatgccattctcctgcctcaacttcccgagtagctgggactacaggcgcctgcaaccacgcccggctaattttttgtatttttagtagagacggggattcagcatgttagctaggacggtctcgatctcctgacctcgtgatctgcccaccttggcctcccaaagtgctgggattacaggtgtgagccattgtgcccaggctttttttttttttttttttttttttagacggagtttcactccgtcacttgcccaggctggagtacaatggtgcaatctcggcttactgcaacctccatctcccgtgttcaagcgattctcctgcctcatcctctcgagtactgggattacacgcatgcgccaccatgcctggctaattttgtatttttagtagagacagggtttctccatgttggtcaggctggtctcgaactcccgacctcaggtaatccacctgccttggcctcccaaagtgctgggattacaggtgttagctactatgatcccacccctgggagctaccgtgcctggccaatttttgtattttttgtagggacgggattttgccactttccccaggctggtctcaaactcctgacctcaagtgatcctcccaccttggcctcctaccgtgcccagccttattcacttttttttctttttttttttttttactaaaaaagcaaagctgcccttcatgggtatttaggaatgatgaacagcaagactatcttcaaatagtttctccataaccttatctgctactctttcctctgttcacttcagtcttactcgtcttaaccactttactgaaactgctctgtccaaggttgccaatgatttcctggttgcaaattcagtggatacctttcaagctcgtcttcctcattcatggcttttgatactgtcagtcatttcctttgtagaatgctttccttctgacatgtagaatgtcattgtccttctgaacatacatacatacatacatacatttatttatttatttatttatttatttatttatttatttatgagatggagtttagctcttgttgcccaggctggagtgcaatggcacgatctcagctcactactacctctgcctcccgggttcaagtgattctcctgccttagcctcttgagtagctgggattacagacgcctgctaccatgctcagctaatttttttgtatttttaacagagacagagtttcaccatcttggccaggctggtcttgaactcctgatgtcaggtgatccacccgcctcggcctcccaaagtgctaggattacaggcatgagccattgcgcccggccgtccttctgaacatttagaatgttctcctattgacattcttgcctgttccttgggattctgttgatttcccatcttacatgttaaaccctgggcatgcatgaccttggaatgcatgactgcttcagctcaatgtttttgcctcctaaatattgtctttcacttagactttgttcttaagcttcaaactgactctatttagatcatttccaccttggttgtccaataagcacctgtacctttaataatttaacttctcccagctgaactcactatcttttttttttttttttttaagacagggtctcgctctgtctatcacccaggctggagtgcattggcatgatcttagctcactgcagcctcaacctcccaggctcaggcgatcttcccatgtagctaggactacatgtgtgcaccatcacgtccagctaattctgtttatttttgtagagactaagtctctcactatgctgttcaggccggtctgaactcctgagctcaagcgatcctctacctctcaaagttctaggattacaggcatgagtcaccacacctggcctgaactcactctcttttaacattgcctcttcttctaaaaacctactcctctccttgctctctgggtatttaaaaatgacatccagggaccaatagcctattgctctcattctctaatccaggcaattatcaagttttttttttttaattctgccatctaaatacattttgaatcttgccttgttccaatgcctccactattgccatgattcagatgccctgctctcaccaggattattgcagtaatctcctatttccctttctctgtatttttcactctaatccatctatcataccatggctaaaataatattttctttaaaaagcaaatataaccatgtggctctcctgcttaaaatgcttcttttgtttcctatagacaggataaagttcacatatcttagcaaaacatgtcagcctcacttcctgactcatctataaatgcactctggccatatcgaagtaaattaagttcctgaatgcatcatgcacttaacctgtaactttgcatatgctgctccctctgtgtctttcgtgctactttcctgctactccaggtcatcctttctgactccttatttcctctctgcatttcctctgacatgcctccacagtttagctttatccttgttgctgcatggtgttgtcctacctgcacataactatattttaatatttattatatgatattgtttgactatgtcccttaatagattgtgatctccttaaaggaaagtgtcattgtgtgcagcacctaccatagtgcttggaggcagaataagccctcagtaacttaaaaaaaaaatacagtctctctcttccaggtgtttactctctaatggtttcaccactagcctaaatatttctgataaatggtagctgggttttccttctgttttgcagtatatcaactccgggaacctggaacagttgctagacagtaacctgcatttgccttggactgtgagggtaaaactggcctatgacatagcagtgggcctcagctaccttcacttcaaaggcatttttcatcgggacctcacatctaaggtatgaaggctttactctcacaactcattgagagataccacccttctcttttgccaagaaagctgtgttagatttaacatttaatcacagaggacataattcattatattttatagttagtccttagaaagcctacatcttttccttctgtttttgaggcagtgtctcactctgttgcccaggctggagtgcttctgcctcctgggttcaacgactctcgtgcctcagtctcctgagtagctgggactagaagtgtatattaccacactcagctaatttttagtagaggcagaattttgccatattggccaggctggtcttgaactcctggctgcaaacaatccacccgccttggcctcccaaagtgctgggattacaggcgtgagtcactgtgccccaccataagcctatattttcttatagcaggttcctttcagtgctgagtgagccaacatatatatatatatatatatattttttttttttttttttttttttttttttgagacggtctcaccttgtcactcaggctggagtacagtggcatggtctcggctcactgcagcctccactccatcggctcaagcaatcctcctacctcagcctcccgaatagctgggaccacaggcgtacaccaccatgcctggctgtattttggtcttgttttgtttttttccactcttattgcccaggctggagttcaatggagtgatcttggctcactgcaacctccacctcctgggttcaagcaattatcctgcctcagcctcctgagtagctgggattacagacgcctgcyatcacccctcgctaattttttgtatttttagtagagatggggtttcaccatgttggcaggctggtctcaaactcctgacctcaggtgatccacgtgccttggcctcccaaagtgttgggattacaggcatgagccaccatacccagcctttcttttgtatttttaacagagatggggtcttgccatgttacccagactggtctcaaacttgtgagctcaagcagtcacccacctcagcctcctaaggtgctgggattacaggcatgcactgtgcccagccaactcatacatyttgagagccttcatgtttaacttcaatctcctgaatatgtgttacaggagcaaatgacatgagaagggttaagaaattcttgccttataggaatgacagcagtcaaggcagtataggggcctatcagttttctttcctgtggccccaggatgtagttcttagctaagagcaggagttcagtgatttttagtcacttgaatgcaggtttttagggccatatgtactgacccattttctgcctgtgtgattgagtttctgctgccctgccagttcctctttggcatcagctgatctctgtagcactctcttgctgtccaaattgctgtgtgaccaggttagaaaagagtcgctttcagaggaagttggccatgccacaaaacagacacctcatagccaaatggcctaagataccatcatgacaaggcttatataaatagtaccgtttgattattaatgggggaactataaggcaatctaacatatctaatatgactgctgcccaagaactgaattaaagtctgctagggaggtgtataagagttttgtacctgcctaagaatagctgtcacttcattccccaccctcaatacctacatgtacacatattcacatatgcatgcacatactcctactccttctgccccagatgaaggggaggggaagggagcccatcttaagaaaaagcttgaaagggaacaaaagcagcagtactgagtcaataaagcctaaagcagtaagtacctggatgcctcacatagaatggttttggtgtgtggcagagtcatttgtagtcagctgcactrttcctgaaggagcacaagactggcaagtagaaactgggaaccagcagaggcctagttgtaaggagccctttatctacattactgtctgtaagaactggacagttaggcagttgggacctggaaggtgatatcttatctctttattagccatttcttctcccccagaatgttttggaaaaccaagactaagaaaagtgcaggccgggcatggtggctcacacctgtaatcccagcactttgggaggccgaggcgggcagatcacctgaggtcaggagttcaagaccagcctgaccaacatggtgaaacccttcctctactaaaatacaaaaattagccgggcatgatggcaggtgcctgtaatcccagctactcgggaggctgagatgggagaatcgcttgaacccaggagatggtggctgtggtgagccgagatcgtgccactgcactctagcctggcgactgagcgagactccgtcttggaaaaaaaaaagaaaaaaaaaaagaaaattgcatttgttccaggcaaatggatgggactgaatcaactcagatatcaaatctttgcttcctactcagaaagcgccattttttctaagatagaaggagtttgtgacaaaatatgtatcagttacacagatactccccccacacacacacacacacaagtgtctcctatacctggctccaaggatgaaggaatattagaaaagaggaacttctgacctagaggtatgtacagttttgttggcaaataactaaaaagtagtgcacagcattttataattgtttagctacatagacgacaagttttctgagcaggaaagatcactctaggccagggtagctaggcttcctcgaggaaagcccccactccctaagagttcatcatattcccttctgtgccccaaaagcactttgtcccattgtgctagtgtccaagtgtggttctgtctgggcttgttgtgctgtattataaaaataacctttttggactataggataagaccactaccctttgcttttccttatggggaatgggtattcccagtgtcaactgacttgagacaagaaactaggaacataggagaaataactccctatatttctgggctgtactttcttgggtccggactttaaggaggttttgaggataattccaggtggtgagaacaaaggacgtttgcaaactctagaggaaggctgggaagtacactataggggatctcaagttgaagacaaacaagtgagtcttatgaaccagactgtccaatttgagataccgtctgtgttcattgcccttttatcatctctgagaaataaagctaaagggacagtagagggctcggaggtttccaaattatctcttcatagtccatcttgggtctgtgtcttatttctttaaggacagtatcaggctttcttatattttaatattatacactccatatcacttgattgttctgttgtgtctgtatctcccaccagcatgagtttctcaagtgcttctcttatttacttttgttttcttaccacctagcacagagcctatgagagtaaagtcttcctgggcctatttcagggaagggcgaagggcttgatagcaaagaggccaaaacgcctgctccagagctgagattctgggttccaggcccagttttgtccccatctctgaacgacttcagtgaccttggaacctccgtgctcccagtctgtaaaacagatgctgtccttgactttgcaggagcgatcagtccacactgctcagaccagagctaacaagagggatttaaagtagaggtaacatgttccaagtgggtaaaccaggacagagagaagaagatgcctttttccaaatgatcctaagcctgtggttagaagcaaaaagatccctagtttcctatcaacgtgcctcctgaaagtagtattacctttataggactcatgtccgcagctactgcaataatgctctaagagtaaaatgtctgtcagatatagccattcagtctaattttgtaattacttctaagaaacagcctgaaacagacttttgcagtggcaaggccaagaacttacttggaaggaagtgggaggcagtgtggctttaaaaatattcagtttgtgagcactatgaagaagtgccaatagccacacacaggcttttatcagtagctctagaagtaaccagtacacacatacccgagccttggctcttgggggcagctgagaaagtagtttgcttctgcttaataccattactgcccaactgatcttctgtgattactgttgggaatgagtatgaattatgaattgcacctttagttcttagttcttttctgttgttattgttgactgcatagaagccacttaggtgatttcactggaatgaaaagcctattcagttatggtcttaggctatgccacacaatgaggaatagaaaatgccaattttcagagtgaagagaacatgaattaggaacaacgttgaatgctggagggatgtagagaatgactgttagtgtaccctaaagttaatttttataattaaaaccatcagcagcttctgggaactatttatgctgtgctattagagggcacaatattggggaatccaatctctaccttccatgggctctactctagttgtggagatatttaagtcagcaggccattacacaagagctatggtaaaggtatgagatcacatggtaggattgagggcaagggatgggacacatcacaccaaaacagataatcctctaagagacttgaaatataacagtccctgaggcatttaggagtccggcagttcggtcactgatctccctgtgctatgaaaagaacctcttaactgttcagtctttcagtagaatcttagtcttttcctgcctgatcctaactgggtttagggagtcagtttgttgcgggtgaggggaaagaggtgaagccacatagaaagtgttttgttgtttttgttgcagaaacagctttagagtgaacatgagttaatagacttggcatttcttcactcaggtggctttattcagtgttaatactgactgtgcagctgttccaggacacctcaggcactttcaggtgtctgatctggcccagttctgaagaatttgtgtaggtttccaggaaatgcatccatggccacccttttgagtctcttgtcagctcagtcctcactatggagagtggaatgtatgattattgtatacgtttgacacacgctttttttaattttaatttttgagacagagtctcactgtcacccaggctggagtgcagtggtgtgatcttggctcactgcaacctctgyctcccggattcaagtgattctcctgcctcagcctcctgagtagctgggattacaggtgcctgccactgcacctggctaatttttgtatttttagtagagacagggtttcaccatgttggccaagctggtctcgaactcctgacctcaggtgatccacgtgcctyggccttccaaagtgctggaattacaggcatgagccatcacacccagcttgacacatgcttttaaaagaagcccagttgcttcagtcatcagactaaactttcatttaacacacttttgccaagctccttctgggtacctgtgctaggttacagatacagaggcaaatgaaatcattccttgccagtgaagaggcaaacatgtaagtcactgttgcagtgtgatataataggtgtgaggaaatgaagaatgggaaccaggcagcaacagtgcctgggctgttttctgaaactgaaaaggtcacctcttgcctcagggaaatctgactggtcctctcttactgcttagtgtaggcagggctacctcactcaaaagtcttctaggagggaagagacataggtgacatatctgagctgccactgcctcacaggctggtgccctatagctggggctttggctaataggcaggctggcctagggcccatcttctcacagacagtcaaagtcagggagctgcgagtgctgagccagcaggactgattagagagccaaagccaggacaagcacaagaactgtccttcctggaagccagagatgaggcatgtctacctgtgatccagggtagaagtgatgaaatcacggctccttccagcttggggaagggaaatagtgtaatcatgtcaaggccagagtaagggattgatttgtacctgacaggagtaagcaggaggtgacttggcatgtcttagcaactagataccaaggctggcaaggaagagggagggctggtttgggtcagatggggccttgctggctccagaagtgtttctgtgagccaaggatccctgctctctgctattctgaaggaagcgggtggggtgaggtgcctcttgagccagagcagtgtagggctattttgaaagcagctatttggggagagctggttgccgctttttgtttatttacaggtcacttgggttgacctgaagacagcattttttcagtgagcatgttctcagcctgtctcatgaattgaaagctgtgaggaaggaaggcaaaccagaacttgctcctgaggggttcatagcttttctgctagactgtaagaggagtggcatagaggaggagctaagagttgagatragagggagaaagatgaggtcatggctaaaaaggtagcttgccttaaaatacaaaattttcttaggtgaaaaggataattgggagaatatttcaaatgaaagggaacaatgtaagcaaaggcaaaggcttgaaggacctgttcaggtttggtaagtcaagcttgtctgtgacaagtttggatgaggatatgtgcataggggcaccaggaacagggggacagcggctaggccagttggataaagccagatcatagacttttaatgccagagaagaggttggttgtgatcttgtggacagtgaaggttagtgaaggcttagacacttgtcttgtgcttrtatcaagttggcaaggtcaggcctgggctttgggtctgtgtttcygaggaaggaggaagggaggccaggggcctgatagtctgttgttctcccctatattgcaagctccaagaggacaagggttttggttgttttcatctagctatttctagcacttaaaaytatgcctagcacttagaaagcaaagatgagtaattgtgtttggaatgtgaagtgtatcctaggacagccacccaagacccaggactaactcatctcacctggctgtcttagagcccctgayctgaccagtggggtcagcttgagtgcggttcaccaaggagcagaggacaaggtgccctgtgataggaaggggggaatgggtggtaactctatggctgatccccgcttctgagccacattattttctcttccttcctgggaaccctagaactgcctgataaagagggatgagaatggttactctgcagtggtagctgactttggcctggctgagaagatccccgatgtcaggtgtgtagccctactggatgctggggtccaagggacagggggctgaagctaagggaaaattctagcctcctccccagaggccaggacttggtcacagctcaacctcagctccctaaatttgtttagtcctcgtctgtacccatccttgrggtggaggaatggtcaaaagattccattgcaccagccattggcaagctcattttctgtataatctcaccccacagcatggggagtgagaagctggccgtggtgggttccccattctggatggcacctgaggttctccgagatgagccctataatgaaaaggtaagtttggaggatctcaaggcctgattctccttttttctttttcttttttttgagatggtctcactatgttgctcaggctggaatgcagtggcacgatctcggcttactgcctcccgagttcaagctattctcctgcctcagcttcccaagtagctggaattacaggcatgcaccaccacgcccagctaatttttttatttttagtagagacagggtttcaccatattggccaggctggtctcagactcctgacctgaagtgatctgcccacctcggcctcttgaagtgctgggattacaggcatgagccatcgcgctcggctgattctccctagaatccactcttagcagagtgtccaagatgttcctaccaagagcagtggtggtacctggcagctgcccagtgactgactgggatgaagtatgggcaatatggcccaggcctgggctgttagatggtggggtgcaggggaggcaggggcaggggcagataccctacccctcaacccattaagagggaaaccaaagtccgactacccaccaggcagatgtgttctcttatggtatcatcctctgcgagatcatcgcccgcatccaggccgatccggactatcttccccgcacagaggtgagctgcaagcatggggatcattgccactgatggggctagtttgaagcaatggaactgttctgtccctgggatggacttgctggaactctctgttgctggttgtcaggggcagctcccaaccacttctactgagcaggctaggatgggtggggggattaatgaactgtctacctatgctttccatacccatccacagaatttcgggctggactatgatgctttccagcacatggtgggagactgtcccccagattttctgcaacttactttcaactgctgtaacgtgagtgtctttctccctctgcctttcatcaggggctggctgaacccttttcacctggttaggactgtacagagaggctgctaattagcttcatgagggacctcattttcactgtagtgacagcaaccacacctcctcctcctccctctggcagctaacctattcagagctctggacaaaggaaagaaagaagttgttttgtattatctggtcctcaacctgtagggtagacccatcactccttgcgttaggtgttgatggaactctggtccggttttattgttggactgtggatccaactggtcctgaggcatatgagaaaggctcttcttggccttcatgtatgtagctytggggctggaccttacctgttaggatcaaggggtaggtgggctttgttcagatacctcccagaaacacattaggagcagaactcaagaacagaataaactaatatgagcatacttttggaaggttctgtgacaaggtgataagacaaacactaagacagggagggtagtagacagtagtgttttccctgacctgaactgtagggatcaccttcattgtctggggcctttagaaaaggtctctcagctgcacatctgaatcttcaaagatgccagaaatagactcaaatgccatctttggggtgggagatggagggcagagctcatggctgttgtggatacctacagatggatcccaaactgcgcccatcttttgtggagattgggaagaccctggaggaaattctgagccgcctacaggaagaagagcaggagagggataggaagctgcagcccacagccaggggtaagagattagaccagggagcccaacctaaccctaagggaggaaattcggatgtggggccttctcctcttagggttgtgattgccaggatcccaggtccagaaacaaatgggaggggaaggagatgatgcagaaagtactggcctttttaagagctgtggcttggcatactgcttcccctctctgagtctgtttcttcattggtaaaacagggccatggtatcagctttgctttcatgagtgaaaacattctgtggtaaaatgctgcttgtatttgttatgactagtgagagtaacccagacttgattattcttcaggactcttggagaaagcacctggggtgaagcgactaagctcactggatgacaagatcccccacaagtcaccatgcccaagacgtaccatctggctgtctcgaagccagtcagatatcttttcccgtaagcccccacgtacagtgagtgtcttggacccatactaccggccacgagatggtgctgcccgcacccccaaagtcaacccttttagtgctcgccaggacctcatggggggcaagatcaagttttttgacctgcccagcaagtctgtcatctctctggtatttgacctggatgcaccagggccyggaactatgcccctggctgactggcaggagcccctggccccacctattcgccggtggcgttccttgcctggttcgcctgagttcttgcatcaagaggcttgtccatttgtgggccgggaagaatcgctatctgatgggcccccaccacgcctaagtagtctcaagtacagagttaaagagatcccaccattccgggcatctgccctaccagctgctcaagcccatgaggctatggactgctccattctccaggaagaaaatggttttgggtccaggccccaggggaccagtccatgccctgcgggtgcttctgaggagatggaggtagaagaaaggccagcaggctcaactccagccaccttctccacctcaggcataggcctgcaaacccagggaaagcaggatgggtgagggggtttagtccctgcctcaccttggggatggaccttcagctgaaaccatatggccccctaggtgcacagccttgattcttccctggagcctacagagcaggcaggctaggccaagccaggctcaacttctgggctcccagtgcccattggctgtgtatgacgggaggcagcagtgagaggccttcctagttagggccaacagctgataccaagcctctgaaatccagcaaggaggtctgcctcccaccagaccctctccagtgtacttccccagataggaccagaggatgtctagttctaggctgagctggcaggcagctattaccccggttctttccccaccccaggtctgtctcttgccttttcttggggcatataagctactgagtggaacatggagctgatcaagaggccgtaatggtcatggctgtttcccagacctgaatattggggtgcttcttgccagtattctaagacatttgagtaattgctgtttgcacttactgcatggtcagaccacgtcactacatttctatgcaaggggacagcaaggcagcgtggtggtcatggctcttagctaacctattcaaagaccttttcctgttgattaatctattttcatatttataaaggagtcttaatgttctgccccataagactttcaaccttgtggttgggagtggggctggttttgtaggccctagggcctgcttctatgtatttatcaacatgtgatacattcaattggttaaatggtttatacagggactgatttgcttcccttcctgccatggctggagctttgggaacagtctgtccttacagagctgcaataagaaataaccaaagatgaagctggtcaaatattttcataacttgcttctgttgatttttttttttgtaaaactttcccaagacattttcagacttaaaaataaagtcagtgttacaggtgctggtcagccttcttacttgtacctcaaacactgggataaaggaggcggtccagggcaatgcagtgatgtctgtcaagacattccccctcccctaaactcagtagcagttgaggatgacatttcaggctagagagacccaaaatacctctgttccacctgagagcaaggtggaagttgcatcagctactgccccaagtgagcttcatcttctgattgtgggctttggaggaacgagagaactggctcttggccactgtgaggggtacagctttgccactcaaatataccttattgtggcattcagggagccagggtccagagctgcagggctgcggtccctggctcacttccacataggccatcacataacctgtcataaaggcatcaaaaccagcccggtgcaatccatccccaggcactgggttaggactggcttggctccctggcacttctgaggtagctctatcagctatttcaggccttgctgccttaatccccatctctaagtcatttttgttgccttgcttggagtgaggcaggttcctagtttcatcggcagccacctcctgctcggtttcttcaggcttgatgctatccccacagacctgcttcttgggaggaccatccttagcttccccagaggtctgtgtccccggtaggttcaataaagccctcttccgtttttccctacgtcgtcgccgtcgccgcttgtcctctgccgcagcctcatcagtgtcaatgataaggtcaatatcgtgagactgaggacactgtggtcccagggggcaccagccataagcctaggggtgggaaagaggcttagaaagaggctccaggcatcagaaccttccctcccaagaaacaggtgggtgctctcaccgagaagttgtcacagatgctggtgggatgaggacggtgggttgctgggggcaggcagcagcggtaatcaatatggtccctcatgctggaaggatagttgcagaactccagggtaaggtgtgggctgccagctgcccgctgcttcccattttcccgttcactgcaacagcgcaagagggtaatggtccactagcatataagctccataagagcagggttttgtggtctgttttgttcactgctgaatcctcagcacctaaaacactgcctgggcacatggtaggagctcaataaatatcttaagtgaatgaaataaactcgtatcaggccccacccctttccctcaaccatttcctcaccatttccggaaggcatattctaagtaggaggccacgaaacgggcatgaaactcagcagcatatttggtgtcataaatgcctgctgggaacatctcacacaggtcagcggtgaaggttcccagactctcagggaggtgtgcatagaagttctggtacaggaacaccaagtctataaggccattgtgtagcaccaggggccggcgggctcggattagctccaggaatagggtccgtactgactggctctggctctcatcaccctagatgaaagtaaaggggtcaatgaggaggacagagtcccccagggagcctcttctgctgggcacttatcccagacttccccacttggaacgctctctctctaccttacccaatgctgcccaccctcctcataccagtcttgtttcccaagccctgtcactagtgattccccatactccctaagaagcagattctccccagacatccagcctagggtaggaagaaataaagtcacagaaagggcagactcaaggctagggaggctagaggcctaccttgtcattgcccttatggtaggggatgccttgggcatactgctggttgaagttgaagccatgctgtatcaggaactgcacagactttggttctatgacatactcctccatgcacagcagagtgagattgaacacttgagccagataggaatgttcaccctgggagaaagagaagtctgctatatcaagatttcagagagccaagctaggaggatgcaaaagcttaagaatgatacaatggactctggggactcaggggggaaaggatggaggcaggtgagggataaaagactacgcattgggcacagtgtacactgggtgataggtgcaccaaaatctcagaaattgccactaaagaacttactcatttaaccaaacaccacctgttccccataaacctattcaaataaaaaaaaaaaaactatcaagtcaaaaaaaaagatttgggagagaaatgcttcctatctgatgttccctagaatctctctaccctccaccccacagccacacctaggattggggtgagatcagctcataccttgtctggctgccgcttgaagcaggcgaggcccagggaaaggatagaacgggtcctggcagcatgacacacggccttgtaacgttcctcaatgcaccttggggttgggtatgggggttgctgtggctaggagttagccttatgaaggacccaaaccacccaggtctgtgacccccccactccacagttgagggctggcactaaagagaaaagggcttatacttactggttcagcaaactcttcctgtccccaagcccactcagctcctgtgggtaggtaaagggagagttgtgacaggcctctagcaccagccccttcacaaccacctgccctccttgtttcccaactctcaccgtgtccacagccacgaaattagctgtctttatggctagcaggagggatggccacatctccttgaagttgttgctttgcacatccactacgggaacctggactactagctcctccccagatgttgtgcttttgctgacaccacctgggggttaggagggtgatggatgttcatgcttaaggaaagagcccaggggaacagacaccaagctaggccacggtgatggtggtaaggggggtagtttccattggtagcttttcccacaagcctttgtaacccacgtgttctacacacaggccttggagtggagaatgccctgaatttggggagaggaagcctgagtcttctactggcttgtatgagcctgggtaaattacttcccacctcgctttcacaatctgtagaggagaaagttggactagacgacctttgattcttttttcccatgtcctgcaggaaacattttgtagggcttgaggatctcagctcccttaatatcccacagggatccatactactgttctcatggtgccccagcgccacaagcaacagctcccagtaagccccagagcctggcagtgccccacaccagagctcccaatacgtcctaccttcctttggatcacaacgctcaatccactccactgaactgaatcacaactattactactaaccgttatgagctccagactacatctcccgccatgcctccatcagccccatgctcccaacgctccaggcttttgcagccggagccgcggtgtacaacggaacttgtagtctcctcgtggctagttcaggcggaaggagcagtcctctgaagcttgaggagcctctagaactatgagcccgaggccttcccctctcccagagcgcagaggctttgaaggctacctctgggaagccgctcaccgtcggaagctgcgggagctgaaactgcgccatcgtcactgtcggcggccatgacaccgctcgtctcccgcctgagtcgtctgtgggtacgctggacttgcggtccgtctcctggcgcggttcaggcagtcggggatggggcggggtctcgccgtcgggtcgccgatgggtcgaacttccgttcagacgtcccgggtccggcgcggggaaggcagcctggcgcgcgctaattgcctattggcctgtgctgccggctcgcagcccgggtggacccgagccacgccccctggagtgcgccggaaagccgggcgcgctagagctcgcgggaggtaatctttctctcctgctctcgcggcgggaacgcggggcctccgtgttctgctgtcttcatcagcgtgggccgcgggtagggggtagtggggtggctgggtttgggctttccagagaaggtgacgctgcctgagctgagcttaaagcacgcccaggagttagactaggagagggtcgtgtgggggaaagaagggcgttctgggcatcggtaaattcccagagaggatggagagctcagtgatctccagaaagtgaaagaggcggggagtgggccatcggaggaggctgcccagggtgtaagagcgaccgattggtagggaagcttttgtaataatccaatcaagtgataatgtgaacttgaattaaggctggcagtatggatggcgaggaagggacaaattgtgaagcagctaggcggtatagtcgacctagagggtgattgaatttgaaagaggttcctaggccgggcgcggtggctcacgcctgtaatcccagcactttgggaggccgaggcgggcggattacctgaggtccggagttcaaaaccagcctggccaacatggtgaaaccccgtctctactaaaagtacaaaaaaaattagctgggtatggtgcgggcgcctgtaatcccactacttgggaggctgaggcaggagaatcgcttgaacctgggaggcagaggttgcggtgagccgagatcacgccattttgcacttcagcctaggcaacaagagcgaaactccgtctcaaaaaaaaaaaaaaaaaaaaaattcctattggagactagtccctccgtaaacactacgattcccatccacctctgccttccagtgctcctttgttactcattgtttatagttaatcttcagcttctctcaactgagcccatttcatcattattcagaactgcttgggccgggcgcagtggcttatggcctgtaatcatcttaggaggccaaggtgggaggatcgcttgaccctaggagttcaagactagcctgggcaacatagtgaaaccttgtctctacaaaaagaaaattaaaaattagttgggcatggtggtgcgcacctgtagtcccagctacaggaggctgaggtgagaggatggcttgagcccaggaggtcgaggctgcagtgagccatgttcttattgcactccagcctgagtggcagagcagcaaagtgagggacacactgtctctaaaaacaaaacaaaacaaaacaaaaaaacaaaaataaaaaaactctttggatttctcctatcctaaaaaagggaaactcttttgactatcccccatcccattaattcatttaacaggtatctattgtgtacagtttacctggcactgactttggacacacaccaatcaacaagagaatcagtccttgcactcaagtcgttttttacagtcaaattcaggaagtacacactgatggaaagaatcaaagtaatgtaaaattacattaggtaagagctacaaggcagaaatatgtgataggataagatgaggggacctgatttggacatttcagtcaagacttgaaaaatgataaggtgttaggtaaaagcataaaagagtccaaacagaggaaatggattgtgtgaggccccaaggtgggcagacacacttgaggtgtttaagcaactaaattcagtcaaccttggctagagcatagtgaggggatgaggcggatggtgcccggatcactggacctgcaaggctgtagtaagaggactgccttctaagagcaagggtgtggcagccaaatccctccaatggcctataaggtactttgtgaccctcctctccccacctcatctggtttacttctctgacctcttctaccactcagtcccatctcattccattctaaccacattgacctacttactgtaccacagacataccaggcaccctccttggggcctttgcactcacttagaatgctttgggtctaccttgaccacagtctttaaaattgcaacattaaaccccaccttggcactcttttttttcccctcttggtctaatttttgctttttatgctaatatttatcacctaacatcttatggaatttacttatgttcattattccttttctgtccccattagaatataagctccctgagggcaggaacttttgatgttttatttactgaagtatgccaagtgcctaaaactgcttggcacatattagggggctctataaatatttgctcaatctttttttttctttaagagacaaggtcttgctgagcccagggtggagtgcagtggcacaatcatagctcactgcagcctcgaccttctgggctcaagctgttcttcacttcagcctccagagtagcaggattacagtgttgagccaccacaaccagcttgctcaagaatttaatgacccatagtaaaggcctacagtatttaaaaaagaaagaaaaaggaaaaaaggaaggaaggaaagagggagggagaaaaaaagagaaaagaaagaaaataaaagaatataatggggtgtcaccaggcgccgtggctcatgcctgtatcccagcactttgggaggccgaggcgggttgattgcttgagctctggaggtggagactagcctgggcaacatggtgaaaccctgtctctaacaaaaatacaaaaattagctggatgtggtggtggtgtgcgcctgtggtcccagctgcttggagttggggtggggtattggggtgggaggattgcttgagccgaggaagcagaggttgcagtgagccaagatcacaccactgcactcca

SEQ ID NO: 97320 - DNA, 119519 bp, Homo sapiens
  misc_feature (1)...(119519): n = A,T,C or G
cccctgctctgatctgacaactcctgctgggttgaccccatctctgaccctggcctgccccagttttcaggctcactgctccagactgatatctcacatcatgacagctcgaggcaggacaatatttgtatcagccaatattggaatcaaaataccatctcttctaatgatgtagtggtaaatggaaattcccgtcaaaacagctgtgactttgagagtggaattcagatatcttaaaccaactcagcactgccactgagcatgggatatagaaacagtaagatataaatagcccttggtactaactggagcaatgctctttcattcattgaacaaatggttattgagggctgattccaccatggtttctgtattagcagtggggacaaaaaaagatgaacaagatgttgtctctgccccagggagttccattacgcccaattttgctgttgcacccagagatgatgtttcaaagattaggcaattaattagagcaaggagaagaatggctacaggattgcacttttagagagggcatgtttctaactttgcccaaggcttcaaagaccctcaaatactggaccaacctatggaagctcagggaagttggtaatgcgcctcagaacacaaacgtttttcaaaaacttagatctgtctatgcaccaaaggttcaggtccagggggattgataaccttcctagtagtcatcaaaagggctcaggtctggactttgacataccttgtttgacataccttgttctgttcctggctgtattctaacttgatgtgtgatcttagacaacccacatccaccctctgggccacagtttcttcagacctcatcttttctctctgcccagctcctcaaagaatatttgataaatgtttgtcgagtgaatgaatgactccccagcgtcccttccagcactggtattgtaagtctgtgagctagacacttctttgggaaagaatggaattggcctagaagagaaagtttggcccattcttgagggacccttggtcacacttcattctgtccgtgtgatccgcccctcatgaacaacctcccctttctcttcattccctcccttcattttccatctcctctccactctaccccaaacatattattgtgggttgtgtcccccaaaaggatatgttcaagtcctagcccccagtccctgtgaatgtgacctatccagaaatagggtctttgcaaatgtaatcaagttaagacaaaatcatactggattggtgtgggccctaatcccatgactggtgtccttataagaagaggtaaatttggatacagatacacagagagaacgccatgtggcaacagaggcagagattggagtgacacatccacaaaccaagtgatgccaaggattgctggcagccactagaaactgggagagaggcatggaacagattttccccctaatgccccaagaaggaaccaaccctgatgacactttgatttcagacttacagcctcctaaactgtatgagattaaacttgggctgttttaagccacccggtttgtgatattttgttagggcacccccagcaaatacatctatccaaggccattatttggaaatcaccctactgatgtatattaacagagccctaaaaagctccaggggtcctaacatctctccaaatgcacactgaagatgagtcatcactgtgtctattgtggatctctgacaccaagaagcctaactctcccatggggaaaggagggaggcctcccacattattattcatcagaaagaggatactagggggtggggaggagagtcaccagctgcttttattcccaccagggacagctcgagaaaaaatggacttttatcgctataaaaggatgtcatagtcacttattttcactcattcagtaaatgtgtatggagcacctactatgcccagtgctggtgggtgaccggaaagagtgtatatatggatgggggaaggatgctaaagaaatgtaacacacattccctgggtcctatgagccaagctggagtaggaggcatgcatgtagcgtggtgggttaatagcatggacttgggaatcagatagtcccagcatagatcctggcttggccactgacttacagtgtgatcttcttgaacatgttacttaatctcccagaggcttaggtttattttgaggattaaataaaacgatgtatatagcacaaggccaggctaagtgctccataaatgttagtaattctcattaatgtagagcaaagatgtttgccagaaacaactcaggaaaagaacaaggtgattttgatgaggtatgacctctgtccagttcaggccctcatcacctcttgccagacactatctgattgagtgctcagaacaactctgggaggaaattagtctcatttcacaaataatgaaactatggctcagagatgtaaaataacttgtccaagttcacagagcaaggtatgtggcagagccaggtgcaaaccaaagttcccaagcacatgtcttcctactcctgggcaacatttatatgccagtcagaagggggttggagggcaggcagcacatcagagagggcctagggaacttcacttaagctgcagtgtcttctatagaaagtacgttgcttgtactggatttatacatttattcttgtttaattagcaaatacatctctagtgtatactatggggtgttctaagcagtttatgttagtaactcatttcatcctaacaagagtctataaaatggacactgttattatttccattttacagatgtggaaattgatatgcagggaggttaagcaagtttcctaacatcacatagatagttgagtagtagaagcaggattcaaatctggatctttgattccagagacaatgctcttaaccagtgttctattctgcggtatctttttgtcagggggtaataggttggctgttggagtgtgcacatatggggaagtggggaggattaacaccacacacacaaacacacacacacacatacacacaccaccctttggtgctattgctgcaataagaccatgagtcatttgaccctctagggtgaatggcaggatgggggctgtttagccctgggattctctgagtcaacaacttctcatccctggcccacttcctgaaaactctttgcgcctcagctttggaaaccttttgagcacaaaaagctcatttcctgtggtcaggaaggatgggatgagttcctgatgacagctcatctccctcattaaggcgctcataaaagtgtttcaaggagcctgacttatgactccactgtttgtcaagatccccttctgcaaggagcaactccagtaatttggtgctaggagatgtgcaagagaaaccagttcctttgagtgcaggaattatttatgatcccaagaagagagaatgtcatttggagagataacaagccttcggcagcacaacaggctgtttaatatgccacgagggaaggaaggcagcttcagaattccaaagctagctaggaagccttgagatattgtgtacatgtgggttgtctgttcctaggaaaactcctgggataataacaaaaatgacattagctatcgattatggagggtttatccttgggccggggcctatatatgaaacgtttatatatatatatatgaaaccgagactttgggaagttaagtgtgtgtatatatatatacacacatacagtaagtcattaaattctcacaacatttctatcctattttacaaatgaggaaattgaggcacagagagtttaagtaactttcccaaggtcatacagtcaatgagtggccaagtcaggatttttaacccaagcaggtctgcttctatgtttgtgctcttaagcaccagtcatgttttaggaggaaattgggttttaaagcagtctaggaaggtgaaatgtacgtatattcaaaattacctttgatgatccctttaaatgtctataaagtttagcacatttagtttgaggcacagagccctgtccagtaatccataaatatattaaagttagagaaccatggccagatgtggtagcttacacctgtgaatcccagagttttgggaagcccaagtaggaagattgcttgaggccagaagttcgagacaaacctgggcaacataacaattacccgggtgttggggtgcatgcctgtagtcacagctactcctcgggaggctgaggcaggaggatcacttgaacccaggagttcaatgttatagtgagctatgatcacaccactgcactccagcctggatgacagagcataattctgtctctaaaaaataaataaataaataaaattagagaatcactgagctaaacaagtctgtacacagatgtttgtgtttttaaactactgtgcctttagctaaactatcaaatccctaaggtaaaaatggaaagacaggcataagccggacgcggtggcttatgcctgtaatcccagcactttgggaggccaaggcgggcagatcacctgaggtcaggagttcgagaccagcctggccaacaaggcgaaaccctgtctctactaaaagtacaaaaattagccgggtgtggtggcagatgcctgtaatcccagctactcaggaggctgagtcaggagaatagcttgaatccagcaggcagaggttgcagtgagccaagatcgcaccattgcactgcagtctgggtgacaagagcgagatcggactcaaaaaaaacaaaaaacaaaaaacagacaaacaaaaaaaaaaacaaaaaacaaaggaaagacagagaattctacagtgccccttacctacctggtgactctattctcttaatatatagcctctgtgaccttaacacatgtcacttgtcacaaggtatatttgctgtgggattaagacgtaacaccatcatatcttgagaggagacaaaattctattagagaagggattctaagtccaatcctaaattaaataaatctgatacaatgagactagctttgggggccagataaacctggatttgaaccctaaatctgctacttactagctgtataacattgggcaatttgcttaacttcccaaagtctcggtttcttaatccatagaatggtcacagtaattccaccatgttgagaagactgaatttaaaagtttctaaagtaatgagcttcagtataaatcagtgtaactcagcattagctcttaatagctgtttgacctaaattatgtcacatggcctctctgagcctcattttctctcctttgtaatacaggcataactattctgcctattaatctcaaaggtcactgtaaggaaacagtaaaacgctgtacaaattatgtacaaggattttctcaactgctcagcacacctgaaattgtgaggaggtgctaggagacccctgctggatttgaaaaaactggcgattgtcccgggtctgaagtcaaaaatgatcttagatctccacttttgccatttaatgttgttgtatgatcttgagcgaatgatctaacctctctgagcctccactttccctactatctagtggggttaataggacagacatcactttctgcagcaaagtgttaaggcacgtggtaagtgctcaataaatgttggctgaatctggatctctctggctgagacaaatctctccatccgcaaggtgggaaaactgcgcgtggtcgccatgtggcgctcaggtagaggagatgctcccgggggcaccgggctccggcacctccccactcccccgcccacccgcccgttgccatggccaccggttcaggctgggagcagcactaaggcgtgttccgcccaatccccgcccttctagggtgaccattggctggagcggccacgtgacgcgcgctggtatgctaatatatggtaatagcgccctcgcccctcctccgcgggcagcgtccgagcagccagcagggtgcgcggcgccgagccgagggggcgggctgaggggcggcccccgggagagagcggccaggtggaggaggagcgcggaggcgaccgcaggtaacgggcgggcgcgtgcgcgctggggccagctcgcggctgacgggcagcgcgcgggggacaccggccgccgcgctgccggcttaaccctttgggcacccagctgtcacggtcgggccggagcgctcggccgggacgggccgcgcggggcggggcattgccatgggcacggacaggcgggcggcaggcggcctgacccctggtccgcggcgtggggcccgcgctgggagcccgcagtcccggccggcgaccggcagagcgcggcgcccccgggccgggaacgcgcagcgaggagggctgcggagagcctggggccgaggcttgccgggaacgggaaccggaacgggaacgggccaaggtcccgtcagtgactcgctttctccggggaccgacccccctcctgcggagaggcccgcgccgcggcagcccgtggtcttgcgcggcctgcgcctgctccgcttgtcccgcagagtgcggtgagacccgggcgtcgggcctgaccggggcgyccgctccccagccgcggcgtgacagcgcagccgctggcactttcggcccagagtcaagcgtggcgtggggggcaccagcagagggaaccgggggttgctggaactgggaggagagaacagtcgtctaaaggaaaagcgggccccaaggttggagaaggagggatgccctagaaaggcgctggtcccttgttttctgtgctgagtgatgacctgacacccatgggaaaaggtcgctgctggacacctggatcgggtctgtcatacacggaggaagcggctgttctacgtgagtgtctaacaaatttcttataaggcgaggtttaaattcatcttcccccctccccaggtctgctacagaagtgtcttcttgtaattatccccctcccccaattcactaagactggtggcagctttaggctcacagtgtaatttagcttttgcgacaatagaaatggtaggaggagagatgcgccactgatactaagcttgccctgggagtttcttggaagtgtggggtaaaaaatatttctatcaccagtggggatgaaaaatcggctaatgcgcccgtgatatcaatagagtttcttttgtgagtctaaagtcgttccttctaaatcaagagaaaatgcgcttacaattgaaaagtaccagaaaccaatttgattttgcaagtgaagtgcaaattccacttccacgttgctcttgatgtcttttatcacccaacaacaaatacttggcatatgccaggcactctgctatgtcttggggatgcaaagatgaataagataattagtccttgtcctgaaagaagtggtaggagaaacaaatgaaattgctagtaaaagtgattaacagcataatagatgtgaatgcaaagggctttggaagcacagaggagggaacaattagctgtctgagaggaccagggaaggctttccagagaacacatttaagcaaggtgttgaaggataaataggagtttaccttgcagagaaaattggaaaggactgaaaaggcagccaaagcgggggaacagcgaatgcagccacataaagaatatgttatctctagggaatggctttctattgtaactatggctttttttccttcctctgtaatgtaactttctaaaagtagcctagaatttcttattcccagcacagttgtccagtgatatttttcttattgttttctcccccatattttcccctcatcagtttttctgagcctcattcctggtctttgtcacccatatcttcccaagtaagggtccatcatgtggaggttgaataggagtagttttcagttgctccaagggagagggcctgaaactgggcataatgtttggcactagaggcagcatctgagaggggcaaatctaaatcatacaaaaagagaatacatgaccataactagggaagcaatgctgaatgtcaaatttgtgagacctggggaaataagtagtaagatcagaagctggaaggatctggattaagagaggattggagtgtgagatgggtcagggcaagtagtccaggattgagaccatgaatcgtgcacatgcagctgagcccactgttgcatggtgccagctgtgcagaacagcggtggatctgccagactgggccaggccctccataggctttccaatgcctcctcctttctgttcaccctccctccttactattatcctcttctcttcatcccagtttccacccatgtctcatgcattgggcttcttttaatgaggtcttagctaacagagcagagaaaatcccattctgctgtcttagcatctatctctagaactataaatagtccatttaacctcattagccatcaactagccagcctatttttacttcctgatcatttagaagctgagcaaggttgggcccagagtagcaaagtggacctcatccccaaaactcttctaatatttgaatcagataaaggcctttttgctttgcttagaccacatttatttttagaatggattatggtgagtttttggcaaatttcctgttttgaattatattacagatcaagtcgtgtaaagaaggtgtcactggggtgacatgcttaatacggtctgctaagattgatgatactgtaagtgctggaaaatcatgggcggtatttaagcaatcttctcagtcagtgtatttactgaacacctgcttgtgtgcaaatactatcctgtatttgtgatgtggaggagacaggaaaatgagagtrgtggtgtagtatgggggttattctcagctaaacaaagatttggatcccagttctaccaggtacttgctacatgactttgacttcagtttcttcatctgtaataatgccacctacccaatatagttgtgaggactaaatgaaatcacaaatgtatagcagtcatttagtacctttttgagatgcttaatgcgtggtattataggagttgagaaaagaaaaaaaatggtgataattgaagccatatgattagctgagttcactgctggtaacagcatagaaatagaatagaggatgaaggactgaagcttgaagatacatcccacatttagggagggagggagaaggcatggagtccgtatggtagaaaataagaaaagaagcaagagaaccatctaatgtatttatccaacaaatgcattctattcaccaccatttgttgtgtacctgacagatgccaaggccagttagacacgctattaaccatgagagtgtagtatcacagaagtcaagagaagaaaaagttttgagctgcagaaattygtcagcagtttgaaattgtacagaaagagtgggaaacattcattatacttagtaaacagaaggtcattggtaactttttgaaaatgatagcttcagtagagtggcgggggtggccatggggatatgaaaagccacatgagagagaactgtggcatgagatgccgataagaagtggagacagcatgcggatcaccttttgtatgtttggcaatgaaaggaagaaaagaaatagaaaagtgattagtgaaggcagcacagtcaagcggaagattaattttccctgtctgcttcattattttcgttgacctaaaatattattctttttmtttcatatccttaatagcaagtcagcagttcatttcttaaacttactgctttgataactacctgaatgtttcactgaacagtaatagtgtagctgtcgtttattgagtgctcactatgtgctaggcatcgtgctaagctctttgtatacattctgttcattatcccatttaatcttcccagcaccagattataaccacacaacctcttggcagcacggaaagactaagtaaattgccagaggtcacatagctaatgagtggcacagatgggatttggatccagctcagactctaaagctttcctgaaggatcatgctatactgtctctgaagtcagggccagctttgtgggtatgcagcctgtgcagtctcccagggccctgtgtttagaggggccccatgcttggtttaatactctcttgttgctgtcttgaaattcttaatgatttttaacaagggggttctacattttcattttgcaccaggccccacaaattatatacccagttctgcctgaaggtatctgtactacctcctgagggtatctgtactacctcctgaaggtaggaaagcattttgtgctgtggcctttggtttgggtaggtggcctaagtccttgctatgtcatgctgcacaatcacactttcctatggtcccctcattttggactctgtgagtttgctggtgtgaagggcaaaaggaaatgcccagtcaatatgaagagaatagagaataaagaggcaaggaattgcttacttagactgacttctggaaactcatccaccatgttttgagggtattactggagagagttatagtcctgatgctattgttactcccagtttaaatacaacacaagttcatttctattccttttgtagtcaggtatacccatttgttcatgggaagatatggagaccatttttcaacgtactgaaacagaaattggagtggaacaggtacactacaacttgtctgccctcatctggtgcctttttaaccacgttgatgccaccctttgaccctcaaaccatggaccccccccagcagctttgaaccccactggttgccaccattgtctggaatgcttctgttctgtcctgcctttgttgcttactctgttccttcatctacccacatgaatcatgaaaaacagaaacttctattttctctcatttttggctttaggaaagaaataggaaagtgattagtgaactgagaaccaattaggtttttctgggtttcatggttatggttctctcagaaacaatttttactcatcctcttgctcctctcacttctggtctctctgagtaatgatttgaccaagtcctgacatcacttgacacttaccacttgaccaagtcctacgccaaccaacctggattcctttgtgggggaaatcagacaagactgagattgtgttgcctcctcccattacctgtctcatccccgttcagagtgtttgttctcattttctatgcccaacatggaccaggtaagcctaagaaaacgtgagaagaaaaatatgaagagatgtccaatataaactgcagtatacatcatgaaacacagtttacatggctgggctgggtcttctccatagtctcctagttatgctgtggcatggtctccataaggcactgtagtagttatccactgctgtgtaacaaattaccccaacatttaccagcttaaaacaaaattttctacttatcttttaagactcaattcaagcattacctctcagaaggcatttcccagcttgctttttaagaattagtaatcttcctctttgatatttcttcgtacttyagcatctcattatagcatttaccacattgttataattgctagggaccatgtctttttcatacccttaacttcagttcctaaaactatttcttgaatgtcacagatgctcagtaaatggttgttaaaagagcttaagaataactcatacctttatcggctttcactttattctttataaaacgtaggtatattgcaaagtatccagccttgtttcctgtgataggctcatatatcgttgttgaaggttaaatgtaaagaaacgttgtatatgtccaagactgcttgacttgccaacttatctactccagtgaagacttcttgaatttatctttatctataggtctctgtgccattcctagtctgaaaccaattctggcccttataggaaattatacagtgagcacccctagtccaaagatacttggttcaataataaaatcaacatttgttcactattcagatatttgactcttaaattttatgagggtacatctgtgtctggcttattcactgctcttttcccgacaccatgccctagtagctgcacagcaaathgtgaatgaattaatgaaactcaattcttgataattcatgtcccattcctgttatccaggtcctgacctctgatcacccagaatcttaggcctgattcatcatttcatgtracccagactttttgttttggtccttgacttttatcttccagggccttattatggctggataagaatctgactccttgcttactcagaactaaagtatctctttgtttcttgatcgtcctaactaataatataggccagatgcccttagaaaaatattattttctctacctgaagccagaaacattccgaatacatattaaatgtatttaaaaatatttaaactgaagataattacattcaaatttctaaagaaagtgaacaggccctttgagaaacaagttttgggcagagaccagcgtctaaaattttgtgagtctattagaatgattaacttgtaagcttcagcaaatcaatgcaaattaatttttatacccaccagtgaatcaaaggaggggagggaattgagtgagtgtgtaaatatggttgctagggaaacttttcctgacagaagagagaacctcgcaggaatttttacaggcccacagaagcaatgtaacctgatctttctctgttctctttctaatgggggaagaaaagatgtagaaaccatgggtacagataaaggtggctttagacttttcaagagacttgaggagtaagttctccagaacaaatgatgactattataaggcacccgttcrttttaaggaaccatctggaaatgaatctatctctaaaatagtattaatgaatcaatctctataatagtattaatttactcaacaaatattcagcactttctttttttttgttttttgttttttttgtttttttttttttgagacggagtctcgttctgtcgacctggctggagtgcagtggtgcaatcttggatcactgcaacctccgcctcccaggttcaagcgattctcctgcctcagcctcccgaatagcaggactacaggtgtgtgccaccatgcccggctaatttttgtatttttggtagagatgtggtttcaccacgttgtccagggtggtgttgaactcctgacctcgtgatctgccctcctcggcctcccatagtgctgggattacaggcatcagtcatgtgcccggccttattcagcactttctaaataaaaaatatgtattttcattgtccagaaggaaatacaattataagcagttgataatttgaaagtactrcattacacctagttcttccaagttttgccccaaattaatttttttagtatagggtaatgtgaacttaattaaatatttaatgctgtttctagaaataaaattctgcttctgtacaaaaagcttaacaggagtgtatcttctgttatttctattctttggttgctgctcctgagaaaaaactaattcattggtccataaagccataccccaaagtagatgttcatctagtgacagtgtcatcttaattttagatatagtaccagtgtaggacacatccgtctccttgatggctaaaatcatgagatccttcttattttagctgtacgggatggatggtttcaggtcttaaaatcttggctgtaaaatgcatttggattgaaatatggaacactgtcccatatctgaagcctaccattcagtgtctccattccttctcttcccacttttattttgttttcagttacaaataaggcttgcatttgtttgaaaaagtatatactttttaagccctttaatacttcaatgtgctagagttatgttccaagcacagtatcttccgctggcctgcagagaggcagttggaggtaagggttcactgcagggacactagagccataatgctggggttccagccttgcctctgccactcatgagctgtgaacttcccagccgccttccatctgtactctctctgctctagtcttcttgggtatagtgggggagaatcacagtccctacctcgaagaattatagaattaaacaggttaataatgtgaggtacataataagaattgtgtaggttttacctttctttatttcctggggcctcctagatagaattgatatttgaaggaagagaaagttgagatgtataaaggtataataacttgcctaaagtatacagtaaatttaggctcagactattctcattcttaaattaccaaggaagttttccattccgcctagtaagagagagagaaaatgagaattagaataagagggcagaacttggcttttagggcattttgaaatagaggttacttcacataagatggtgacactaaagcccgtgaaaatgaaattgctttctcaaaggcagagtattagaaatggtttggaataatataagtagggaatgtggtactaggtcaggcccattgtataaccagccaaaaatttggtttctgatcatgataacaaagctcagttggaagggtgtattgtagcttcaagccatgacaaaatcttctgattacagggatgggcttgcccatccttttagtatccttctgtctttgtttacctgagtatttaagctttatttctatttttggcctctacaatcatatttatttattcaacaaacatttaataagcttctatacctcactctagcagctggggggattcaaagatgaggagaacccaggccaggtactacagaggtttctaaagaaagaaagacatggaaacattaattatggtattgtacttagtaccataatagaagtatggtccctgcttagaaatgttaggaaaagttttctggagaaagtgacagggtaagaggragcttctcagccagacagaagcaatgtctgcaaaggtgaggttgtatttgcttgagagaacacatatggggggacctccaaacaacctttcaagaccacagcagaacatttgaggagggtcattgcagaaataaggctgaaaagtaggctggcatcaaatcacaaaaggcttggtttaccaggctaaggaatttggactttatggtggaggccatagggagctgttaaagcccttaggagtaacgagatcagatccgccttttagaaagaacacatcagcaatgtgaagsgtggtttgggcaggagtgagaccagagacggaatcatgcagttagcgaagaacctttaatgagccttctcgtctactgccagtatgtttactcttgaatatatatgtttgttcattcaaccccagtttgttaatggcatgtgagatactagactcactgctggaaatactgagaaacaacacaccacccatgtcttggagttgcttgcagtgttttatttgtcctaaacacaaacgttcttgagttttcagcttctcttgtctatcctctgtttcatctcagtcccgggactggggttctggtatgttgaaatgagctcatttgggtttatcttgtctgtactcctcatgacatcacccataactccttcctttcagccttcatatttccagagtgcaaagttctaatcatttaataagttcctgtagagaatgcatccattttacatccctttacttagacttctgctatttaaattcttattttttttcttatttcccccaacctcaagtactgtgtgtcagcgctcttagtcacacactttgccctacttcctgtcctttactagcttacaaagtcccktctttattcctcttttcctgtttccccaaggatatgcataccagaattgtagactacattattttctttgcttttctcatgtgggtgcctttcccccatgagatcacagtccccagaggaatagctcctgacaataaagaaactgaagataagacmtttctcctgaaatagaagagatggagttgtattagaaacggtagtgtttattgcataataataattggaattacaacttattgagtgctcatagatgataattgtcatgctagagcataacgttaattcttatttaatcctcacagctactctgaggtaagtactcatgtcatttccatcttacagatgaagaaacaggctcaaagaggtgaaaatagtctgggcacagtggcttacacctgtaaacacagcacgttgggaggctgaggcaggaggatcacttgagctcaagagttcgagactaatctgggcaacgtggcaagaccttgtctctacaaaaaaatttaaaaataagccaggtgtggtagtatgcacctgtggtctcagctactcaggaagctgaggtgggaggatcacttgagcccaagaggtcaaggttgcagtgaactatgatcgtgccaccacactccagcctgggtgacaaaaaggaaagaaaaaagaaaaaaaaaagaggtgaaataacttgtccgagttcaaatcatgaatacattagccagattttgaactgaggactgactctagaatggaagttcttcattgctgtgtaatgtagggtgaacatgcaggctttgagttccagtacctgtggtcattaagagtgagctgatttttttcaatcttcctttagttataactgccatcaccaagtctagtttctctttatcttcttgattcttactagcgaccttagtaagctgttttatttgaatcataaggtctaggcgcgtttccctcccccaaagtttgtgatcagtttcataattgtatagatttgagtttgtatgttagcactattgtggtgttatagttcattgtagatacaatgcttacagtttggggacctatctctaggcgaatggattgtgccttgaaacatggttgcataacaggtttgttgtagagagagctaaatatcctttaaaaataaatgttgtttatgtaataatttccacaccacatcagccttccctagtgataaatagtaggctgaataatgaccacccaaatatattagctccttatccccagaacttgtaaatattaccttataaggaaaaggaatatttgcagatgtgattaaattaaggatcttgacatgggggggttatatctgggtgggcgctaaatacaatcacaagtgtccttataagagagaggtggccgggcgcggtggctcacgcctgtaatcccagcactttgggaggccgaggcgggtggatcacgaggtcaggagatcgagaccatcctggctaacacggtgaaaccccgtctctactaaaaatacaaaaaattagccgggcgtggtagcgggcgcctatagtcccagctactcgggaggctgaggcaggagaatggcatgaacccgggaggtggagcttgcagtgagctgagatcgcgccactgcactccagcctgggcgacagagcgagactccgtctcaaaaaaaataagaaagagagagaggcagaaggagacacagacaaggtggagacaatggacatggaggttatatctgggtgggccctaaatacaatcacaagtgtccttagagaggcagaggaagacacagacaacatggagacaatgtaaacacagaggcaaagagtggatagattcttccgtagaacctcctgagggagagcacagcctgctgaccccttgatttccacccagtgaagctaatattgaacttcaggcctccagaactgtgagagaataagtttctgctgttttaagccactaagtttgtcatcgtttttatggcagcaacaagggactaaacaatgagggtagtcacttatcatactgcttagctcattttgagagaaaatattatgacttartaaagacaacaaccaactaatataacatgtataataataatttcggcaaacatgtatgtagtctttactatgtgccaggcactggtgtaagcatttgaaatgtatttactcatttattcttcatagcaactcccataatgggggttctgttttaaatgggaagtgcacagagaagttaggtaacttggccaaagtgatgcagttagtaaataatggggccaggacctgaaccaaggcagacagtttgatttcaaaaggccrtgctattaaacactatgctatacagggctttacactgggcaagcattccacaaaggacaaagtgacagtgtctaaagtcttttcaatcttctagcctcttctccatgttttctgctgtgttcactgtttttacccttttccattaggtagcctttatctttaatattttttctcttctaaatatccttgtgtagttttggtatcagggtaattctggcctcatgaaatgagtaggtaggagtttctttttctgttttccagaagagtttatatagtattggcattgtttcttttttttgaatatttaatggaattcaccaataaagccatctgtgcctggagttatctttgtgaatagattttaagccaagaattcagctactttaatagctatagggctattcaggttatctatatcttcttgagtgagctctgatagtttgtgtctttcaaagaatttgtccatttcacctaagttgtttaagttattggtataaagtagttcataatattgtttcattatccttttcatgtctataagatttctttcattcctatcactggtgatttgtgtcctctttctctctctctcactctctttctctctcttgctcttgctcctttttctgatcaatctggctagaggtttatcaattgtattgatcttttcaaagagccagcttttcatttcatcaattttctctctagtttttctgtgttctatttcattgttttccactctttattatttccttccttttgtttgctttgcattttatttactcttctttctctaacaaaatagaagctgaggttaatgatttgagatctttcttcttctctaacactagtgttttaatgctgtaaaatttcctttaagtactactttagctatatcctacagattttgatacgtaatgtttttgttttcactaggtttaaaatattttctaattttccttaggatttcttctttgacccatgagttattttgaagtgcattgtttggttttcaaatattagagattttcctaatggctttctgttattgctttcgagtataattctgttatgcttagagaatatgctttatatgatttcagttctcttaaatttattgagacttattttatggcccagaatgtatattctgttgtcattaggtggaatgttctatatatctaaattaggtttgtagtgttgttcaagtcttttatatatgtattaatttttacatctacttgtgtcatcaattactaagagaggagtattgaagtctccaactataatggtaaacttgtgttttcctccttttagtgccatcagttcttgctttacttgttttgaaactctgttactaggtacatacacatttaggattgtgtgttctcttgatgaactgcccctttatcattataagattaccttcttttttctccaatattccttcctcagtctattttgtctgatattgatataatcattgcagctttcttatggttattgtttgcatggtgtatcttttccaccattttacttttagccaatatatgtctttatttttaaagtatgtttctgtagaaagcatatctttggtttttaatccaatataaaaatttctgctttttaattgggatgtgtaaacaatttacatttactataattatcgggatagctggccttgaattgacattcttgctgtttgttttctatttgtcctatctgttctttgttcctttttttctcttttttttggcctcattttggattgtttgagtttcttaatcttgaccccatattgtccttgttattgcattattgcttatgtgtctttgttttatcttttcttagtatttgtcctcctgtttataacatatgtctttaacttatccctrtctatctccaaataatatatatcactttatatatattagagaaacattaaaactatatacttccatttttcccttctggtcctttgagttattgtcatgtattttatttaacatgttttattattactttaagtagtcaattatcttttaaagatatgtaaaaaatgaggaaacgtgacctttatatttactcacctatttactgtttcagatgtcctttttattcctttgtgtttctcttatcaatttctttagactaaataactttctttaatatttttgatagtgcagttatactggaattatttatttcagtgtttgtctgaaaagttctattttacctttgagagatatttttactaggtaaagaattctaggttaatagtttcttccaggactttaaagatgtctatccattgcctactggcttgcatagtttatgagaagaaatctgctgtaattctttttttttttttttttttcttttttttgagacagaatctcactctgttgcccaggctggagtgcagtggcgtgatctcggctcactgcaacctctgcctcctgggttcacgccattttcctgcctcagcctcccgagtagctgggactacaggtgcctgccaccatgcctggctaatttttttttttttttgtatttttagtagagacggggtttcaccgtgttagccaggatggtctcaatctcctgacctcgtgatccacccgcctcagcttcccaaagtgctaggattacaggcgtgagccactgctcctggccagaaatctgctgtaattcttatctatgttgctgtaatgtcttttttctctggttacttttaaggttttcttttcatcacttcagcagttttattatgatgttccttggagtcactttctgtatattatgcttggatttatggatttcatcaaatttggaaaacttttagctatggtttcttcaaatatttttttatgttcccttcctccccacatctcttttccttctggagctccaatttcatgaatattagattgcttgatattgtcccacaggtcactgatgctctgttcatttgtattcagtctcctgtgtctctgtgcctcattttgggtaatttctaattctgtgtcttcaagttcactgatctttacttctgaagtttacaatctgttgttaatctcatccagtctatttttggtttcagatgttgtattcttagtctctaaaagtttaatttatgtcttttttacactttccctttctcttgtcctcatgttcatgttttcctccacttcttgaacatgtggaacatatttagtaaaagtattttaatatacttgtttgctagttctttcatccatgtcatttctgaatacgtttttacttatttattttttcttctggctaaaagtctgatcttcccatttctttgcatgcctggtaattttttatgggggactaggtattgttaactttatattcttgatgattaaatttcattatatttctttaattagtgttggcttttattttggatgcagttatgttacctaggattactttgatcctttcaaacgttgcttctaagctttattatggtgggtccagagcagccgttggtctagaaccaatttagccctcactactttgtcaatattcttctgggggttgtatctaattccttgtctattacaaggtctttctgctcagatagatgtgaacacaaactatttacagccctgtaagaactctgggaatggttctgcctgctcccttccagtagtcttgagtagtttcctatcatgcatgtgcagaccagtgcttagtcaaagactctagggaggcctgtcratagaactccagagtgttctatcttcagttctctgtcccacaaattctagtcactttgccctcctggatgtctaatctcagtcacctcgactcggtgagatccattccccctccctgtactgcatccaggaactgtctgtaggcagtaaactggtacactcgtagggctcactttgtgtcccttttcttagcgatcacaggcctgtgttgcctgtcagccaatgtatgaaaaccatttctttctatatttagtccaatttttttagttgcttaaggcaggagagtaaatctggtccctgtttctttaacttctaaatagaagtttcaaacttattttttagagaacttacatattgactactagtagattcctttctttaaagaaattctgtcatttaaaatatggcttgtgaatagttaaaaagtagatctgcatttaaagtaacaaaattctacrtgataaattaaaaacaggatttaggagatttagatcttccccaccttgctatctagcatacaattagagagtaattcattgctattagaatggcagagggttgaaaaggaatttcaaaataaggctaaggcagaccagagtgtgatttactgcagatccatggttgtacagagctgtaaccagttactgaatcttggctataaaccctttaactgccctactgtctatttaaattctttgtcagtgggcttcagtgtttaaatgtttgctttgataaacatcccaatattcaaacaaggaataaaacattcagaaccattgagataaagatcaaaacaatagtgagaacatctgacaaatgctaactttttaaactgtagaagcctccactaactacagactgtctgaccccagaattaggattttgctccctgtccttgctggccacactgaaaataagtgaggctaattacaataatctatcctggggcaggttatttggggcaataaatcaacctcaactgttaacctttcttgtgtgtgtgtgtgtgtgtgtgtgtgtgtgtgtgtgtgtgtgtgwgacagagagagagaatacatatgtaaacatgatgcatgggcacttatttatttagtatcttatatatgccaggcattttaatcttcataacagccctgccaactcagtttttagatatacatttaagggatttaatgaacaagctgagatctagagatactaaatgatgagttcaagtttttccattataccatgctgtttctcacaatgccatgctgtattaccctcagtagcaccataactcagttgtcagtagaccacaaacacaacattgggtcatccatcttgcagtcatgtactctgggccacaggaggcattcgaagacagagtttgatggataattacagcttttttcattaggaaaataatttgaagttcatggtttacatacagtggatcaaaacaacaataaagcagtgaatacactttgttattatctatataggccagttttactgaaaaagactgatacatccccaataccataccacctgctgctcaaagacaagccttttagtttgaggttgtagtcactattggcaaagtctgactgtgtttgcaactgtcttttaaacttacaatcttcataaagagcttcacttttgagattgttgccattgaatgatttttctgtgactgtttactagctgggcctgaataatctcctgcaccagccactttgcctgcggtctcctttatttcattcatcatgaggaagccacctcaggctcctgttgtcatttctctctgcctatatgtcagtatccagtgtcagtggactggctatatttcaatacttcagtgttagatagtagccctaataaatgcttgtcaatttagcaacagtagttatccaattatttctgttgtcgtggtacagacaacgttggttataactacttaaaagtccaggccgggcacagtggctcacacctgtaatcccagcactttgggaggccgaggcggggggatcatctgaggtcaggagttcgagaccagcctggccaatgtggtaaaaccccatttctaccaaaaatayaaaaattagccaagtgtggtggcacatgcctataatcccagctacttgggaggctgaggcaggagaatcacttgaaccctggaggcagaggctgcagtgagctgagattgtgccactgcactccagcctgggtgacaagagcgagactccatctcaaaacaaacaaacaaaaacaaacaaacaaamaaaaaacaagtccatatgtaaggtccctgatgataaccctgagtttcctataaagacaaaaatgctgccagcctttactttggcttgtgactaattgggcattagtgccttacttttgaaatctatgtcaagcttttaattctgtttctgaatttttcaataaccatgctatccttcaattacaagatttatgctcctgatgcatcatcaatactctttcaagttttgttttctagtattagagataagttgcaccgaacttgagaatttgccacttattagggtaggggctagatagggtacatatatctggcactgtattagtgaggggttttttcagtgtgaaatgtgctggcctgtgcaaggattaaatctataactttggttttattagggcaatcagtgatcatgctttctatatacagaatgaggattcaagattcaggtattgtttatttattcctcttcaccaaagtttagggtaaagctggtggtaattgaatagaaaaggaaaagtgatgtttagtgtttgaatgcacgcgcacgcacgtgtgtgtgtatttgtacagtaacactttgatttttaagttatcatataattaatagttaagagaaaggctccagggccaatctaactagaattctggctcttccagttactaattataattgtaaccctggtcgagttacttaacctgtctgtgttaatgtatcttgtgacctcgatcaatttactttagttctaacagattttttgtggattccttaggattttttacaaacacaattatgttgtttgcaaatacagttttacttcttcctttctaatctttaaacctttttttacctgccttattgcactgcctagtacctccagtatgatattgaatagacaattgaatggccattctcaatcttagggggaaagcattcaatctttcccttaataaatatgatgttagctgtaggtttttgttagatatcctttaagagattgaggaagttttcttctatcctggtttgttgtgaattgttatgatggttgagtattgaattttgtcaaatgattttcctttgtctataaagatgatcaggccgggtgcgaatggctcatgcctgtaatcccagcactttgggaggccgaggcaggcagatcatgaggacaggagatggagaccatcctggccaacatggtgaaaccccacctctcctaaaatacaaaaaattagctgggcgtggtggcgcgcacctctagtcccagctactcgggaggctgaggcaggggaattgctggaacccagaaggcagaagtcacagtgagccgagatcatgccactgcactccagcctggtgacagagcaagactccgtctcaaaaaaataaaaaaataaaactaaaagatgatcatatgatcactttctttattaatatgctgatttacattgctagatttttttatgttaaactttgccttaatataacaacaacaacaacaaaaaaaaaaaacagagatgttccagtatgtttctctgtgcatttttggggaactagcagtatcttaaggtagtttagaatctctaggtttattctctagttgtctctcaatttaaagactaaatgttaatgatataataatcaacagcaatatttcttctgggagagaacaaatgattatattgagatttcttgattagtgatttaagtatattttagtgaaatataaaccagtacaaggagaatatcatatttatactagctttcagattatttatttctcccataattcacagaaaaataattttaattcttttgagaacttcctttttaaagaaatgaatatattgggtaatgaagctggctggctaaataagacatataattatcgaaatgtaattcattccatatttagaaattattttgcactagtaatcataataaatggaagtctccaggtgaagaaagacttggttcttcattgggtgataaacaaaacaaggacccccatagttagtgccttgatttatcatgcttgctatttaactgtgaccataatatgatgtttgttctctttatataaaggaaggtttttgttgtttgttactgagtatttccagtcctgtttaattataatggctactatttttgtaaagaaggtattttaaaatcaatgcttaaatgtagtaaaaatgattcattcccccaatgccagttccagtcctacaaatggaaatagcactgaggaggacatcagctgatttaatcttccattaaggttttatttgcatagcccttgatccctaaaggcttagtctgcccattgcctcaacaaaccctttgtacaaataaaattgaatcaagcagatgagtgagtaagtgtgtctggatagcagccctggaatatcgctacccttctcatttgcaaagctacatttcccagtcctttctgcatacacacaggctgtggggtcaaacccgattaggtgctctcatcaactcttttacaggattggccttttcagcttcgagaagcagcatgacctgttccattcagcggctgttcttagcccattctttagctctgtctgttacgttcccatggagtgaggctctggcttctcctgcacatgctccctgagagagtcattcacaaagacaatctgctctccaaggaaaagcagcaaagccagctgaggaaagagatgatggatcatgccaaccagaggggaagagtaaggcatattaaaaatgacatcagtgcagtaatcccacagggattaatacaaattgaactggtatgtttttcctggaaattccagctcattccaggcattcattttttccataaaggagtgggggcaggtttgattctctccatgtgacaagcaattcagcagcagaggcaattaagccttattgaccggcactatacaaaactactaaatattcaacaaacagaccttccagagaaaatacatgaggtcattatagtaatagtttcccctttgggtattcttcaaaatatttttatttagtttgagtgtgagagataatataatgcctataaggatagtttaaaatggtagaaaactatcacgttttaagtatgtgacattctgttagcattatgtgaataaatttctgtctctctgcaatcagttcagttcaccaaatatatattatgagacacctatccaatgatggatgaatgttactcttctggtggctaaaaacctatgtatggaccaagtgggacagactatagaattggaagaatgtggacttctctgccaaccagtgatagatagattgggcctggaaagggctggtctgaggtggcctattagatatgggaactctagtttattttttaataatgaatgttatttttattacaaaagtatatattttcattatagaagatttkggggagaggaataagcatagtcaagaaaaaacctgttatcctagcaccccgaagtaatgctgttaatgttttgttttatatccttctagttttttaaatttatgagtgcatacattttcttatttaaaaaaagatcttgttacacactctttcttaaactgattttatcaccttactatgaacctttttgtgtccttaaatatgatattctattatatgaaagtacaattactaatccttaccaatgggattttaaatcttcaatttcccctcttgtaatgaccactcaggtagctgaatctttgtgaacccctgggattattttaaagataaattaataaacatggaattactgggttaaaacctatgtaaaatactatggctctagatgtatattttttaaatataccccaatttatatgtctttcagcagtgagtatatgagaaaatttgacttctaagctactcatgattgaacagtatcaaactctgtatttgtatttacttacttgtatattcttgcactctgattaagttctcaaacttcatgtaaagtagttctcattgttctcagtattcaactagtggtctacaacaagtaggtgggagatggggaaagagatgaattcctgagagtctggttctctcctggggctctcaagccctgggatggtaacaaggaagtcaagaagactggcattttatctttttgtcccaggtcctagagaaaggatgagagatatacttaaaacctactaaaaacaggccaggcgcggtggctcatgcctgtaatcccagcactttggggggccgaggcaggcagatcacaaggttaggagttcgagaccagcctggccaacatggtgaaaccccgtctctactaaaaaaacaaacaaaaaaattagccggttatggtggcacatgcctgtagtcccagctactcaggaagcagaggcaagagaatcgcttgaatctgggaggcggaggttgcagtgagccgagatcgtcccactgcactccagcctgggtgacagagcgagacttcatctcaaaacaaaaacaaacaaaaacaaaacaaaacaaaaaaactactaaaaacagaaagggtatctaatcttcaagagcttactgtctagtcaggagaaagaacatacatccatgtgaagcaaactagtgcagctccatttgaagcaaactagtgcaaataaattcatacaattcaaactattttcttattggttgatgatttaaatatgttattctttttgcttgtgaacagattctgacgtgatgtgacaaaaatagactaactgattcactccctctccagctttccatcacacttaatccagaaactttcacttccagtaatggcgagctagataattaggatgacaaggacaacttaaaaaactgagagaaataaattttttaaattttcttacatgtactaaaaaggtaacaaaataataaaataggcttgggccaaaatctagggtaaaacaagaacccacgaggtaaactcaccattcaaagcctctttctcccccctcacaccttgtttgtgctctagacccacatgatcagggacaggccagaaacctgaccacaggtatcaggaatkccagctcctgagaaagctaacctgatgactacttcattgtttttaacttcatctatttctatgaaacacattgattgtaccatttttttaaagtgttaagattattaggtatgtaaatttgctgcaattgtttttaaataaaaatactatctcttagaataatgaattttaaaaatacctctctctctgaaggcatttactagtctgaatgaaatatctgtgtagtcaggctgagtttttggtagtcttataggggaaggaagacaggaatcaaagctgagagcctgcccagggtaagaaatctgataaaccacctccctgtttaatccaggaatctcaagtgctccaccttcaaagtaagagtgaactagaagtaaaccattactggagcagctcaagtttgtgttactcaggtagtccagggaacctcaaacttttgacatagatagactaggatggttccatactagtagtgtcttctggtgcttgacagaagcaaagaaaaatcatttctagagaatggagccattatcttaggacatttattaaccttgaaaatatttattttctagtataatgaccaacagtcaaagataacactttcacagaataacaagataccctgagtagtaaacagcagaaacaacagagtcccacagaaacttcagaaattgcaatcatgagacagactgtaaagtaactatcctgactatgtataaagagatttttaatgagcttgaaaatatctgcaagaagggaatctataaaaagtattgtaacagattgttttaaaactaaatagaacttacaaaagtgaaaaatataaccatcaaaattatgaactcagtgaacatattaatcagtagatcatatacagctgaggtcagaactgaaagatgagtctgaagaaatcatccagagtgtagcagagaagagaaaatgatagatcatatgcaagatagggtaagagacatgcaggtcagaataagaatacctactaacatacccttatggaagtcccagaagataaggaaagagagttttgggacagaggatattggaagagatggtagcagagaattttccttaattgataaaaaacagcaatccacagattaaagaagcctaataaatttattcttctgacaagtagacccaggcagaaggaaaatttatctcagatgggtatcccagaaggaaaattaaaggcattttgaggcaaacaaaaacagagtttgcctctattacatcaaatgtaaatggactaaatgttcccattaaaagacaaagattgtcatactggataaaataatactataactctctgctgtttacagaagacacacctaaaatatgtcagtaagttttcaactgtgggtgattttgccctcaagaagatatttaacagtgtctggacttatttttggttgtcataacctggggaagtgccattgtaaactacagtgcatagaactgcaccccccgccacacacacacaaggaattacgtggccccaatatcacgattggagaaatcctgatgtaagtaaacagaaagttaaaaatgaaaagatagtaaagaaaatatataccaaaagtaagcccaattgctatgttaattatagacaaaattataatgagtcagaaaatacttctagaaataaaagggattacttcaaaataataaatgtccatttaccaggaaaatctaagaatattaaatttatattcatcaaataaaatgacctcaaaatacttaaagcaaaaattccacaactctaaggaaaaagacaaattcattatcaaggtgttttatatttacattcttctctcagcatttgatataaaaagcagacaaaaagccccagtaagaatatgtaagatttgaataacacaattgtcaaatttcactaagggacatatatataacactgtacttaacaactgcagaatattattttcaagcatacatggaaggaacagttataaaagttgactctatactggatcacagagctagtgtcaacaatttcatagaattaaaaccacacataattatgctctctgaccacagtgtattgttagcattcaataagaaaaagatgactagaaataccaatatttggaaattaagcagtacacatatataatccatcacagtggaaattagaaaatattcctgactgataatgaaaaatactatatataaacttttcagtaaataaagctgagcttagaggaaaatttatggctttaaattcatctaaagaagttaggggaaaaaacaacaaattaaatctgaagaaggtagaaggaaagaaataataaagacaagaacaggaattaatgaaatagaaaacacttatagagaggatatacaaagccaaaaggtgattctttttaaagactgataagactgctgccgggtgtagtggttcaygcctgtaatcccagcgctttgggaagctgaggtgggtggatcacttgaggctaggaattcaagacctacctggccaacatgacgaaaccccgtctctactaaaaatacaaaaattagccaggcgtggtggtacatacctgcagtcccagctacttgggaggctgaggcacaagaattgcttgaacccaggaggtggaggttgcagcgagccaagattgcgccactgcattccagcctgggcgacacagagcgagactctgtctccaaaaaagaaaaaaaaaaaaaagactacaaatccttataaagactgattgaggagaaaaaacgaaagacagataaccaaaatcaggaatgaaaaggaagacatcactgccgatcctagaggtattataaagaatacttttttaaataaatgaactccaatttcttactctgggtaaacaaagccctgtctcatctaattcatacattcatctcattttatacagttttctctctcrtctactgtgcagccattaaacatgccaagtttgtttctctcatagggtcttcattaccaactaatgcaaagtaatgcaatgactgtctccttgtctcagatttaaatataacctcctcagaaaggcctttcctgaccactcaatctaagagagcaacctgttattcttcatatcattcaattttaattccttaattagctcatgctatttacttcataattgtttgctccccactccagacataaaacacatcagagtaggatctttatcttgctcatcactctatcccagagtgctcgataaatatttgttgattgaagtaccatcttctgattcagtcacagagaggtaggccatgagggaaataaggaaaaaagtagaaacaagaaataaagaaaaatcagaaacaatttaagaccctattgtgtgcaaaagggaagtggaaagaagagacaagaaaatacataaaggggttaaaagagaggaaaataattagatagtattgctgttgtgttttggaaaaactcttaattagaaggaaaggaactaactttattaagctacctctatgtaggaaaactaaattaccaggtgatgtgggggttttttttgaaagattttatttcaacttacaggcatcaccaaaattattttcctcattttcaaccttttcctaggaagaaaagaaagtgagttattttattctatagatggaaaaacaaaagcctatttgttttaatcaagtaaaattgtcaaggatgactggcagtgccattcactgagaaggaatattagaagaagtgttttggagggaaatcatgagtttcaattttaacaggttaaaatttagatattttgaaatatccaagtagaggtgttgacaagataatgggatacttcactcagaggagaggtctgagctgaagatctaaatctttgatgtatggatggtaattgaagccataggcatagatgtgagtgtctagagagaaagaacagcatatgaaaaaatggggtttcatggatgtatcttaaggagctccaatattcaatggttaggtggtacgagacaagcctttgaaggagactgagaaggaatggtcaggagaatatggtttcatgaaagccaagggtatttactgtttcaaggaaaagaatggtcagcagtgttgaatgctgctgagacaccaaagaaaatgagaattgaaaatgtttattacctttagtgacaytgaagtctctgacctcagtgaaagtaattttagcagagtggagatggaatctgagtcattttaacatccacagtacctttccgtagagtagatatttgatatgatttttcattttctttaccatgaaatgtataattatgcagaagaaagtataatgtatatgtagtatttgaaaaataaagtgaacaacatttatccataacccaacttaggaaacagaactttagaagacacccatatgctcctccctgtttgcatctaccttcttcatctgcccagwtataccactcttaaactgttgtaataagttttcccgccaggtgcagtggctcacgcctgtaatcccagcattttgggaggccaaggcgggtggatcacgaggtcaagagatcgagaccatcctggccaacatggtgaacccctgtctctactaaaaatacaaaaattacctgggcgtggtggtgggtacctgtagtcccagctactcgggaggctgaggcaggagaatctcttgaacctgggaggtggaagttgcagtgagccgagatcacaccactgcacttcagcctggcgacagggtgagactccatctcaaaaaaaaaaaaaaaaaaaaaaagtgggccgggcgcagtggctcacgcctgtaatcccagcactttgggagcctgaggtgggtggatcacgaggtcaggagatcaagaccatcctggctaacacagtgaaaccccatgtctactaaaaataaaaaaataaaaaaaatttaaaaagtcgggcgtggtggcaggcgcctgtagtcccagatactygggaggctgaggcaggagaatggcatgaacccaggaggcgagatcgcgccactgcactccagcctsggccacagagcaagaatccatctcaaaaaaaagagttttcccttgcttttcttttatagttttacaacatatgagtgacttcctaaacaatatactgttatttttacaatatacttttttagttttaactggttttgaactctgtataaatggaattatactgtattcattctgagtcttgcttcttttgttcaacattatctttttgagatttgtctgtgttgatacctgagattgtatgtcattttcactgttgtatagcattccattgaattaacatgccataatgtatttttacattctgcttttgattggtatttgggtcatttccagttttttggttttttgctttaaaaagcaattccaccgtgaacatcattatcatgtcaccttatgaatatgygcaagagtttttctaagataggtgtatagataagaatagaattgctaggccatatcatatgggtatgttcaactctattgtgaaataccaaactgttttctaaagtgattgaatcattttttactcctacccattccatgtgaacataaccattgctctgtatcctccccagtgtttgatattgtcagtctctagaattgttgccaatttcatgagtatgaaattttatcctattgtagttttaatttgcattttcttgattattaataaagtgaagtttttaaatgtctattggccatgtagaaaattcaattcaagtgtgatgcccatttttctgttgtgtcttttacttttgagttataggtatttttaaaatatttttgatgcaaattctctttttgttatgtgtgatagaaatattttttctcagtgtaaggcttgttattatgcctttgacgaacataaattttttcttttaatgtagtcaaatgtatcagtcttttcttgtttaaaatatcctttcctactgtaaagtcattattttgtcctacattttctcctaaaaatcttgtatttttgtctattcctcttaaatatttagtttactttaacttgggaggtttgctgtgaggtgggagatcaatttcatttttctatgtggatgcctggttttcccatactgtttaatgagatgtccagtcctcccctactgacctgataaacccatctgtcatatagcaagtgttcataaatgtgtgggtctattttgggaacttctgtttggttccattaagtggtaaatgtttagcaactagctcttcccactcctttcctawacacaaaaagtcccgatttgtagtatttgctgatttccatggtataaatactcccgcaatgaccagtttcaagcttccaatgtgatatcactaaaatgcggagttggtaagaggtgctaacagttaggggtcaagaatagggtctatccaaaagatagtgctaatgccaaactttcttaactagtagagctcgatatcagggcaattctcacattgtcttctttaggagtgatctgcctattcttggtcttttgcatttccatatatattttagaattaacttataaagcctcttttttttttgagacggagtctggctctgtcgcccaggctggagtgcagtggtgcaatctcggctcactgcaagctccacctcctgggttcacgccattctcctgcctcagcctcccgagtagctgggactacaggtgcctgccaccacacccggctaattttttgtatttttagtggagacggggtttcaccatgttagccaggatggtttggatctcctgaccttttgattcgcctacctcggcctcccaaagtgctaggattacagacgtgagccaccatgcctggcccaagatggatataatttttatgttacaaaaagatttataattgtactggagtctgttaaccttcagacaattcctttaatgcttttatttatttatttatttattatttttaatgtagacaagaatgagatgatgatgcgttgacatacctccttttttactaacacaaagggcagctatctgaagcacattattccaacatggatcttttcagttaataatatatctcagagatctttcctgtcaacatgtacaattcttactctttaatgcttttgtacttactatactattttaactgcttcagagtattcagttatgtgcatatgtatagatgtggatgtgaatgtgtgtgtgtgatagtggttaagagcttgagttctggaaccagactgcctgtcccggaatcctkctctgacaccttctatgtgactttagaacagtttcttaacctctgtgagtctcattttcctcatttataatatggtcaaagtagcaatgcctatgtcatggaattggtgtgaagattaaatgagataattcatgtcaggcattagagcctggctgctacacagtaagtgcttaataaatgttaactgctagcgttttcattcttgcctttgctgctattattactcctagtactgcgctactgataaatacttgatttgtttccaggtttttgctatgacaaacaatgcagtggtgaatatccttgtacatagatcttaaaataacttgggggatgtgtatccctgagtgcaaactcctataaacagaattgttgggtcaaagagtatgcagctaaaaatattgccaaattgccctctaaaacagatattccaaattatattcttaccaattgtataagaagtatattactcaccttacatcagccctccgtattattaaatttctaaatgtttaccaatcttatacttagtttgtcctgcatctctttagatatgaatgagattaaacatccttttataggtttatcactttttttttttacaaataataatgaactacttgctcatatcctttgcctattttctactaagttatatctctctcttactgatttctaagagtccctagtgccttataaataaaaatactgacctatcaatttccagaaacatagtttctatggaaattagatataactgaattacttatattcacttgatttttttttgtaaacattttaaagctcccccaaccctgcccccgccagtctcttgagcattcctacctaaagtcacttggggtcagggactataacttctattcctttatttccacttgttccctgtccctctagtagcaccgggcttctctgccaaattcagtgactggtggaggggccttactatagaaatttcaaaagagtggatttgagtcatggtcctgaaacataagccacacattaggttatgtgaaggcctggaaaacaagaaaacatgtccagaggctaagcaggctccttctattctaggcacatctccaatggcaagatgcttaagtctattttagccaataagaagattgacctgttcacatggcatctgacaggaaaacgtggagccaagaacttggagctttttggaatccattcatctataaatctgtggcggctctttagaactttttccaaatgggggcagtgataatgataatgtgactataatgtggcccttgtgagctcagtgtccaaagtaataatacttccagcaccttttgtagggtacctgctgtgtgtgagtactattctagaagtcttacacacatcctctttattccttgtagggtcccttcaaggattgttctttctgctttaaagacaaggaaacagtgactcagtgtagcatagcaccttgtcctagtcacactcataatgcaggacagaggtggatcctattcaggcctgaataccccaaccccacacactgttttgttctactgttcactttgtacatctgtagtagaatttttcacattttgccttgtatatagtttcattgttcttccaatactgtaaaactccttgaactctggacccagactgcctgaagaaagaaaccgtgtctttttcacctaccctccaagcaacaatcagcgaggctatcgaggtcaactggacttgccccaagaacacttcatggtcaatgtctgggtcaggaattgactttagccaactgtgccctctgttgtgaagccatcctagaaaccagtgcctcccatctgtgtgtgctttctagctctgaaaactaccaaaaagtccctgtatctactggaatatagctttgggaaaccaagaatgcctgcagcccctcgttcagcaggtacttcaatgcagaggaccaatgtgggcagaactgcactaccagcttgtgaatgaatgttcagatgggaagtgagcatcttttcccttatgttttgtgctaagaatactgtgatgttgaagcccagatactttaagatacatagacatttggaaaataaagaaaaggataaatgagaaaataaaaatcagcagtaacactatcacccaaagcagccattgttaacatttggtatctatcctcccagctaagctatacattaaataacatgtacttaacaatgggattatattatgcatattacatttgtaacaagcttagtgccattttgattggttattccaaatctaggggaagcctattagacaaaagttctctccttcctctggctgtgatttactgggggtagaggtggggtttaaatcataattacacttacttaatgtcatttaaaatgttgcaaagcatttcacatcctgctgaggaatctgatagtgctgaagcaagaccagagtctacctctgcactcaagccttagagcctttccacaatgcttttcagtttcaggtttcaggaggaaagagaagcaaaaagcagtgctatcataagcagggctagatgatctaatggcagagccagatggggtcttgtttttagttgcaatctgtctgaggcattcttgtaatattatttaacaattaatttttaagtatttttttacatgcacagggaacaaagtccaaaagattcaaaagagtatacggtgaaaagcatgcctccccctactccccgggaggcatcactgtctgcgatttcttgtgtatccttatctgaagcattttgagttcaaagggcaggcaagcatttgcagaggtcatcaagggtattttcctttgtcgcatcagtattctctgcagaggtcatcctggtaaccaggcttcataacccccaacaatattccaaaggaatatctcctttcaaagtgcatggtggatgtaccctgaggcagagccaaaatcacccactgagaccaccccaaacaaagagggcagagagctgccgtgctgccagaggaacagactcaggagggccacagctgaatctggaccagtctcagagtcaggagaccgaggcctcatctggtctctgccatggatggactgtaagcaagttacttaacctttctgcgaagtctcctccttgtctaacagggtaagatyataattaagaggatggctcaaaacaattcctcttaagctttaatgtgcacgtgaatgacccagaggatcttgttgcaatgctcattcagattcagcaggtctggggtggggcccaagattctgcattttcaacatgctccaaagactcaagaagtggccctcaactactggcctgtgacctgttccygggactaagcacctggtaatgtttacttcagagctgagcagctccctctggagaaccctggcattcaatttcctaagatttttatttgacctctggtgcctggtgatggtgctgctgccagaccctgtgctgaatgctctgaatatatggttcctctcattgtcccagctactcagtgaagtaggtgttgtgattatccccatttcacagatgaggaaactaaggcttagagaggtgaatgtgctcaatattacacagctggtaagaggcagagcaggccttcccacagaccatctgattccagactcctcgtgttaacactaaaccaaagagcgagtggcattctccatttcagccttgaaagtgaacaccayaggaagtgctgtaccaaggggcctcctcttgtgtctgtgtgggaggaggacgctgctgtccgtcagctcagagtgtctcctccaaagaaatgcatctcagcttgcaaagcctctacctcaaatttttgtgaaaactcttcaaggattctgaccgcagctcttatcagttacggggcaggaagccgccttccacaagccactctctccccataccagagggttccttggctgtgaacarcacttagattgtgtcagaggaaggccatgggctttaacaggccacatccattttcatttaccttctgaaagaagattaaggagaaaattcaattttgcctaatgcctcccccaaatggctaatttatatgctaattagcaagatagggatcgatgaaactggtaatcaatatgatatccaaggcaatggtaatgaaattcattctgagatgcactggcagtggaaatgaagcaattatgcagaataaatggggcagctcagggaataagggccccagattgcacttgactgcattatttccccttttacccctcccctcacccttccccaccccgttaaaatcaactgtccattcaggtcctttgaggtaccacgtgccagcttctccctctccaaatacctgatcctgcattaaccctgtggatytgtggcccaccatggggaaatggagctatagaaaacagcaggctctgagaagactagggatacaaaccctggaggagaagcaggggctgaatagaggctcttaagccatagactgagtggtgaattcgtactttactgtcacacctactgaggttggcttaaggttttttaattctaaagcattatagataccatattgcccaaaatttccacgactgtcctaatttcaaatattttgtcccatgaggccatatgttaaatgacgtgtcctacataagtccagtgataagtaggccacagtgtttttgtatgatttagtctaatactaggaagtcttgtttcaatctggacatttattccaatgtttcagatattttggaggagaggggagaggtgtgattgccatcatctctggagatttagggaccctatagtattcatttcacacttttcaactaagataattgaaatttgtcttttaccccaatgtctgctcattggaatcgcctgggtaatttgtccccaaattttcttatgaaaagttctgaacayaccaaaaagttgaaataagtatacagtgaatgtcacatgtatcctatccagattctacaattaacattttaccatacttgccttatcacatatctgtccaactgtccatcccccatccatcatcagttcatcttttcttaatgcatttcacaataaattgcaggcatcaggatacttcagtcctaaacacttcagtatgtatagcattaactagagttcaatatttatttatttatttattwatttttatcttaaggtaaaatgtatatacaacaaaatgcacaaatttgaaaaacactattctgtaaattttgacagaggcatgcattgatatagtacaaatccctatcaacatcaccccagaaattccctcttcccccttcccagccattccccaccccgtaccccacagaggcaaccactgctctgatttttttctatcatagattaactttattctaagaactccatataaatagaaccatgtagtatgtacccttgtataaggcttcttttattcagcatagtattttttaaattcatccatgttgttgcacatattaatattttgtttctctttattgatgaatagcattccattgtgtggatataccacaggtttgggggctattatgaatgaagctgctatgaacgtatttgtacaagactttttatgaacatatgttttcattttgcttgagtgaattcctaaggatggaatttctgggttatagggtagatgaatgtttagttttataagaaattggcagactgatttccaaagtggttgtgctattcctgggaagtgctttaaaaacgctgttttggctgggcgtgatggctcatgcctgtaatcccaacacttcgggaggccaaggcagaaggatcacttgaacccagtagttcgagaccagcctgggcaggaaagcaagacgccatctctacaaaataaaaaataaaaaattagccaggtgcagtggtgtgtgcctgtgcttcggaggctgaggcaagagaatcacttgagcctaggagttccaggctgcagtaagccataattgtaccacagttgtaccactgtactccagcctgggtgacagaataagaccttgtctcaaaagaataataataaaataaaaacattgcctctctgctccccctaccaaaaaattcttagttaattagttgatcaggagtggggcccaggcattggtgtttccagcatgcactgctgtggttctgatttgcagctggaggagagagtcactgaaggtttaacatttaactttagtttaaagaccttttggtgcctatgataagtgcaaaaagttgacttttttttttactttgaaaactggctttctgttgctgttcccctttttcctttacttttttttttcttttgctgctataaagacttgatggtgttcttggattatttggacatcagagttcacttgagtcaaaagatctgctttttaatcccagttttgccactttgtaactgtataagtttgagcaagttactcatcagtgtccttttctgtaaaatatggtttctrttatgtattccaaggctatgaggataaaagtgcctgactcaaaaattttctgaaatttattataggacaggagtggaaatagagttatccattgccctccccaacccccaggatacatgagattccttaactctgcctttctgaacaaaggcagattgacagttcttttctttggttctataatatggctctggatgtgaggctgtgaatgtcagaggttggagagctgtcaccacttcctttaatgattcgagtataattacctcttgtcttacaagtatgtaaaactccaaatcagtaggatagggattttgaattggttttccattcctgatggtgmtgtgggctgatccatctcttcgttgtccccatgtaacccacaacacatctttgcaagactgctgggtagagttggtattaagagaacagtgaagagctgtgcagcagctgaggtcatcgtttattcttgccttcattggctctggattactgagcatcaagtcaataacaacaatgacagcaaaatcaacctaccttctgaagcctagcctgctcactctgaggagacaggcttggagactatctcctgagtccacttcatatggttctggtccacacagactgcactggtccctgagcacagaaagttggtgtgtgtggctcctgacaagatttacatcaaatgctcagtacttgttggaagaaaaaaaaaaaaaaaaaaaacctcttgaaaaggtcttataagtgatgtggcttctctcattgttttgttcaaccatttaaatgaggattttccagtcagcaccaggaagaatgcacttgaggccagcatgggcacagatgaggcttctaaatcagggtagaagtgccaggcttagctcctttctaaacaggagggctgaggattctctatcrcatcctcccagacaactactgagcatgcagcatgcattctttgccttcctaggaaggtagggttttcagagtattcraggttgctctgggcgccagttatcagtgataactaacaaagatccagggaaaatgatggctgctaatgagcttcttttcaagtttatggcctccytgagtgtctgtctgtggaactctcatgcttttgtaaggggstacaggatagaggggacaagggaagggatcagatggcctgctatctgaagcatgtgcctggcttcaatagtccccttttgggttggtttattctgtaatgtgtcccctgagaagacagactaagcagcctgggttaccctgcaatttctccaaactatttgcatgaaatactgcaggcaaaaagcccagcccctgattggctgttgctaggtaacaacataatcatcaggaaattaggctgtccttttttttttcccaacacggagtatgtgtgtgattgcagtgttgtgcaggaagagagagggagtggaacaaagacagataaatgggatgatcttgaaggcggggacaccacagccacaaacctgcatcccacggtaggacaatctgctttgggttgggctctttactcagtcaaaccaatattggtacattttcctttttagaataatggcaaagctaggagggccctgcagacagcaggaacaggagctataatagaagcaactttgagatttgaagtgctttttagaagcaagaggtagtatttaatatgtgggaatgactctagtgaagtgaataaacgagtgtgtctggagaatgtatacaggcagataagaatccattagtatggccgtagagcacctgcaaggaacagaacgtgagaacgcgcatgtgaatgaggcataacagaaaaaamaagcatgctttaagataggaaagggagcccataaactgaagtttagaactgtatctgttatgactccgccagtgtttagcatgtggacctcgcgttaggacctcacagactagacaggtggatgaagaggcagcagtctaaagagagcatttgtgtatgtgcatgtgcatgtgtgtgtgtgtgtgtgtgtgcacgtatgtgtgcacacagctgaagcacctagttcattttcaagattgtgtcctgaataacagtgtgcagagccctggcaagtacacagccacacctggacgcttccactgggtaatgaatatccatgaagaccgttagcactttcctttccctctgtgctagccccaggtggctttctcgcctctaacctcccttatcttgccttccttttgagctccctagcaatgaccctgcccttacactagagcctcagttgcaatacagcatacttcattggcttgctacaatcccagccaagctaattgccttttgccattcattgtctgccagattaacgactcctcatgtgtctggttgcccatcgcctcctctgagattcctctgtgtactctctctggcwtgtctttcccttcttctgtctcctcagctcagcctctctgagctccacatctgaatttttagaaggcatttaatttaaatgataaaatagaagcactgcctttttttttttttcctatcaaagggaatagtattaggcatgatgcagaggggaccattttgtaggagtggtaaaaaatatgcagatgtatcagaaacaaggcagagtatgtgccaataaccaagactcagaagaaaagatcttcccaagcatacagtcccgtacagtgatttgctgtctccagtgggtgagcctaacaaggctcaaagctcctgcccgaaagaaaaaagccatcactaacgtacagtggctcaaatcccctttctgagtacatgtactaaatggaatgaacttgatgctctgcaaagcctttaggacttgaagtgcagatcatcttcctcttctccagtggcgactttcattaccttttagttctcaaacattaaaatagagcacaatctctgttccacttctgcttccccaccattctccaagacagtggttctcaaagtgtggtcccaggaccagcagcctcagaagtctggggatgggtgaggcccagcattctgttttaacaaaccctccaggtgattttgttgtgtgctcaagtctgagaaccactgtggacctgaaaatttgcatttttaataagacctcactctttgaaaatctctgctctaagaatagaaaagaggggacaatgtgtgatgagaaagatctcattccacctagaaagccccctccccatttccgaagtcccaatcgaacctgtctttaaagatccacccaaatgaaactttagctgatgcaagtgaaagttatcccttgacagcttcctgcatttcaggggtgcataaaccaagggccaaatccaggtcacaacttgtttatgtaagtccctcaaactaagaatagtatttacatttttttaatggttggagggggtgaggaaccgaagaagaatgtgcagcagagaccatatgtggtgtacaaggcctaacctagatactctgtccctttacagagaaaaaaaaaaaaatgctgactcctgttatatttatgtgcttttcttatttttcctcttaaactgttaacttcttaaaaatagagtcaatatccgagtcatgtttgtattgcattcagtaccaaacatatagtaattgttcaataaatatgggaaggggcggatggtggtggttgggcagctgacaagtgttgtgggaatccaaaagagatggacttttatacttgaccactttgtggctgtcctatccataaaataagaacagtgtttttctccaccttaagtagatgatgaacatccagaagttcgtactaatggaatttactctagtaactagatggtgaaaagcagttgggagctgccctgcatcttgaaaaacaagattagtattgaaaatgtccataaatggataagttaaaaataagcaaaaagcttaaaatttcaggtggatttctgatgtccagtaaaaagttttcacrgaattatatgctaccatggttaaaagagcccctagtgatgatgctgcacgaattccacctgccccatggttgcccagcctctgcttgaacccctccaccgactaggaactcacttcctcacagccagccccactctactttttaaacagctccagtgattaggaagcactttttttctattcagttgaaatctatcttcttataatttccactctgtagtcctagttctgcatactttaatttgaaaattagctacctacgtttcataaatatgataaaagaagtagggtagagttatgcttgactggaaagaatgggaggttgagggggacctatccatttagataattttcccctgcaaatagggaacaggttagaaatacaagaagctaaaagccaagatgtatgctaacagaggaaaggcaaacttacgagtataaaatggaatagaacattccaaatacggcaggaagcaaaaggccggtggtcacagtagatcacaggctgaccacagatgtgcatgctatgtttctgctagaaaggaatgttaatagcaattaaaggctattatttggggcaaatgagggtaaggaggccccagagctaggcccaggggactctggaattgctttgtgattccagagctatgaaacagctgccaggacaagttgccagggcagaagcaagcaggaggaaatgtcctgggaagggctgggccctttaagtggtggctgggccaaagcaatgaggccttcaaaagggaacggtcccaaagaagatggaggaaaggagtagagaaaggaagctggaagttcaagttatactcctgtttataatgtaatgtaggcttaagattaatccaaacaccctgagaactgatgaagcattgcatgaacaatatccccaagaagaatgtgtgttgaacattcactgctctggatttctaaaatgcttttactgcacagagcttggagttgcgtgggggattgaatctagtaatagcaatcaccaactagcttcgtctctttcgcaccccccacaccctgccaaacacccaccacatgcacaacccgtggcttacgtctgtcctggttgtcacttcttccaacttcatctgtaggtgarggggttttttttctttctttctttcttttttttttttttaacaagaacatttcttggacttgagaatggggcttttgggagcctggtggaaagtttgtgtccaagccaggactaagagtgtagtcaaaaattgtaagggattaaaaacccacatgtttgagaatcttcccttctccacattcaaggcactcccacgttacaacctggacatgagctccagattcagactattctgatttatgccacttcatagttttatgatcttagaagttactttacctctcagaacctgctgcctcatgtaatcactgatctaaagcaatgctggaaggattaatcaggcagaggagacttgatcatgatagaatgatgcccattctgtgctgcacatggtgctgggtgttttctttctacgtattttttaggtgcttgcattttcttatttacttttcccaataactcttcataattgctgtcactgggctgggtgtggtggctcatgcctgtaatctttgggaggccgaggtgggcagatcacctgaggtcaggagttcgagaccagcctgaccaacatggtgaaaccctgtctctactaaaaatacaaaaaattagctgggcgtggtggcgcatgcctgtaatcccagctactcgggaggctgaggcaggagaatcgcttgaacctgggaggcggaggttgcggtgagccaggatcgcgccattgcactccagcctgggcaacaagagcaaaactctgtctaaaaaaaaaaaaaaaaaaaaaaattgctgtcattagcactgtttcccagatgaggaaacaaaggcctgtggaggttaagtaacctgtctcaggtcttctagctggggcagagacaggaatcaagacagctttctccaactatgaagctcctcctctttcttataaattatattgcctctctgagcttgtgcccagcatgtggtgggcattcaggaaaggtgggcatcctctatcccctctctcctgtgggacagttgtttttgttttgtattacttttcaattaaatgattgcaaatgattttgtaaacattgctaacaggaccaaccttatgtgtagataatatatgttgaaatacttatgaacaggaaaggcctacaaatgttagacatgccctaattattactcagagtgtgatttcagggataccaggcagggcctgagagagttctagttgacacatttgccttagactgacgctgctgcgggagatgactcttgtgagataggctagtaaacagaaggctatgggagccaagtgaacttcataagaactgactggcccagagaggcctggatcggaataagcacaagtaattctgcctcttgtgcatggactttgaaacctgtgtttcygatcctacacctgccatttgctagctctggggctccgataagttacagggcctctatgaatctcagttgtcttgtgagaaaaatgaggaagtagtgtctgtaccagagggtggttgtgaagaataaatgatattatgtccctgagcaagcaataaatggcaagaattattatcatttaccagtggctggcctgaaaatactggcctcctaatggataaaagaccatctacatacctaattaaggcccttgtgatgggagacaccccatctatccctggcagtctctctttagaatatatcaaagagcttaaagccccattcctttagtctccttataggagatgtaaagggaaactccaagggaggtaggctgtatccttggaagaagctctggggggagcatgctcagatcttcacaagaaaacagggcacccmgtacagtcactgcttctctagggcactctcaatgctagtgttcatgaaagtcagcaaaatccttgaccccagagttacaaagagttaagtggtacctgtagggccactggtaggcctaagatacagcccgatttcaggggtggaggaagagaaaaagaaggccagtaaaaaatttctagataagtttttaggcccttgaactttattctgaaagcctgataattagccacttcccatgatccctgtgttggcctagtcatacttgtcaggacatagcagcggcagaatggccagcatactacggtttaaccatcaggccagttcaaggctgagcaggagcaggagaaaatggccaactctagaaatagtagctgtgtgtatgtgtatgtgcacatgcacatgtgtgctgtgtgtgcrctttgtgtatgtgctgtgtgtgtgctttgtatgtgtgcagggtgtgtgtgcgcacactgtgatgtgtgtgcgcactgtgtgctgtgtgctttgtgtatgtgttatgtgcactttgtgtgcacactgtgtatgcactgtgtgctgtgtgttgtgctctgtggggagatttagtatggagagattttgtttttaagatgaggtctcactatgttgccctggctggtcatgaactcctgtgctcaagcagtcttcccatctcagtttgggtagcagggattacaggtgtgcgtcaccacacccagcttgaaaagatttttatagggatcttttttttttgagacagagtctcactctgtcaccgaggctggagtacaatgtcatggtctcggctcactgcaacctctgcctcccaggttcaagggattctcctgcctcagcctcatgastagctgggatgattataggcgcccactaccacggccggctaatttttgtattttcagtagagacggggtttcactatgttggccaggctggtcttgaactcctgaccttgtgatccaccagccttggcctcccaaagtgctgggattacaagcgtaagccaccgcactcagccaggggtcttttttttatagcagtctttttcgtgaccttggtactgagatttctatgtataaatccccaaaatgcatacccttacaaaggctaaacaaggaagagctgactgagattataacataaaaaaatttactctgggccgggcacagtggctcacgcctgtaatcccagcactttgggaggccgaggcaggtggatcacctgaggccaggagttcaaaaccagcctggccaacatagtgaaaccccatctctactaaaaatacaaaaattagccgggtgtggtggtgcaggcctgtaatcccagctactcaggaggctgaggcaggagaattgcatgaacctgggagacagaggttgcagtgagccgagatcatgccactgcattccagcctgggcgagagagcaagactccatctcaaaaaaaaaaaaaaaaattttattctgttactagacccaagaaagttactagacctgagaacactgtgctgactataactggcttggatagtgatcttattataggtctctgttgcccacagggcctgagaccagccggtctcaaaatctaactttgagtttattgaaggaaatgatagtatcttttttctctgagggaaaaaaagtcaacttctgtcctaccttaatgtactctctttgtaatccatgcttaagctgtgctggatgttttaaatgcattgttttacctattatttaaaaccaatgaagtctgcactcttgtccattttacagagaggcaaatgaggcgcakaaaggttacgtaacatggccagggttgcattcctgtatgtaaaccctgccctggcaatgtttgctcatttttatggagtagaacgtctctccccttttctaaactctctctcatgatactttgcctttgtgtgatttttgtttccgaaatgctttctcctatttatgttgtttcattttccggaagctctgggaggtcggggtaaggtattatgatctccacataatgctgctgcctagctcccacctagtcaatgtgtgactgggtctagtcccagccttttggccaggaccttctacatctgctttktgcagtgaccacagtcccacacccatcacttcaacaccactcatctttcatttcccctctccattcccaaatcaaaatttacatgtcctaggccctgttgagagtagccatctggacccacaaatttgagtaaaggtgctaatggctactaatagtttcaaaggtcccttctcagataacatggtatttscacagtgtgtttcggtattttaaccttgggttcctcatcaggaggtgaagagcttcccaaagagcttcaagctttattcattcctcatttaacaaaatcttactgttgctggctcggcaccatgttaggcattaggaatctaaaaataatggaatcactacctagtaaataaaatcagctgtcctgctatgctattaaagttcagaagaaggcaccaaatctaggctggggtacaaaaaggaagtccctaagaggaacagacgttatagctgaactgcaaagggtgaatgcgctccggccagggagatggagagtgaggggcctggggagtggcccaggcagagggaaaggtctgggcaaggggtgagacagcatatgactaattctggaatcagctgtgtgggagcacgtggtaggcaatgaagctggagagaaacaggaagatccctaaacagagtgctgccaacattttctttccacgtggaggtattttgaggtttcagcagggaagaaactatgtttggtaactcttcccatctcaaattctagcccctttttgcagggacttcattatgaccatcttatggcatcaatgatgactgccccttttaaatctcatattcaaatggatagtggggccccttagagcagtggctctcatgcttcatcagcatcagaatctcccagaaggctgtgagaacacaggctgctgagccctgctcccagaatttctgattccgtaggtctgaagtggtgcctgaaaatttgcatttttggagagttgccaagggaccacatttttgagaagccttgccttggagcatacaaagccatgatattaacgaggctgtttttaatgcctttgcacccttttttaccattagtttcagttgacctttttaggctggtcaggttgagtattaggcagcataatagttccctaaggccgccttaacaaattaccacaaactgggtggcttaaaacaacacaaatgtatcatgttaccgttctggagactggaagtatgaaatccaggtgtcggcagggccatgctccccctgagtccttcctcgcctcttcctagcttctggtggctgcaggtgttctttggctggtggcagcatagctccaatctctgcctccatcttcacgtggctggcttctccccgtgtgtgcctgttttcacatggcgttcttttataaggacactgcttatatttgattaggggcccatagaagacacagaatatattttgctctgccttacagcagtgagtccagggctgcccaagtctagacaaactcatccatcccgtccccaagcattcagcatctgcacagtgtggctttcactgtacatcccttccaaaagacagcaaatccttctttttcctcctcatattcttcaaccaaccagcaccaccttgttatagaaatacttgatataacctgccttttataaattaggaagaaaacagtaaggtttcagaaagtttactcatttaaatttatagtgttttgcatcacaatgaaatcattctgtttggattgctaggactatatgaccagctttaattcctcatccttcacttctatttttgttggccttcatttacttactttggtttctagagacactaaaggtggcaacatgcagaggacaggggagagggagggaccttttgagatggtttgagctgcatccatttggactgctcccagtgagtcagtggcttcagactggaacaaatcaggacacttatgttcatgcagcagccgagaggtgtaaggaggcctcccccaggtcccctaagtctagggagtctgaatcttctgttattactgccttatgcctctggcggaggggcatccagaaaggagaagcagagccacagcaaaggaatatgttcacccatctcttcagaytctccataccaagccgcctcatgataataccagcagccacgatggggctgacgagacttctcatttcctgcccagctctgattccattaggaaaaacctcaccctgccttaccccagggctttaggctagatttggagagaggttttcagtatccttcccctctgctttcccggaacctctgtcacagctgtaatccacagcaaatggatttccctgacactggggacaaaggcctagtgtttcgtagacttggcggctcctgggagggcagaaccatcagcgtttctccagctgctggtctcaggccctgtgggcagcagagacctgtaataagatcactatccaagccagttatattcagcacatcattcaaagtggcccattgcagttaggaggggagaagtgacttaaataggaatcatagcccttcagagcccgggctcatacaaaaccacacagtgagtaggaacccagagaaaaacagacttctagttcttgatgtyagccattaatgagatttggctgtgatttataatgggagtccgcagggatgggtggccttggggaagaaataaagaactagttggaagagaaggaaagaataagagtaggaattaaaaggaaattgaaaaggggtgggtagaatactgaaagcctagatactgtgaaagtttaaggattcagattttctaatgtgggtcaccagagggaaggatgtaaggagagtccacagatgcctcagtagcccttactgagactgcagaatgcctccgctactctccagcagccagaactttgagcggaaggaaggtgtgaagggggagatatgaaagctctggttcaaaaaggggaactgtagaaaaaaaagttttaaagctgttatatgggtccacacttcctaattatgttttcttccaactcaagttcccttctactaggagaccaacaataaagtgacatatggcaggaccctagcttctggtttctctgcagggcaaacttcacctctctcgttgataagtcaccaccaccatgcgggcaggaggtttcctgaggtgccttccatggtactggatgagaatcaggggagccatatcaccccaagtcacttacctcccccacactgggtctccgttcttgcatagaaaaaacaagggagattatggtaatttttgatttctcatactggttgatggatacacaagcatattatcctttatatatatattacatagaatattttgtaagtataaatggacattaattaacaattagggaattaaattcagagatatcagttcgttttcaactgaaaatctagtatgctttgacacggacttcacccagtgtggctgaaataatggctcaaggtgaagttgcagagaggatcatgggaagcgctctggctttggagtcggacttggttttgaatcccagttctatgatgaccttacataaattgcttagatatatttctcattgacaaaattgggataatcatacctataccataagggaggtcatagtatctatgatagtgcttgacaagtagtaagtgctcaataaataatcactattattagtatagacaccattgatggaaggtactgaagtgaaatcacaggtggctgatgttttaaactagttggtgagaaatttgtggatgaggtagagattaagctttcagatgaggagtaggatggagtatggtgcatttcaagcaattttattcaacaaacatctatggaacgaagcacaaggtattatgggaaaatatgacatgatcccacccccaagcaaatcactttcttgtaaggctatgttgtaagtgctaggagacaggcaggcacagagtgctctgggagcagcctttaagctggatggcttaaaggaagacactggaacctaatttgaaggaagcaagaggagaagagttgggggggttgcattcagtgcatatttcacaggagagactcaagttgttttgaagatctaaggagttggttacatgaaaaattgaaggaaggcatttcaggggaggggaatagcgtgagtgaaaccacagcggtaaaaaccacagaggtaggaagtagcaaggcagccaaattccaaatgacctgggcaccttggtcataatgctgagaccagagagagtgcaagtgtggaaaatgaggccaggaaggcaaaatgggtcagatcatggagggtttcacatcccacatggagcagcttgtggggtgggggcactgggtgggcccaagaacagaggtaattcaacacatgatgcagggacaaatggatattcacatgcccaaacatggaataacatatgacccagagatttcactgctaggttatacccaacagaacagaagcaaggacttatatgccgtgttcattccattgcaacattattcacaatagccaaaaggtggaaaccaccccagtgttcatcaacagatgaacaaacacaatgtggtgtgtatgtaggtatacaatggaatactattcagctatcaaagggaaagaaattctcatacatgctacaacatgaatgaactttgaaaacattatgctaagtgaaacaagccagacacaaaaggacaaatattaatatgcttccacttaaatgagctatctagaacaggcaaattcatagagaatgaaagtagattagaggttaggggataggcaggggacaagggggactgaggagttattgcttaatggttacagagtttctgttttgggtaatgagaaagttctgggaatagatggtggtgatgattgcacaacaggtgagtgtagttaatggtactgaattgcacacttaaaatctagtcatattctgaactttccttctctatcctttacataagtgattgagagagagagcagtcaagagagtgagagagcacacttgaaagacagccacagctatcaaaagtgtgagctagaacagagggtgcaagctggggacagagagcaacatgagcatgcactatccaagaagtaagagagagtgtctgtgtgaattgaagagacagacctgctgatcaagcctgggatggcagatgctcagggagggggagactacaagcgacaggagagagagctggagcatgtgcagcaagggtgcgggcacttgggagagccacggggagccagaggcaggagactggtcaagggcgagcagcccaggaggcagcaagaaggtcgagtaggggagagagctcattagagggaaacggagctaccagtctggatcaatcacagcggggcaagagggcaagagtgggagcaagagcgagggggaggacgtgctcgtattccagagagccaaggcagagtgagggagggtgagcacactgaggatgggcccacccaaggagcagctctgagaaatcagtggtgaaagggagcatgggcacaggtgtgagagatggcagggaccaggggcagggaaagagtgggaaaaccagggactggggaatcaaaaactactgacacagaaaagacacgggtggttgggggtggtagtgggaggaggggcgggacagtgggtggggggatggtgggnnnnnnnnnnnnnnnnnnnnnnnnnnnnnnnnnnnnnnnnnnnnnnnnnnnnnnnnnnnnnnnnnnnnnnnnnnnnnnnnnnnnnnnnnnnnnnnnnnnnnnggggggcaggggggcagtgggggggtgggggggcaggggggcggtgggcggggagacaaagcctagaactggagagagaagaaaggaaaggcatgcttgcccacaggaggagacaggcgacaagagtgtgggaagtgcactgtgcccacgtgcccaggttgctgcagtaagtctctctcccctgcatggggagcagtggctgtcctggcctgtacagtttttctgtaaaggaatgccatgctccctcaagacttttgtcttatttcttaacaagatttgagtgtacactctccacagtgtctgccctagctgctacaaaaggaaaaaagaaatagaaatgataacccccaaactgagcagtactggggagatagcaacaggacattaatgatgactttggctttttgcactaatcatgctctcattaatgtgaaaaattatattttcttcccctcttaaatgggtatactctacaagcagaggactgaatgtctgtgatgggatgacaaataaatattatttttccatgtaggaaggaatgggtagaaggaacagcctctacacagcctctgttctagctcatgcttttgatagctgtggctgtctttcaagtgtgctctcttactctcttgattgctctctcaatcacgtgaaggatagaggagggaaggtcagaatatgactagattttaagtgtgcaattcagtatgattaactacactcacagaaatagaactgagacttgatcatccaggatgtagattattctaccctcttaattttctgccctattttcccattttattttttatatttataagtacttcagttgagattttccagtgtgtaatgaaaagcaagaaatgaaacccaattctggccaacatttgggaaaagggaggtgagactttgaactaagagaagatgttgggattctgtgaggtagtctgtgtttgaatggaactatcatttactgatttgttgcttgatgatccttataatttcaattgcacctcacctttacaattagtttttcagtttctgtgagatcaggaattatacctcctaccactttttatgcagcctaattttccctccctagaacataagataaagtggattttgacagcgccaagacataggaagtacttgttgactttgctgcttcattgattcctgcatcatcattatcatcataagcatccttagcaagtcagtagccataataaggcccagcactgcgtgcagctcaggacaaagggaattaattcatggacaagcaccttgctctatggcagtaaaagcagacatatgaacataaggaaaaatcactgcttaaagagtaaggtcaagagtgcagcttgcaggctgctacactgccttggaaatcataagcaacttgctgcctgccacctgggagtggcttgggtttccagactcccaacattcctgtcttttagactttacccacacttttttcagcccacagtgaaattcccccagtctgaagaaggcagcctgagcaatgataaccctgaaactgagcagtattggggagatagcagcagaatagtaatgattactttggctctttgcactaatcatgctctcattagtatgaaaaattatattttcttcacctattaaatgggtatactctacaagcagatgactgaatgtgtgtgatggggtgacaaacaaatattatttttccatgtaggaaggaatgggtagaaggaacagcctctacacagaaatgaggatttttaagaaaagcatggaaaaagaaaaaaagaggaacttaaactcagatctgggtgtgcctctcccaccaccctttccttctttcccaacccctctccactgccaagcacacagcctcaagggaaggtagaatttccagttctgtattcagaccataggatgggccctgaaggaatttatggccctccttactgactgggataggagattccagaaggttctgccatttctgtcttaggagagaccctatctattggatctgggcagtgtgaaccaggccacaagagccagtgcttacagagcacacaggatatgcttggcactctgctgagcacctttcatcatcacttttctttatgttcaccacagcccatatcctgtcacatctaattgattaagaaacaggtcagacaggtgtgacatgccaggatttcctagctagaaagtggcagagccaggacaaagccaagtctttctgattccacaacctgagattttaaccagattggtcagtatggtaccctgctaagcgttagatccagagggcactcagtaagtacatacctaataaagatagatacctcaaacacacttgagctcttctggctttgaaaactaaactaaataaacacctcagtttatttgattgccttctggttttgtcaccaggctggagtgcagtggtgtgatctcagctcactgcaacctctgtctcctgggttcaagtgattcttctgcctcagcctcccaggtagctgggaccacaggcgcacaccaccatgcccaactaatttttgtatttatagtaaagatggggtttcaccatgttggccaggatggtctcgatctcttgacctcgtgatctgcccaccttagcctcccaaagtgctgggattacaggcrtgagccaccgcacccggccttctctgtagattgttagtcctgcttctttcactaggtggctgtataaatatggacaaatagtaaattctctgatgttcagtgtccccaccccaacgatgaaaaggctgatagggtgagaggtgatccatgagatcactgctagggagaacgttataggaagtctgcctcctttcctagttttgcttcctctggcaraataaacaggtcataggctttagaatcagccagacctgatctcaaatctcacctagtgaaccaagtctgccctgtccttctgagggcaagtgtgtcttaagacctcagttcccaagtggtcgggcatggcggctcatgcctataatcccagcactttggaaggtcaaggcaggtggatcactcaggggcaggarttcgagaccagcctggccaacatggcgaaaccctgtctctactaaaaatacaaaaattagctgggtgtggtggtggtcgcctgtaatcccagctactcaggaggctgaggcacgagaatcgcttgaacccgggagatggagattgcagtgagccgagattgtgccactgcactccagcctgagtgataaagcaaaactccagtctcaaaaaacagagacctcagttcccaagtggccccaccacagactggaaagctgatgtatatactgcatagtcgtcacctggtatccactgaggactggttccaggaacccccttggatgccaacattcatggaagctcaagtccctaatataaagtagcataacatttgcatataactgacccacatcctcctatatactttaaaccatctctagattacttataatacctcatacaatgtaaatgctatgcaaatagttgttacactgtattggttagggaataatgacacaaaaaaagtktacgtgttcagtacagacaccgtattttttgaatatttttgatcctgtggttggttgaatccatggatrtggaacccacagatacaaaaggctgactttgtgaacatyctctagtaagcgtctgtcaaaacattcacttctgcctcttccctcctagcatctgcctgcccttctgccatccgagcgccctgactgcgccacactgcaggccatggagaatgagctgccagtcccacatacatctagcagtgcctgtgccaccagcagtaccagcggggccagtagcagcagtggctgcaacaacagcagcagtggtggaagtggccgccccaccgggccccagatttctgtgtacagtggtattccagaccggcagaccgtgcaggtaagagtctaattgatctgggaattatactccttaatcatctccagggctagcaaggaggaggtgttggyatggtctggtgggataatctagatgtggactctagaaygggcatatgggagtgagttcgtagatacacatttgtgtatagttacagggggtgaaggatgcmaaatggcccaatcaaggagtttggaggacacgtgtgtgaaagtataaagggcagacaagtaacaataacaaataatacatgaccaagagctgctcagccacaacccagacccactctctaaatgaccattgcccggtgaagaacacatctcagtttttcagagaccaaaagccaaagagaacccccaaataatcctttgtcattgcagctttttaccttctcccttaaagcagcagttggcaaatgtcatccagaaggccttccaggtggyggctcactgctcctaaatgcagtcagggccatgcactaccatctgctgtgtgcctgacatggtactaagcattttgcacgcttatccttttggttattattaggcacaattctgtagttgagaaaactggggctcagagaaggtaataacttgttcaaggtcattcaggtaaakacaaaaaaattgaacctctcaccccagacctgtgttcttaatcactacaatgtttttttgaggttcctggataatacaggcagaaaagagagaccacagctgagaagtgtttactcccagtgactttgctattacagtttggatatactagaaaagtgacctcatcctgctttgaacttaggcccagataagggaacaagggagaacccacaacagacagtaagagggcctgaaaacccaagttaaagaagatgccatcagataccctggactcttccctctcccacttatttctacctcgtgcttagtgaatccatgtttcctgcccctacccttgtccctagccccagcacctggccctggcccatcatgcatgagaaccttagctctgatttatagccacggcattcagatatacccactcctgccactcatcacaattctaggcaaaagggggtctggggtcctgttctggcgagtggaatcacccaaggttgcatgcagaaccatcctgggctcctcctgtctcccttcattgacatcttctcatgaggaagggtcacaggatctcaactacatgggctggactgctggggaggtcactttcaggagtctaatagaaaggcctaggcaaagggaatacagacagataattctgagagagcaggagagaaaaagaatagagttaaaataaaacagggtatcggagaggggtgttcacgtcagaggagtggaatctgggggcaacatgtggaagarttgggatggggatgtctggggagacaccagagcccacggaggatctgctrtaacaacaggctgtttttacagaaccccaaatctgagccagaggctgttttgtcctagagctgtcagccctagaagtcacaccaacctggggaaagcctgacctgaccctgggccccgttctggcaaggcttgctcgccgggacagggcccagggtcaggagctgcctgtggccagggattcagcagaggtaagggtagaaaatagggggaagcctggtgaaggccagtgcagggcatcaactgggaagagatggcaggagggtgaccagtgggagaagggaggagaaatgtctctgggactcacaggaagaagacagaggatcttagggctggggaaaggcactcgctgttctttgttcctggggatggggaggatcaaaggacagccttttgtcctttccaggagattggccaatcccatcaggaaagaaggaataagcagtaaggccagggaatgggagacagcagctaaaaagagggaatgatggagagagagaggaagggaaagaattaaagggggccgggcacagtggctcacgcctgtaatcccagcactttgggagaccgaggtrggtagattacctgaggtcaggagttcgagaccagcctggccaayatggtaaaaccccgtctctactaaaaatacaaaaaaaattagccaggtgtggtggcgggcacctgtaattccagctccttgggaggctgaggcaggagaatcacttgaactagggaggcagaggttgcagtgagccgagatcacgccattgcactccagcctgggcaacaagagcraaactccatcccccctccaaaaaaaaagaataaaaggggagtgtgctgtccctgtggcactggcctgctctgtaaggcccagacaaccttattctaagggattgatgggactctgagaggctgtgggcagagctggggagcagccccaagtctgccttgcagccccagcctcaagaaggaggcattgcctccacctaagtttgcctgtggctggctgttgctgaagctggagtaggccccctgctgacttggctcttccctccacccccattcttttccctgccttattgagcttcactctcatctgaggctgcagagtgacagagggagaggagtgcctgacaagcctggtggagacccttctgtctccctgagcctccctactgcccaagagttggttaaagcactggcgtgcggctctgattctcctcaccgaggcagttgatgcaggagcaggccgtgctggggaggagctgcagagagaggcaagatagacaaagttagacatgatgaagaagctctgcgaacagctgtcctcccactgccctagagagtggccacaattggctgtggtgrtggtcacagatcttggtgtctcccgagcagttatagagacctggggtgggcaaggcattactgccaaaggggtgttctgtgtggcagctaccagcctggctcttccccctccctcccttctcaggtgatccagcaggccctgcacagacagcccagcacggccgctcagtacctgcagcagatgtacgccgcccagcagcagcacctcatgctgcagaccgcggcgctccagcagcagcacctcagcagcgcccagctccagagcctggcagccgtacagcaggtgagacttgggaaggaccttgaggctggtgccaggcatcctggttgtggaagcaaaagggagaggaagcaggcaccgcacctgcgcttcacatccttctcttacctgcaacctaaagaagtccttgtgacacgagcactactgtcattatctccttttggcagatgaaggacagagcccagggtcatgcagctagtgactatagcggcggaatgctagcccatggaagaagtgccggggagcccctctcctaaccaccttaccgcaggtctagggaaaggactgtgggttccagggaagcgttcgtgaacgaagggcactgcctgtttagcttgtctgcccattgttgctctctctcctccttagctgagaagaacacattcatttatccattcagaaaaacattttatgtaccttctgcatgcaaagtttgtatcaagcactgggtatactgagcaccctgtcttcttggcacttacaataggagacagcaagtaaacaggaaccagaatagccaaggaaacaaaatatttaaatctctaagttacaataagcgccatgaaagagaagaacagattgttctgactgaagggcaaggtagacggccttgcattgcatggtcaggaaaagcctgtctgttggagtaacactggagctgacacttgaaggatgagaagccggccatggggagaagggcagtttggacactccagctcatgtctgcaaattctctgtggggggcggtggctgggtgtgatggcagtggccaagtgtgatggcggtggcygggtgtgatggcggtggccaggtgtgatggtggtggctgggtgtgatggtggtggccaggtgtgatggtggtggctgggtgtgatggtggtggccgggtgtgatagtggtggagtggagggctccacacaccgaaggcggtggcctaatagttggagtgctcagtggcaatgccttgccttattcagtcctctcagcaatcctatcaggcaggtactgttagcatcctcacctattcacagaggaggcgggatacttgctgtgggccacatagaggcaggttgggggctgacctccagaggctgttstccttaacaccagcctgcagcacctcctgtggatgatgagagcccaggagtgactgggggaggtctgggactctagcaagaggagtttgttctttcctaggcaagcctggtatccaatagacaaggaagcacttcaggcagcaatgtgtctgcgcaggccccggcccagtcatcttcggtgagtagaatgggggagcagcagcagagtccacagccccaggaccaaaatgcccaagttcccagacccagttgtggtgaatccgtggccatgtagcatcatggctggaatctattgcccttaccgggaagaaaaagaaaagggcatgtctcttactgacctttaggttagtaactccctgtcatcctcccagtgtcagggctctctgtggatagctcagttctctcaacatgggatccccctgcagctctgcaccaaggtcagagatgggacagggctgggggattgctccaaagccaaggaccacagacgttcctgaaggaggctgaataaaccaaggagcaaaagaggggggagaaagaaatggatgagggggacacagctcaccaacagaacctcctatctcctaccgcacatgtctctctcattagatcaacctggcagcctccccagcagcagcccagctcctcaaccgggcccagagtgtgaactctgcagcagcctcaggcatcgctcagcaggctgtgctcttgggcaacacgtcttccccagccctgactgcaagccaagcacagatgtatctgagggcacagatggtgagtacccatggccagggccatggctcagaggcaccaggaggacagaggcagagaagctgggagctgggagctggagaagggtggggaggaagcactaggggcaggggcaggagataaggggtgggataaagaagggggcctggaaggctgagtgggagctttggtacagcctcgaagagtcatgaagggtggggctccagactgaaacagagaaagttcctgcgatgccacctttccttctcctcctagagtgaaacagaagtgtccccttatcagaaactcctcaaaattaatcaggatgggcagagtggttcatgcccaggtggtcctggacacccagacatccatatacttgacagaaatggagtcttccccttcccaccatccttacaaggactggccacctctaactcaagggccaaagatgctttccagcttcagcgtgcctccattgccctcccagyggcccccattctaatcagggtcaggtgagcttgtttgggcaggatatactcaggatagcaccaactctttcctttgcacctatccctgaggggtgcaaaggtccttaggagcctaccaggtccctaagatttaggagaatgccctgggraaatggcagcataytccctgggtggcagtagcatgcagccccagctagggctcagtcactgtgggtcgtgtctcatacctcccattctgaagtctgctccttcgggctcttgacacactatcccgaaagtaacacagtcccacccctccctttgctcttatggccaggacgtgaccctcggagcttgtctggtcttgctcccgcacatttgttcttggctctgagttcatcatttgaggcgcatctctatccccagggaacagcctcttagacacaaggcatgaaatagacttccatctcctcgggaactggacagccacactgtgatgctgctgcccaaagctgactgtgtctgcaggttgcttgtccctatgtcctactccactggggtcgtgatgcctgcctgtctgcctccctccccagagcagggcatacacccacagaggaaaaagcacagctgcgctatcgcagagttctagggaaagcaccctgtcaaggcaccagcacatccacactgatgcagagctagactcccacggaggtcgaggtgtcatgcagagaacaccatggatcctgcaccctgcaggatgggattcagacatgaggacggctccaggcggtccgcttcctctgctgttgttgtctctaggcccctctgaatctaactttgactagaaaatgaccaaaaggatacatcgaacttgatcccctggagggcagtctcatcttggctcagccctgggttcagcagtgggttagacctggaaggtggtcctagggcatccatctcgcttcccaggacgctaaggaggtggtggcttcagcgtatcctggggatatcggtctcctctaggatgagcccctcacagagggttctgaagggaactcggctttggtgtagccccagagcggctctccccacccacccctgcacccagcctgggtcaggaygcaacgagcctctagagaaaggcaggcgctccccttggactcccccttcctttctgcttctactgtcctgcccttcctcatagccgctcctgggctaaacagttgtgtcctgtggctgagtccacatcgagcaggtaaaaggcgcctcgtttcctgtgattccaggcccagccaggtaacctggtgcaggtagctaggagcctaggcggcactgttcctttgtcccctcagctcatcttcacgcccacggccaccgtcgctactgtgcagcctgagctcggcactggctcccccgcccggccccccacccccgcccaggtgaggactccatgcttgtgggagggcaggggggtgggcacccctgtagaggggcactgatactggggaggggcacaaggagaggccgggatcagctaggaaagcaggcgggagacaggacaccccaatgcccccaggcctgygcgtctaccctgttccagaaggcctcagtccctcctggctctgtttcgttccctcaaacacaggtcaggagccagagggcagcctgctgaggccagcatgatttgccagggaggggtgggctgtgctaccctccatactttacacctgccccagcatagctggtctggctgctgctgcttcataagtggaaagtcccgctccggttacacacggtagtgctgctaggactcgagaaaaatgacatgtaagagggagcagagacgtgtcctgctctgctaggagcgcacagatactaccgtggctgggaagattctgtgggcagccggggaaggaacccctagcactcgcatctccccatcctcatctacggaatggggagggtgatgggacagggctggtagccggattttcagagtctggcacagcctccctgtgtccagcagagggcgccagggaccgggctgagtaagcatgccggccgtcttggaagagccggtggcaaccttattctgagacaagatatttgcccggtggccttcctggtcagttaacttccacttttgccctggccttttccagtgtgggaagccccatgctccccctcactgggaattatttctgggtggtgtgcatccaatcctgaaagtgttggggaggagggagggcaacagaagggacagagcctggcctccccacccctgcccgcccagctgggcagcaggtccttctcagaactcagcctcttctgctgctggatgcagtcacagcgaaccctctggccctctttagcaactccacgtgcttctggttcctcttctagcccctaacacattctctctctctgatttgacaacctcctgttctattcagccattcctggatccatccctctctccctcttagttgtatactggcattgctcctgccacattctctggactcccacagacccctcttttccaggtacagaacttgaccctccgaacacagcagacaccagcggcagcagcctcgggccccacccccactcagcctgtcctgcccagcttggccctgaaayccacgccgggcggtagccagcctctgcctaccccagcacagagcagaaatactgctcaggcttccccygcaggtgccaagcctggcatagctgacagtgtgatggagccacacaagaaaggagatggcaacagcagtgtgccagggagcatggaaggccgggctgggctcagccggacggttcctgctgtggctgcccaccccctcattgcaccaggtaaggtcttcaggaagcaggaatcctttcccagaaaactcagggccgtgagtcaggaggagactttcacactttcctttttcccatggatttgcaaagataccagccatggatctctctctcctccctccctatctcaaaatgtccatcagctcctggctctgtgccatgcttctggtctaactttacgcagggcagccatgttagttggaataaaggagtccttctgcactgtaggcacagcgatgaatcagggtacrcagccacagcggtggagctgtgggcacaacctggagtggctggaggcaggcagttgaactattttgaaattctccaagactcagcaaaaaggccaggggctagccagaagcatgtaagaaccagacagagagatgggaatgtaggaagtttatttttctcatcattcagcaagcatttgttgattagtatttgccaatcatgttgccaattctaggtgtgcagagataaatgagactcaggtcctgccctccacagtgtagctggggagacagagagtgcagtgcatatgccataatagatctaagctctgaacactgtcagaacagaagagctatgtggcttgaggagaggagctaggaaaggcttgctagtgagggtaacacttgagaataaatctaggagcttgcttgtgaggcaggtccgatgaatccacatgccctgctagacccctttccctgcctactaaaactctccctgtgctgcccattgtaggcaatctttaatgggaaaatctgccaagagcccaagaagccaggcctatcgatctaggtaacaagaccaccctgttttaccatagaaataaatagagtggcgaagcacatggctttgcattaaagagagagtcacgctgatcgcatccctgagacaaccactaacctcagtcctctctcaaaccattttaccatccaatctaatctgtggggttttttcttgagaaaatacatcaagaatatatctcaatacatctttgtcaaaataagataggatttttatttttccctagagtgtgcagtcaaaagaagggaaccagatatagaagcaaatccattccacttcataaattctattttaggactaagtaccaggtacagtgtgggcacagatggtcagctgcctgtcaggcagaatgggtcagagatgccgtccttcagaggacatggcacatgagccttgcggcacgagcatgtgacctgacagacagagtggggaaggttcccaggcagagaaaagcaaagcagcgcacatggcactgagttaggaggaaacggggtcaaaatccctcattcaccttcttgaggcttcagaagtcacccaggggcaaagggtcagtcgctgcattccagtggtcaccgctgagccaagaaaggcacctccccacggaggcctcacggccctgtggcttcagatgtttctcactgtctggcatggctttctccagaaagtggcccagcctcttccttttatggaaaaagaaagtgaggctcagaagggtagactgggggctctttcaatgcgttgaaagcagcttggactacagctgagaccccagatgagcacttcttctagtttctcattcaatccgcatgccctggcggaccatctgcgtctcaggccttcctgagaacccccttccagcccaggccgaaatgtaacctctctctaaatctaagccagccccccaagttctaacactgttcaaaagaaagactagttcttgggttcctcctaaggctgctaggcaactcagttctcaagaaaactggacagaaacgggaccagcactcacaggacgtccgtcgtgtgctagataacgtgccctgcattgtatgcatcacgcttctttaaaccctggaaagatccctgtccggtagctgtctttatccattttacagatgagcaaactgaagctcagagaggttctccaggagcttaccacatccgtcacgcactcaaagtcacctaagtagtaagtggcaggactgggggccatagctggctgagtcaaacactgttcttcatctcaagccagatcgtccctctcagttcttacagtaatctggggcctcctcagcctttcctgtttctgacccaaagctgaaagtatctggggggtctaagcctattgagggtttgcagagtctggtggagaccccatgtaaaggtaaacaccagcaggtgacaggcttgaggcccgagggcctaaggctaacagtgcctggctagaatgcagtacagagaccagtggctccacagaactttctrtggagcagctgtgagctgcagctccacaaagaacctctccccagagacacaaagcagtgggcctgcattgttcctgcctcccaccatcctgttcattcttcctctctcccaccccttcctctctgtaagcccagagatggcgctgccccactcccacctcccatatggaaggcagctggggagttttagtaggggaaggtcctctcagggcctctggacaaaaagactgaaatcattcttaggacctagtgcacggcagccaggagcagcacctgtcttgggctatacagttccctgggcagaggtgacttctggcctcctgcccagccaacccactgtcaatgaaccaagggatctgagagcaggagagaagagcgtgcttgagcgtgygtgtgtgtgtgcgtgtgtgtgtgtgtgtgtgtgtgaaagcaagtgtgtgtgtgtgtgtgtgtgkctgggagagagaaagcaagcgagygcgcacacattttttgtttgttattggagcattttttgagctggctggctggctgcccccagggaaagtaaccagtggagacttgcagtgggccagtaggagggggtatggcagtgaggaatgtgttctcctgggggctgtttcctcccagagcaggcagaccctccagtcccagctgggactgctcccactgacagctgtttgggggcaaagcccctcccccatggcaagctccctgctgttcctgctcctgtcaccttggcaaccggcttcttcaggctctgcaaatagaaaaggtcccttatgccgagaataggggtgggggagcaggtgggggaggggagtaaggggcggagaacagagcctaagaggttgggctttggaggggaaggagaagggcctggcttgcccttctcactgacatgaggactgagcaatggagggcagaagagaggcaggcagcaggggtcccttgggcctggccttcagggaagccgagtcctaagggagtgggccacagccccagataggagacttggttcttggagtcctcattctagtggataaactccaggctttgggtgcacactcaggcccaaaggtgaggagaaagttgctgactgggagggatatgctgtgataaaagggaactgtcgggttgttgaaaagccagggccctttcacccagttgggcctccagatgccaggtctttgttctgcatcctcagcccgcctcaggtctcagctgaggagcgagaactctgctggaaggccacacagctgctttgtttgaacacagagagcgttttgtgcagggggcagtgatttctgtctgtgataggctggacaatgcartgttgctgattccaggattcttgggtaccctatttccctcccaaagcagcctccaaactgcaagcacacttttacttagggaatccaataaaaaccaaagcatacaggtgggactgtcatctgctaaaatccccaacgattttgatgaaggtcatttcagctatccactgtagcaccaaatctagatgactaagaatctctttttatgttaggagaaaaatccacaatcatcagctatcagtggaggrgctttatattttgcttaacatctttgtgtgtacgagcctgtgtgcacgtatgtgtgagagagaaagcagactgacacacaaagggacttggccttgctggacgtttcttctttcccgaaattcttcatcctaggcttctgttagatttccctggttgctgtgggctaatagtaataattaccagttaatgaacagccatgttccacatactgcactaaatgctttacctacatatctcacttaatcttaacagtgattattccacttcacaaatgaaagaggtatggctcagagtcactgtcatccccaaaccatttgtccctttaattatgtagctcaacagatactcatttagcacctcttatgtgccaaacattatgctgaacactatgggtgttaaagagatgaacaagagtttaaattctaatgggagctgcagacatttgagttgtgctttgaarcattattgtttcaagaatggaacaggaggaggagtatctcagctggcactgggaagcacctaagcccagaggggctgtgtgcgcgtgtgaccatctgtgtgtgtaagtgggaccctccttccttttcccttgcctctgccattagctgtgggtctcctaaaactcagtcctgtgcccctgtgtttcacttacagaggagtttgtcagttcatacctttcagacatccaccacctgtctgccagtgacttcctaatacacatccatccctgtcctcctctcttctccccatacatttcagctgtctataaatagacatcaccccactgcatacaagttttttttaatctggagaatttgtaaaacaaaaaccatgcatcttcctctctggaaaggccccctctaccagtttcctgagcactgtccacaattgcgaggtcctcctgcaccccagactcacagagttattttgacttcacattcagataacaggtagtatttttaaaatagttaccatttactgagcatctaataggcattgagcaaaggcagtgaacctctttgtggtttaaacaaaatactccatttgatactaacaagtatgtgctatgtatcaccatttacagaacagcaagtctaaatccagagaggttaagcaatttatctaagattgcaccacctgttggtgtcagagctaccagggaggcagagcgttacagtgggaaaagcagtgggcttcggagttaacctggtttcagaccccagtttcatcacctattagtttaatgactatgatcaagttacttaagctctgtaaacctccatttcctcatccgtaaaacagaggtgattatatttcctatgggctgtaaatgactgagatggcctgtgcaagtgaccggcacagagaaagccctccctcattcccacgctccatcaccacccagcttatcaccagtttgtcaccaggttctgatgagacttcctcttgttttggcttcctgctttgcttaaggcctgctgacgggatgaggctgaactgatcgccaggatatcctactcacaactgctagaattatctccctcagagactgttatttccttcttgtttaaaaaccttcactgtggccaggcacgatggctcacgcctgtaatctcagccctttgggaggccccgagacaggcggatcacttgaggtcaggagtttgacaccagcctggccaacatggtgaaaccccatctctactaaaactacaaaaattagccaggtgtggtggctcatgcctgtaatcctagctacttgggaggctgaggcaggagaattgcttgaaccgaggaggcggaggttgcagtgagcagagatcatgccattgcactacagcctgggcgtcaagagcgaaactccatctcaaaaaaacaaaaaacaaaaaccttcactgtgtctttatgtcctccttgatcagctggaatgcctagtctatagtaagggctcactcaatatcatgttaatgacttctgactatctgacttcatgggggaccttaaagaccctccccccactgcccactgcacctgactgctcgtggtgtcctcatgcagacgctctgttatggccaagcaaatatgctgttgtctcttctctcccactcctacccctttgtgactttcttggcctgtcatatgcccttttcctccctgcctcctggcgttaacaatccctttttgttgtccatacctccaagattgcctccagtattctcaactgcctgcaactaatactcctaggcttgcggtactcgctcgtccttactgacttctgttattcacttggccatcagcatttttgaccttttttgtccttactgacttgtgttattcacttggccatcagcgtcttgtaatatgcaaggcaccatgcctcacctgtcaaatgaagtcaagttccccttcacttactgcattgtacaagtcacttggaaactactctcagctcttgcttgtaaaataaaaacacttctcaattgcctcatgggcttcttgttagaaataaattagatttaaatgataaaaattctttgagaagttcaaagcaacacacagataacaggtagtattttaagaatagctaccatttactgagcatctactaggtaccaagtgttgagcaaaggcagtgaatctctttgtggtttaaacaaaatagtccatttgatactaacaactatgtggtatgtgtcaccatttacagaacagcaagtcaagatacagagaggttgagcaatttatctaagattgcacagcctatcagtgtcagagccaagatttaaacccagatctgactgactctaaaacccatgcgtttatccacttatgctatcctgccatcctctgccaagggcagggtaggggcagagatgcagataacattttcttttataatgctccaagctgcttagcaaagtatcctgtacacagcaagtatttggtagtttttccagagggctgcagaacaggcctaagaaccttcaagcataatcagactatcatagagtgcccctgcagctggcaacccaacaccgttttgcaagtttcttacaggtaaacttcccttagctctacttcccctctcaaactcctcctgaccccatgccaagggaatgcatcatggaaaatttgtgtggctattgctttagggttttctaaaaggagcttccttgtctattcttgtgtatgcagagcactgacctctagagctaactctaaccttagttacctcatgaagcctaatcacatgagacatctttagggataagcagcccctagaaggtgctagcgtaacttagacccagccaaaaactgcctcctttctgactcctctctcttagacaccttggctttcaactatacatgatgccctggagatccctgaattcaccatagtattttatgcctctgagtcttcccgaatgctgttccttttgtcatcttcctaactctgaatcatgttaaacacttacttgctctgggaaaccttctctgctctccttccaaagctgaatccccttttcygtgttctcaatattctgtgcttatcacctatcataatatttaccaaattatggtgagagtatctgtcttccatctcttttactaaactgtaatctcttctagggaccatgtcttagccagtaccaaccatagtacttggtgtgtggtgggtgcttaataaattgtttgttgagtgagtgaatggttgaaagtgtatcttcccttaagggtagtggctagtaaaaagatctgccattcctctcccacaggcacattctccttgctggtaggccaggtaacatcaaactctagtcaactatagtggacttctaggaaaatgagtgcataagtagtcctgtaactataactggtatgcttgcagctcccatatactttgcggcaagagtcccagcatttctgggacagtgagtcgtttcctgcatatttgaagccttgagaacaagtcttgtaggataaacaagtcccacyatgttgtctgtcattcattcattcattcagcaatattgattgagcatctactaaattcaagatattttggaggaaacaaatgtctcacataaattctgcctactaaaagagataagtcacttactgaaataactctgagataggtgtcatccttacctccattttaaagatgatgacatagaggtacagagaggtcaggtaactcactcaccccatgtcacacagctggtaagcagcagagttggaattcaaatccaagcattttgactcaagagctcacacttgacttctgggcacactgcttctctgagggcagtgcaragcaaagcggcctgattgtcatctcagagaaaggggaaagtcctgtcagctgtaaagaccagagaatggtgactagaatttgatttgtagcactctagacagtatgagaaaaggcatatactctgtacagggtacagtgaacagtaaagattgcttgggtcaaagaaataataaaaattaaaaggttggtttatgttgtaaagagatcctgaatgtctgccaggggctttagacaaccgtagacaaaggagagtccctggcggtttttagtgagagatcagatctgtgcactaggaagattagtttgctctctctaagctggattacagagagaagaaactggaatcaggaagacccttcctctactgcagtactcgaaacaaaaggatttttttttgatccaggataatgctggagttaaatcatgatctttgtttttattaacctcaaaaagttaaggatgtattaatatataccccaaatacctttgggtctctgatctataaattgattcaagccttatgagcttgatttccagccttggtgtatagtagcctcgtttgtcctaaaacaattgctttcagttttccatgagcagcacagggtggggagggaatgggataggagaggaagcacaggaatagaagccaggcaagcagtcccctttcccagtcttttgggaaaacaaatgtgtgttgtccctacctatactctttatgctgtagagatttagaaccttttccctctgtaatcctttttcctccttattaaccctgaattgtaaactacttttctgctatagccactccatcaaattctagatgtggaagagatttatgtgatcacctagcccagacctcctctttcacagattaaactctgaagccctgagaaagaagagtaccttgtctcaggccgcacagccagcaagtagtggggcatgccattgatcctcttagcctccctgacctggaaccatctccagctcccacctcacataggcagcccctaagaatgattccacatcccaggagcaggaatccatgattttgcattacaggagaaaaagttttggttgcatttgcagtgacatgcccaacatttgcagatcattttggctgtgggggcctaacaaagtcctgtgtggcctcttcagtgtctcccaggtgccttatcaacagtcttctcaaaagtgcctgattgttaaattccgacctattcaatgtgagataaggagacacggcttagattggggtcagtttataatcaccaaatgtctgctggcatttccacaaaggttccgccatcaacccaaacccaacacacttccctcaacatcacactggtgtccaagtttcccaaacctgtcattcagtatcatccatactaaacccctctgggccatccatagtccctctctctctgactacgacagtcagtcaccaaggaccattttgcttttcctttgtaacacatcttatttctgtcctttccattcctattggaattctgcttggaatttcacgttgggctgggatgagaccattcaaaacttgcatgtgaacagacaaaattcaagaaggaaggcacctcccctaactcagtttgaaacctgcttactttgcacctgttgcatcacaggatccatttaaaacgtgagctcaggacccagaattcacctttatccttactggcatgaggctttagttgtaaaaatccatttgcgggcctccagctgtggcctgccatgcacttggctagctctccagccgtggaagtctctgtggagggcagtttttaaacaggacagattcagctgagctgcttcatcctaggctggcctggcactagccagagagtgatctgtgcaaagacaatctctgagctgaatttcctgaatccctactccaaacaaggcatgagctagacactgaagggatactaaaaaatataagaattttcgccccgtccgggagggaggtggggggcagcccccgcccggccgccgccccgtctgggaggtgggggggcgcctctgcctggccgccctgtctgggaagtgaggagcctctctgcccggccgccaccccgtctgggaggwgtacccaacagctcattgagaacgggccatgatgacgatggcgattttgtcgaataggaaagggggaaatgtggggaaaagaaagagaaatcagattgttactgtgtctgtgtagaaagaagtagacatgggagactccattttgttctgtactaagaaaggttcttctgccttgggatgctgttaatctataaccttacccccaaccccgtgctctctgaaacatgtgctgtgtccactcagggttaaatggattaagggcagtgcaagatgtgctttgttaaacagatgcttgaaggcagcatgctcgttaagagtcatcaccrctccctaatctcaagtacccagggacacaaacactgcggaaggccgcagggtcctctgcctaggaaaaccagagacccttgttcacatgtttatctgctgaccttccctccactattgtcctatgaccctgccaaatccccctctccgagaaacacccaagaatgatcaataaatactaaataaataaatatatatatatatatacatatatatatatatatatatatatataagaattttcacctcaaagagtcagcctgcttaaaatagaagagagaaaagctagcatagcaacacatgccaaaaaacaaattcctgtcaggcactgtggtaggttctggaaaaagagatacacaaagtttctgaccgcaaggagttcatgatctggaagacagataagaaacaattacaactcaccttaataagcattattatgatagaggtagaccctggatactttaagaacctaaaccagactgatatagtagttataactagaaatgactgaatatgaccatgtgccaggcactgtgctgtgcacattaagtcatttttctgtcattttcttctcatttcatccttttagcaacttctgtacagaaactatattttcaatttttagattgggaagctgaggcccagagagtagttatttccaggtcccttggtatataacagagggaaccagtaatccagccctggtctgtctgatgccaggatccaagaaccaccgttgtctactggctcttcctggagaaggcctcgcctgagcagagccagaggctggatgaggactagccacacagagctgggttgggtggtggaaaggttgtagctgttgcaggcacagagaacagcaggtgaagggcatggaggagagcgagagcatgtcacacttagaatccagtatttctctgaactgccagaatggccaaagggcatcacagaggaggtgagtttttagttttgaggagttgagctttggggatgggggacagctcaaagagcccagtgttcctccagcaaaggaggaaagcaggaatagagtgaatgtgttaggccatggcaatgagcaggccaggctcagggtgaaaaatgaaagagatgaaaacaagagacattgaatttgggaagccatttttatttggatgcgggaggggcagagttggaagacacagcagaagagaaggtcaagccatgctctctaacctggcctttcccctttcagcctatgctcagctgcagccacaccagctcctcccacagccatcctcaaagcacctgcagccccaatttgtgatccagcagcagccacagccacaacagcagcagccgccgccccagcagtcacggcctgtgctccaagctgagccccacccccagctcgcctcagtctctccaagcgtggccctccagcccagctcagaggcccatgccatgccactaggcccggttacacccgccctgccactccagtgtcccactgccaacctgcacaagcctggcggcagtcagcagtgtcaccctcccacacctgatactgggcctcagaatggacatcccgagggcgtgccccacacccctcaacgcaggttccagcacacttcagctgtcatcttacaactgcagcctgcttcaccagtggtgagtaagccagccccaaggtccagggagcacacggggtggccacagctcggacgaccccacagccccgtcaagaggtgcttctgggtaggctgacgggtgaagtcatctttggggattccaagaaggaagagagggccttccccaatttgaggatgactgaatcttaaggtccttacctgcttcccaagctccatggaaaccagggaagtatccaagaatgcaaaggctatttctgagaggcccccctctctgtcctgtcctttgacagccccagcagtgtgtccctgatgactggaaagaagtggcaccaggggagaaaagtgtgcctgagacgcggtctggcccatcaccacatcagcaggctattgtcactgccatgcctggtggcctgcctgtacccacgagccctaacatccagccgtccccagctcacggtatgaagcacagtggggccctgggggaggggaggaagttggcctttcttgccatgccctggcacatttcacttgggcatctggaatgggagggtaaactattacaagcaaggaagctggggggttggaaacagaggagggatgtgagaagatgaaccagggataaagtaaktgagacacggaagatmttagagcaagagggtggagacagaagaggtgaaagttctagagccagacactggggcctacctgcatgtcactggtgtcagatgcatccacatagacatatgccaagtggagagtggaggcaggtggccagttgtcacagttctctgcttcctttggtatgaaagggggttcttgatattggaaatatggcaaaacggctaccacatctcaaaaataagggaaatgccagggggaggcagaaggggactcaratgagttcagctcacaggaagcatctctgaggaaaactgctcagctctgggatccccatctgtccatctgtgcgggctcagttacaagtggacttctccctgcctggggttcaggagactctgctgggtcccttcacccggatgggagaggcacagcagtacctccgccttctgcaaagatctatttgcttcccttcccctctctgccagtttgcacagcactgttggcccagatctcagtgacattctgagccatggaccacctgcaactcagggaggcagttccagtcattgtgctgtgtttgctgagggggtaggggcggggaacaggaaagagaaaaaagagtttagaaattgatggagaaataagaaaaaaataccttagcacaaggcagggcaaaaagagtacgaaggttctatagggaacagaagcaggatcaaggaagagaatatggagaaaggacagcaggaaaattaaaggatgggaaggaggtcatctcttctctctttgcacacttgcagatgagaaggggttttgaacagcagtccattccactgtagatttgctctaattatcagaaagttgcttttcaaatgaagtcaaaacctgctctcttggaatttgccagcattggtcatgattctgtcttgtgaattataagagtccatcttatacagtgtttgtagacagttgtcggactgtctcttgcctctccccccattaaaaaagagaaaatctccaggctaaacatctgagactttttttcattttttacctatgacagatcaagacctccattctcaccattctggtcaggcttgtctatctacattctaccttttcattaattttcctaacgtttggtccccaaaattgagcacattaattccaaatataaacagctactagtctttagaggcctgtttcaggggcagggctgttccctagatccatgttttacggtagggaggaaccaaaatttgttgaacacttagtatatgctgagtactgttccaagtcctttactcactcacgacagccctaggacataagtagaatcgccccattattcagaggcagaaacaaaggctgaggggctccaggtcccgcggctctgaaagggcagcgccatgactctgactcctacrgtagtcactcgctcaccttccttcatcaggatggtgcacgaatggcccccgtgaactctcccaccctataggaatgacactgttgttcacagagcactgtcacctgaattccagagagctgggtttcatttttgtttctgaggtttcgtcttacctggaactgctgtcatgccagctctccctagtctcaaacttgtataatttatagtttgaaccaaaatataattgcttacatctgttaagtgttaccttgtaaattcagcccatagttccagcctagcaagaaaacagtaatgattaatagttaatatttactgagccctctctgctagactacacatatttcctcatttaatcctgacaataaccctctgaggtagcaacttttatcatcctcattttaaaggtaagaccactgaggcatagaaaaaaacaagtggtggggcaggaatcttttctatctgaattctgctattcattatactaacacctctgcttaactttgccacctgtaaattatatagcatgttttatttgccttttaccaatttgctaatagaagtaccatatgggaccccactgagtactcatgccctgtctccgcaacagtggtaatcaacattttttgctcaagtgtttgtaatccagaaacccctaaatgaactgacatttgcctttctcctccataaagctctcaaaattttctttctgaaatctaatcatggtgatatacaaacaagcatcctcctcttgaggtcctatctcatgagagaagtaagctttacacagtggaaacaactgtcaaccacccaagacttaaatatccattctgtgtatgtcttttttttttttttttttttttgagatgcattcttactctgtcgcccaggctggagtgcagtggtgtgatctcagctcactgcaatctacacctcccgggttcaagtgactctcctgcctcagcctcccgagtagctgggattacaggtgcacaccaccatgcccagctaatttttgtacttttagtagagacagggtttcgccatgttagccaggctggtctcaaactcctgacctcaggtgatctgcccgcctcggcctcccaagtgctgggattacaggtgtgagccactgcgcccggcccattctgtgtatgtgtgaatgcctgctctgtgcaaagcactgtgggaagggaggtagcacactgagaaacacggtctgtaccccacctcaagagctgaaggtctacttgaaacgatgaaaaatgcacaggaaaaaaattacaatagaaagtaaaatgcgataaatgccatagatggatttgaggtaagtcatttaaaagctacaaaacaggaaaagttactgccaactagagatgttcaggatagatttcagggaggacgaggcattgttctagagcagaggttgacaaactacagcccaatggccaaaaccatcacattgccagtgttcgtacagctcgcaagctaataatgatttctacattttaaatttttttttgaaaaaatcaaaagaattctatttcatgatacatgaaarttatctgaaattccaattctagtgcccataaataaagttctattggaacacaaccacactccttcacgtacatattgtctgtggttgctttcctgcggcaacagcagagatgagttgttgccacagaccgtgtgacctacaaagtctaaaatatttactctctggtccctggcagaaaaagtttgccaactgctgttcttgagtctggaccttgaaggataggtaggacctggacatgcaaagttgaggaaagagcattccaggaagaactggtggaacttaagagagggaggcaggaaagtgtgggcatgttagggaacaggagttgaggatacaatcctgtgttaccctagtttataaaacaaaatataagtgtaagaaatgcagaggcagaggagaaggaaatatgaatattaatgaaaaggggggttgaaaatttgaaaaatagaggagaaagggagctaagtaaatattcggggaatgtaaaataaatgtaaacaaagaagatgggatgaggcctgagagtggaaaggggtggggggagaagaaaggcaggcaacgaatatgaatactaaggaaggcaagaaaatgggaccatgttgggaacagagggaagtcaagaatggagagaagtgcctggcgtgtgtccagcaccttcctgcgcctcgcgctcctgagggtggggactgtgtcacgctgcacgtctctgtacccccgcagcccctcgcgcgcgtgctgaatgagtatgcttcgccacgacagcgcaggttcacccggtgcgcttggggaagataaccaacacttacgggactctgaccgtgtgccaggcacggcgggccgcctgaacccacttcctcaatcagcctcaaccgcgagcccgaggccgctcacggaggtgtgaccggggcactcgggccatgacttccctctgatcctcggttcccagtgggaaggagaatgacttgtagggtcgttgtgaacaataagtcggggacagcgcgagcagggtttggcacgaactgagctctcggtgactggtggtcgttagtcttctgactgacccccaggcccctcagagagtgaacggtccaaggcgggagtcgcgggccgccccgccaaggagcacttgcaccggctatcagggcagcctcctcgtggcgtggcgcccgcctccctaagctgagccccgggcgtccctaacccgccttaccggagggcgcgaggcggggctcgccgcacaaaggaagcgcgcggcccgtgtccgccccgcccctcccgcggccccgcccctccccgccccgctccctcgccccgcccccggcggaggcggccgcgggagccgtcccagactcgccgcattgtgttccgcggcggctgcagcctcgagcgcccgccgcgcgcgnnnnnnnnnnnnnnnnnnnnnnnnnnnnnnnnnnnnnnnnnnnnnnnnnnnnnnnnnnnnnnnnnnnnnnnnnnnnnnnnnnnnnnnnnnnnnnnnnnnnnnnnnnnnnnnnnnnnnnnnnnnnnnnnnnnnnnnnnnnnngcgcccccgtcccggcctcgcgccccggccgccctttgttgacgccggccaggccggtgcggtcggatgcgccgcggcagccccgggccccggctcggaggctcccggcggagaggaggcggcccgcccgggcccgggaccccgcgcgagtcggcgcccggccgaggggctgcgtaggccccgcccggccaggcccagccgggccctggacaggtcagtgccggggcgggggaggggttctcgccagtagggaggccgggggccgcgctcgccgcactggaagtcgggcaccgccctcggtgcccctaacggcccgggcctacgcggctgccaggccgtgccagtcgcggctctcgtccgcgcggcgcctgggaggtgccctgctccccagcctcgctcgcctggggaccctgcgcgcccgtcgcccctggaagccgtgtcacctcggcgcgccgcagcttccgcgtccccaggccccgcacaccccaccccagccccaacctaggaccggcctccccgccgctgcgacttccctgggacggacggtgcgttcggggacgagactgctggcatctgccgtactttattggtggtggactccctatcttggaggcgcctgcggcttcgctggagagttttgtttttaatctagttcagtctcacgaggtttttaattggatggaaagggacaagctgttctgtgtcttttcttccatttttagaagagcgttttctctccttcctatgccaaatgaaggtagactatatttgttgcttctttacattaaaatcgggatttgtgagattctgtatttaaactgaagtccacagacagggaaataattggcccaaggtcaggttgcaaaccagtggcgacgctaccatctgaactaagccctgggccccgtgtcggataccagtcagtgccctgctactgcccacccacccgtcttccataacctgaactgatctcacccacatactttcggttctgaacaactttcctttccttcctactccatacctacgatatgtaccttcatgtgctgtgtacggaacacactcttttcatctttttcttcccttacaaatcaatgacagccttcccctcggatatctcccgtgtttgatctttaatcccctctccattagcatattgggcccagaggatcccttgcaaaataagctacctacctaaatccatcatatgtccctgatttttctaggacagccccaatttaaactattccatcccattgtccatcagcctgagtatctccatttttggtttaaaaaataatgtcactttgtaccacagcctactgacctggccttttccagccatttggctctggagcataactgggtaatccaattatcattcacctgggatttttcttccccgcctgagtcaacccaaatgttggaactgccaggatttctaggtcagcatgaacattacaggctaatgaggcaaggaaattccttcttgctcttgtatttcttcccacctcccccacccgcccatcttttattctggtacagggcaacagacctgtggcagaccctattgattaggatttaggtttaggtcacaagggatgtagggcttcccatcgttttgactttagaacagaaataaagtacctgactgtrttggttatcgggcaagaggctgtcttgaaccttaagataaccagcacagcaaagcagttctggtttcattcagtkagatttaacatacttttatttggctcccattttaggtaaagtactgccctaggcactggggaatataaaagtgattttaacaaatagctcccaacatctggatctacatttgggagtattcaccctttctaaccagctgataaactgtgttttccactggtgatttctctgtacctaagttccagcccctgcaaggcgggaactggggcctctggcttggctcactcacaagggcgggcttgtttcgcagaaggtcgggcagatggggagtggtgctcttttggcacctgccctttccaggcactcttcatcacatgagctctgcttctcagcccacccaagatctgtttccaggctcgtccatgcacacagggaagaatagacatctttttcctccagcctgaatcttgagaaagggggtagtttcttagtcctttctgttgtacttgagtcggtttctcagttgtccaactatgttttctctcctgttttcacccccttcttttttcccccaaactgttctttactgacatgtggcacaaaggtgcttaatgaatgttggtgtttcatcatgtccccacctcctggccctttccactctctcccaggtcctgggttaatttttaatttacctttgtcaagctcactccatatatattatttactcttccctctaagtaaagaaggacctccagccccttttccttctgtcacagtcatcattctcctggctgtgggtctcatcatctcatcagccattgtttctgcattctctgcctccttcagggaaggagagcctcttaggaaggcactgtgctgcttcccctgacatacctgctctgtcattgactttctagtctaagcggactgaccctgagatttctcttcctgccaccaagcccttccctcagctatgaccctgtgcctgttccttgctctggctcagccccagaatccactctttttcagaccacatcctttttcctgtgttactcatttcctgtctcagatactttggatcccttggttctgatctttcagggggagagggcatgttaagaggagtaagtagatggatgatcttacacaattgaactcttcttacctctggccttgtatgctcttacataggctgtcccctctctacattttcttatttaaggaaaaacacagaacatgattattgtctcagaattaggaacccctactggtgtgctcgtaggtgtctttttgtctacttttctctattgtgaatgtgtaaaggggatgacctcactgccttaaactcttcccttaagtctctgtcctcctttaggctgtggacctcaggccaggcgttcagtaaccatttgccaagtaaagttcccccacctcctcactttcatccagcatggatcagcaagccaaaataaagttaaagtttaaaaaacctagggaataggttggtgactccagttcctgtaatgctgctcatcattagtacggtgtttaccaagagtttttccctcttcttgagtcagtctaaatttatattaaacttctcccagctgttcaatatttaatctccagacagatttagttccagccatagaaagwttctcttctgaaaggacacctactggagacgagagtagggaaatgagaatgaggagtcttcataattgatagtttctcttttattccctttgttttgtgccattttgctactgaaagatgatcatgatgatgactttctgtggtcaggaggaatctcacaaaagtggttgtagagagaggcttttgtgtacccctcaggagactgtcctggagtgaggtgcccctctgagcctgcccaccctccccacctccccccagtccccagccctatgggaaagcagggtgagaactgactgcgttatgcagtctactctgatggggactttgtgccaatgacagaaatggctctctctttggggacttaacaccttgtttcatggaacccaaaactgaactacccctcaagatgggagtctgaacacatagatttatgctttaaatgtttttagggcatggtttaaactatgagtcaccagttaaaaccctttttgaatatgttttctgtttttaaaaaaagttgcctatttaagataactacttattcacaactcaaacagaggtaggcttcacttgaagcaatgacttatttaacatttttcatttgaattactagccacatcagaacactgatttgatatttctaaaggtattgagaggcaaaccatctttaattctgctttatgatgtggatattttgggaattgttaggaaaataatcaaccatttgcatatccaagacataattattacaaattctggatttttccccatcagtaacaaaagtccagtataaatgacatggtcaagaaatgggctcttttatcatagtcaagaattatacaatttagaattactagtttttgaagaaaaagtatgctaaggaacacagcatataatttaagtcataaaccgttgctctgagattcattgtaagaccatgtagaccagcatagaaaacttcaaggttttttttgtttccttctccttccaaattatttttatagytagtgaaaaaggatatgctttcctgttcttccaatttccaaatgatatttaggtaagtccaaaagaagagaacattctttctacatctggtaaagacatgactgctgttaaacacagattgccagtgctctgagatgaatccagatgttgaagagagccccagtttgctattatgactttaaaacataagcaaatgtctgtttttttcagatgattgtcgtcttagcagtgaaatttattatcatttgtattaagaagagatgactattagatgccatgccataaccaactcttctccagtagattaggaggaccaggcctgatactgaatattggaactgttggcaagaaaatgaaagttcgtgactgcttgagttatttttaaaactctagttgcatggctgttatgtctcaaatactatataattatccctagttactggtatctttagcatatttgaaaccatccatatgtgacctaaagccacacagctatattaagacatttttgaacaatcaaagcaaatgacactttaaattaaaacaaaactaatatgaagcaactactttaaaaaaaaaaattgggaccaggcacggtggctcatgcctggggggccgaggcaggaggatcacttgagcgcaggagttcgagaccagcctgagcaatataacaagacctcgcctctacagataattaaaaaaaaaaattacctgggcatagtggcacacgcctgtggtctcagttgctcaggagaccgaggtgggaggatcgcttaagtgtggacagtcgaggcttcagtgagccatgatcgtgccactgcactccagcctgggtgacagagcgaggcctcatctcaaaaaataaaaaataaaaaaatttgattaaatccacattttgaggcctccagtaatcagtattaatctgttctatcagttgactggtggcaaaatagggttgactggaagcttagacaatggttataaggaggaaaggagtaatgtttccatgagcagaaatgatcaatagaactgatttgcaaggtatgtagtatgtagtccataatatagacaggacaactgaggcttagcgttccctcctcccagtctcccctgacatttatctaacaatattagtgatgctgcagttgataaccaaaaaaatagtcatcatattggggaacatggctgcctttccctgttatcaacctgaaaataattggagagtttactaaacatttctagatttcttttgtaaaccggtagaaatccatcttccatgagtttatcttaaactgggtttatttttagccttttaaactaatttcttttcataagctaaawcatctggcattacaagttacataaatttagtattttctaagtaaagcagtgcttccttttatttgtcttaaagttaacctttcttttggtttctagggttcttctgcactgtctgcttaaaacccccctttatgaaaaaactgcatagaaagagaatctggtgcttgtcttcttgtcctttagattaatagccattgaaggtgacttgagactttgctttgccctttaggacagaagcatttctgttatgttgcagtcacagtggaggtaacatttcttcctgaagcctgacctcaacagygcaaggacaggactaccgacgtagaccaagacgtctgaggaacacaaacctcagatacctcagtttgggccacggaaagattagccctgctctggggctgtaagaggccagactcagtgaaagagtgagattagaatgatttcctaatcttctcacaggtctcagtgacgttggcactcctgtgtccaagctcagcctagtccagtgtgttgtgcctgcattacattatttaatcctcaccacagctatatgtaagacagatataagtatcccatttcatagatgaggaaagaggcctagagtaacttgtccagcattacaggataggatttaagcctagagtcttttttttttttttttttttttttgagacagagtcttgctctgttgccaggatggagtgcagtggtgcaatctcggctcactgcaacctctgcctccagggttcaagcaattctcctgcctcagcctcccgagtagcggggactacaggcgctcgycaccacacccagttatttatttttttttttgtatttttactagagacagggtttcaccatgttgaccaggatggtctcaatctcttgacgtcgtgatccacccacctcagcctcccaaagtgctaggattacaggcatgagccactgtacctggccgcctagagtctttctaatcccacagtcttaactgccatgtagcacagcttctgcgtgtattcagtgccaggcattttacatatataatatttactgaaacctcccagacaggtaggtagtatgagcctcgttgttacagatggagaaaccaagactcagaacaggcagtgagtgcttgaagccacacacctttgattaaaggtggaacagaatatgagtccaggtctggcccccagagcccatgctctttctactctgccattcttccttttatctcccctgatcttagtgtctactgtagaacctctcccattggttctagacattttgcgttttgaaatcatagcatgggccggagcactatgatgtgagactatctgggagcccttgaccctggcattggataccagtggactggcctccatcaccagggttaagtagaactctttgaaaactcctccctgactccctgcagccagggccagctattattccctggtgtgttgacctggtggaagtcactctggtcctgcaggtgctgctgctgagtttgagctcaggcccctcttgcagtcctcagcctgtgggctgggaagcgttcaagcagctgtttggaaatcccccactgctcccgttgtcctgaactgcatggggtggggggagggtggctgttcgctccattgattccttcctgcatagctgggggtggcagcttggagcacattcagctgtttacaattcagcttatgtacactttagctggggattgtgggtgagtcagaagggccgttctctttgcctgtgtcctgagagacagcatgaaagtcagctgtatggtaatggctgccagcatgggaggagccccctccctgccagatgccttaacgggagctggtcaacacagatgcttaaaatccagtaagctctccaaacctttcaacccagacccagcaagagcattttgcagtgacgctgagggcaaggctggagggtcccctggcttggcctctccttcatcctgctggccagccccctgcaaggaactcaggtgtggatctcagtcatccgcagccagtgaccctcctgtgcctgaaaagctcaccagttttctcagcaaagagccccacagggtccttctgtcactgctgtgccttcccttctctgggagaggtccttcagaggaggtgcttcagagaggttcctcagggagccacagcctgctgtgtcaaggcaaggagtccttgtccctttgacagctctgcccttagcagatttgaaaaggctgcagacattggatgttccccctgccttctggtattcagaggaccccaggtgggaagggtctataattttcccaccactaagagttcattttgtgcatgttttacaagatactgtcttccaaataaatggcattcgtttgttttattctaaaatgcacacttttacaatctgtacttgagacgcacacgtaatcaatgtgtaaattcgttgtgggggaaatgggtcatcttaacaactgactgcattttagaatttgggaaacatggtaacatgatattaaataatagcatgttttgccctcctgaaggtatatattatgtgctgtttccttttcggcttcttcagatattgaatccagcttgtgcgtcctgattaactagattcagggatcctgcttagtcatccaggaatcccaatttgggaatcactcatctagatcatcctgtgcttcccaacccaaatgctccagcccacatgtgatatctggcctctgcctcagaaggtcccagaatacagtttacatgtcttgtcctcttttcccaagtgccctcgtgctatccacggctaatcagcgcagccctccctccacctgtgtggcccacccggaaaagtctaaagcactgggttctagtgtgggttctgccactgcctgtgtccaagctcagcctagtccagtgtgttgtgcctgcattacattatttaatcctcaccacagctatatgtaagacagatataagtaccccatttcatagatgaggaaacaggcctagagtaacttgcccagcattacaggatgggatttaagcctagagtctttttttgtgaccttttgtgaccttgggcaaatcacctcacctctgaggccaagttgcttcatctaggacatttaagatgttaaactcagggcctttctaactttaatcctctgggatctagtgccctgtgatccaaaacaatcactacccaccccctcccccaccccatccctaaattgggaggaaagcaatctgtttatctgagtcgagtaattcacagtaaagtgtgaatgactgtaagatgtatacttgcattttaaagaaattgttaaccaaatgaatctctaattgatggactctgtcagggtcccagatagagctcagcctgcctgttcccctccctcctccccgcaactccctctcagtcactttcctacccttcacttaccccgccctgggggaaggtgtcaacaaacaggtgtttgtgaaatctcttgccttcctcactttcagtggcattaatttctttgggggcccaaatataaccaaagaaattgtaaagcgtggccccagatctttccatgaggactgggcactctgtcctcagcttaccgcactgcagtacggcctgttgcttggaccaggtatgtgctgtgtttgctgctgtctcctggatatggtttaactgggcatcactctgcagtgctccactgaggcggtttctagagcaaatggttccttgggaaccctgcagagaccaccctggccacatggctgggcctgctgaactgcagcacagtgagcgtgacttcagtgctgggggcttggagagtgtgctttgggttttataggtgaccttgtttgccatttgttgagcagaatttgttgtaagaaaatgagccatgttatcatctactctgcttctttaaattctttattcayttcatkagctctgtcatactcctactgcaaccaaacagtaaatagaagtcttttaagttaaaatacatactcccttctcatgataaggtggaaatcagccattgaccaaggtgagggggtagaaggaaaagctccgtttggtctccattgcctttgaagccatgtcttcaggctatcttagggtcagatagaatgagtgctaggccatctgaaatacctgttgcagatgttagtacagattgagcatcccagatccaaaatgctccaaaatcccaaactttttgagcacctacgtgatactcaaaggaaatgctcattggagcgtttcagatttttggatttgggatgctcaaccagtaagtataatgcaaatattctaaaacctgaaaaaatccaaaattaaaaacacttctggtcccaggcattttggataagggatacttaacctgtactaagctgtattccagtataacaaaacaaaacatcagcactggctctgaagtggcccaattgtgcataactggcaccagcctgacgtctgtcctcagcaggctggagagcccgtcagctctggacatcaacccactggtcctaggagcctccctgcctctgcctctagaggtcatcctgccttgccaagtgcctgggtctggcaaaaatgtttcaaaggggacagggaattcagaggtccacctgtacctcttttctgttgaggaaatccccactgtaacaggaagacatgggccaaaaaatagctcttattcttcataatcaggtatctagaaatgccgctccggtaggcaggtaccaccagcctagctgctctcaaaacatcatagcttcagaaagcaacttgtaaatctcagctagtgccaaattgcttatcttggcactaggcagccctgtattctatatgtagacagtgaagactgagatcatggatgccacacattccagtttagtggtcattaagcacctgtcatattttggacatggggttagcccctgaagatctcgaggtgactgagtgagtggtagccccctgcctagagaagtctgctctgcttaggagacgtgaccagtcccaaagcagataatttcacaaacaggagctgagtagtccttcctgttttctcccacccctgtaagggctgtttgtaccagagcctgtgaatgagaccagaaatgagaaacagcctagaagttgagacatatgttaggcaagactccgtggaacatgctgctctgttcattctgaccggaatacttggccctttgtggtcagcgtcaactaaaggccaagattttacctcccccttcccccaccgaagcctagctttactcccctcccccagcctctcccatcggccttatcctgcctccacctttcggtttcaggtgcctgactgtatayaggcatttgagacctgtgggaatgcccggcagcacttatagcctctgaactggtcaagggaattgagtaaggaaccaaattcagagtatttctttgtctcttttatctggcctcagggccagcagggcaggtttctgcaagtttcactgttaagctgcttttccccaaaggccgcaaagcagtctgggagagcgggaagcagattaaattaatctcagtgtgctgagcttggcagggggcgagattgtgttyrgtcattccaggaatagcccaaactcctttgttactaaagcagatgaggagctattggtctacaagatgactgcaaagcgaagtagctgtgaacctttgtatattcataaaacactctcccatctgtcccttggattctgtctctcctttgatctgccctgggttacaatggggagtggtagtttctaatgtggtgcaagagttttttagtgtgttctctctcttaacaagatcttttttaaaaaacaacctcaaattccaaaaagttttgcttcccagagttaagcattggctctgtagcctttgagctggtgaccatatctgctcacgaatgtatctggcatgaagacagactctgacctcaagagtgatcttctgtcttgcagtgaacattaataggcatagatctgagacaggagtgggggatggaggcagggaagtcaagcaaggatagagggatcccacaaaagacaaggtcagaggggggctgttttctgatgactatcagcgaaagaggcaggaggtgggagtgatcccagaattaagaggagaatggattaattccatggaagaattcattaaactgaaacaagggaattaatactttctacctatgctctcagtcagagatgtgactgtctttaaagcaaacacagaaaaccaaaaatcttaccaaccagatctcttacatgactacacctgacagatgatgcttagtattaactaggtacctgatgttaaaagatgtgggcagagagggcctaggatgattacgaatttgtagcctttttatgtaagaaatacctgaaagaacagaagggctttgtcctggaggagagaagactgtggtcatgagtgacatccttcatgacaccaggagcattctcaagcattttctcgtaagctagcacgcactgcctttcactggctcattagtcctcacagcagcactctaaggtaggcgtaggatccttatttcacagccagtgaagctgaggcttagagagggacaatgacttgcccgcagttgactcaatgatagagaccagtctctaagccaggtctaagcccgtgtctctgcctgttagacaaatctgattggccttgttctctgtgagtttaaggaacagaacgaggataactgggcagaaattaatagaaagacagattttgggctcgttatataaggaatcactaatgagccgtccaaggtgggaacaaactgcttccagagtagtgagtttctttgtcgctggaggtattcaaacaaatgccagaaaatcattgggtgggcatattatagaaaattttcaagcattggcaagagatcgaaccagactttccaatcctataattgtataatctgcagttcattagactcatcagggaatattttttaccaggctctaattgggaggaaatagccatcatctaaaaaacaaaattttagctttcatagtaatctatgttagtaattcattttaaataaaatagatgtttcttagcatatgcaaaacataaaagcagagaaaatgtaattgtgtaaaggcagagttaaatatttaaaatttaaaagcacagaaacttaatttgattgaatcatcaactcagtcctcctagttattcatagattgtgagggaaaggggttttttctacgttctcaaacatggatgtgagggccatctggctgcaacacctgtcaccccattgatcggcagagttgattccgctgatctggctggctacgcaggtgtccccttcctccttcactgctccatgtgcrtccctcctgaaccagcagctgggtcaaagaggacgaccatcccgtagaggagggccgtccctcagtcaagggcatacgagtagctgccctcccctgctagaacctccagacaagctctcaagttctcagacacctttgcaattggaaagactaattctaaaagaaaggaaatgtttccatctctacagaaaagccaaagctgtttaaaaattttttttcaagtgaatataggcacttaatggaaactttctaacttactggtataactgtgtctcaaacaaacaaaaaaaaacttcattggtcctttctcttagatggcccctgctcagctcagaagtttattatgtagctgaattatggaggactgagtactaaagacatgagtcatagtcaactcttgttcattaaaggtttatcctggtttagttagcattagaaccaccagtaagaacatgagcttgaggctgggcgcggtggctcatgcctgtaatcccagcactttgcgaggctgaggcaggtggaccacctgagatcaggagttcgagaccagcctggccaacatggtgaaacccagtccctactaaaaatacaaaaattagccgggtatggtggtacgtgcctgtaatcccagctactcaggaggccaaggcaggagaatcgcttgaacctgagaggcagaggttgcagtgagcataggtcgcaccactgcgttccagcctgggtgacagagtgagactccatctaaaaamaaaaacaacaacaacaacaacaacaaaaacatgagcttgagtggaccaagacccattatgaactagtcataaaccatcttttctttccccccctccccccccaagatagagtcttgctctgtcgcccaggctggaggggggtggcgagatctcagctcactgcagcctccaccccctgggttcaagcagttctcctgcctcagcctcctgagtagctgggattacaggcacgcaccaccatgcctggataatttttgtattcttagtagagacagggtttcaccatgttggccaggctggtcttcaactcttgacctggtgatccacccgcctcggtcttccaaagtgctgagattacaggtgtgagccgccatgcctggccctaaaccaccttttctcaaacgtgtctgttttgacttttccatactatataattaagcacaaagaattcctattctgtggtgrtattatggatctttaacatgaaatatgagcatcttcatataaagttttatgcaaagattacttaacaagtgtgctgaaatcacttttaaagtatatatcactcatacctcactggggtatgctttatattaatggacttgttgcaataaagaaatggctttttcttttcttttttaggaagttccaggttaaaggcagcctcagctcacggggcagttgatggtggtagagaacagccctgggaagggggcgggagagagttacagaagtgaggagatgaagtcttgcacgtctaagacaatgagacagctcatgagagatgctgtttgaagtggaagagaggaagttcactgtcgtgtggttgtgtataggcatgtaatctcactttctggagcactctgttaggtcttttagaggaaggctagcaggcccatggggaaggagaattaggaaaggttgtccacagagagacagaggatctatgatttggtgaggatcagattagataagaagctgacatctgggcatgaggactgattttgagagcactcagctcagcagaaacagcagagaaaatctcagcctctgcctagcagccttcttagcagagaaatggaatttctgcatatttcaatgcactgaccccagatgaccagtctctgaatagtcaaatatacatgatagcctttacttggggttcagcacccacattcccttggcatcaatttctggggttcagtgttttgacatttcacagggctcttaaaatccctcctctaaggaacctcgtagaagcttctctttatcacactcaaagccctatacctagctcagcttcttgtcctggttttagatgtcaccttgaatacttttctccctcaaactgagtattaaccttatttgttcaaatcagtatcgaccaaggtcttaactcctcaaagatagaattcccgtctgtttatccgggttaactgttcatagcacggttgggaaatgaagaaacactgctagctgattagctgcatgcgttgttgtggaactgactatactcatacttggtgatgtgtccattgaaactgtgccacttttaaatgggtcactgaggggaggggactgcttggtttgcattgtcgcttggccccacggtaaaagccgggcgcagtttgagtccttgctgtccctccctgggcgtggactctggttctgatctcccctgctttgttttcctactctctctygtgcagagacagggcagggcattgttcatgcactgaccgacctcagcagccccggcatgacctcagggaacggaaactctgcctccagcatcgccggcactgccccccagaatggtgagaataaaccaccacaggccattgtgaaaccccaaatcctgacgcatgttatcgaagggtttgtgatccaggagggggcggagcctttcccggtacggactacttcttttccccttttttttttaagtatattttggatgtgtcttagaatatttttacatttccatgtaaaatttctgaaaatgtgaacaatttgctctttccttgctaacttcctcccccaaagaatatagarccatttctttctaggattatctttccaaggtccagaagaggggggtcagtgatcaggaataattgacaagacccttggttagaagtttcccacacaaactcaggtgtgtccctgcctgttgatgtgtgaacccttggttaaaagggagttcactgtgggatatttggtgagagatgatgggttttgggaaattagatttcattgagttttgaatgccaaaacctctgaatggcaaaacttcggccagttaggaacaaaaggaattgcacagaacagaattctcmagatacgtgtatcagaaatgaatgtgaggaaacagggtcacaacctgaagcttgttttctggggacagagccttgaaaggggagttaatgagattgaggggcactcagaaaggtcacgatggaagcctaagactaacaagaaatatccacgagccacgaagatgggttattgaccaaagcacccagagctgcttctgtgcagtgtgcactggagacagtggtgctgccctgtgggtgtggaggagcccagagccagcggcacaccagcctctgttctgatgaaaagtatctggctgttggagaagacacctttctgggataccatctgccttttcytcattctttggttccatgagtggtttgattagtctgcagaagacgcggagcttgattaactgagatgggtgaactgctcctgtaaaatgccaaaagacacatarcttcttgtcttctttcccactggaggttgtccaaggccagtggcaaagaaatctgcctggaacaccttagctagaagtggctctcgctctgttacatsccttccctgttagactgggcctcctagagtaacactagaaaccacctgatctcatggggtggaggcagattgcatagcacccccagcattgccctagagtcggtgccacgtgactggctaccaggctgcctaaacacaggccacaaaaggagatctaaacgcgtaaataagctgctctggggttctgacaactgagagttcattggctctgtggcccagggtctgttttttcctgctatactctgtggcggcctgtacctctggcttgggtcaggcattggggtaaggtggagaacagtaaaaaaatcagaaaatgggtgctgagtctctctctcgtatgtacagcctcacacagactccgctctgtccttgcctggagatgcgtgggtactgggtcttggtgcttgatctggcactgtgggaaacctgatctcagcccttagactcttactggaatagacattttcctaatctcctgagccatccgttggtcctggacagaagccatccctgtactttgcccattagcatcttacctcgtgagccaaccagcaaaatagggccttgagcccagcacacttggatgatgacatgggggamggtttgaggagggctggcctctgtgcctggatactttatacgtgtaattgtgatgaggatggatagcaaggaagccgctcccacctgaccctcacggcctccgtgttacctgtcctctaggtgggacgctcgtccctgctggtggggaatctcaagaagaagtatgcacaggggttcctgcctgagaaacttccacagcaggatcacaccaccaccactgactcggagatggaggagccctatctgcaaggtgggcatctcagaccctgaatctytcggcctcccagcgtggctggaaaggcaggcctcacacacttcctctctctgtttccccagaggaaccctgagccagcgagtctgtaaacatttcccccagcacctcctcagcctccttccctcaaaaagagggataggggaaatcacgggaaccatgtgtcctctgctcccccaatccccctccagccaaccacaggatcccaagaatggcttttcctgtgggaatcattggcaagttttaggcatgactgtaggagtggccccaggcaagtcctgcccttcgtccctgccttgagactggggccagctctaggtcacagcagagaccaggcaaggctgctctttccacatgaagcactgacagagctgcacagctgcaggagcgtgggctcctgaggtcttttactgggtcagcagccagctgcatagatcaaggtgtgatgatgccagcggagcagctgtgacagcatccagagtatttcctgggggctcctgctttcttccacagtcatttgatgctgattcttccccacctgtgttttgcctcagactcagaccacgtggaagaaaaaaatgtcaagtctacaaggggcatccccagacacccttgagtgcattccaggggtgagaaccactggcattttccatgctagaatgctgctgtatgtcacagctgtgggagcaggaggaccaggcaggatggagtagggaggccccgtggtggggctggccacagtcctgcaggaatttctcattctccaccctacccatttctatacttttcagaatccaaagaggagggtgctcccctcaaactcaagtgtgagctctgtggccgggtggactttgcctataagttcaagcgttccaagcgcttctgttccatggcttgtgcaaagaggtgagtggccccagccccctccatttccccaggactgcactttatgtcccacctcctkccattaatagtytaccccaggaggtccataggggtggcttctccagtttcctagttcctcgacccacctggaagcaggatggcatccctaattcaacaagcacgagaagccagaacccctaagagcaggtgggagagagcagcgggagtccaaggaaaagccgcagtgctttggctcggctggccctcctgggctccactggcacccattcgcctttcctagcattgacagcccctgccttgttagggtaagccttacccagaaccacagctatagtgttcccttggtgagctctcgcccagcatagatcactaatggtcatcataaaaaccactgycatttcctgagaacctgctgtgtgctagtcactgtgccagtcaattgatacgattatctcatcttcaaaataactcccaagacaggtattactattgtcccctttatacaggttaggaagccaaagtacaaaggagtagtagtgcctcagataacatagctaataagccatgggcctggggatttaggcttgtccaattctaaagccatgtgtggtctttgtaccacaatggaagcaacagctgaccttgaagccctgaaatcccagaagagaagaaatctctaggtcccagacagaggtgttctgcatgccaagctagagttcggctatcttcagccctcattcccctcaggctgttggagcagccaggccactccccagcaggacagtggacagtagtttcccgtcacagggtaacatttatagtggaataagtcaggtgtgagctttcgccctggtccaagtccaggtgkctcaaacattttacagacattatctcatgttgtaagaccagacctagaaagtgagtggtattacccccaactccagataaggaaacggaggatcagggcttaagtgacttaaacccaaagtcacacagctagtagttagtgatggagttaggatctgaaccaatagatggactcaaaatttgtcagacagcttggctgtgctcattctgcctacggcccataagcacaatgactactgtgacatcccctgttcccctgtccctgaaggtacaacgtgggatgcaccaaacgggtgggacttttccactcagaccggagcaagctgcagaaggcaggagctgcgacccacaaccgccgtcgggccagcaaagccagtctgccaccacttaccaaggataccaagaagcaggtaagaggcgggcagagcctgaagctccatccccacagtccccacagcttcccttccatggccctcgacaccacggtccccwccagctgccgacttcagcgcactctgctgtgctctcattccttgtagacctgtccagtsgagccttctgcaccccagtaggtcccttcatttagacccatgggtgcttacaaggttccctgcccccttccgtggccttgcctcaacatcaccccaccttccagtttgcctccatccttggcttctggggccacggaaatggggtctcccctgggctgctcaggtaacctcctgccttacgtggagggctgggtgagaaggcagcctccaccctttgttttgccacctttttgcctccctgaacacgcgagcacagagttcttgaaggtctctaccaggaacatgggtattcagtcattaaatattttttagcaccagctgtatgccagaaactctgttaggcactaggctctaaggacacagtctcgccttaaaggaactccacagcatggtgtgatgttttataaccttatgtataattttgccttattttttttttgtcttaaacctccttaagaatggtccaaagctgtgtacgtacagaagaaatgttacatgctatttcaagtggctctgtgatcacctcctagaactcagagccctgctttaaaactcatgtttagaaaaagataattgcagtattgtgtggtagacactacaatactaagagggactaactctgcctagggtaggagacaggacagcatggaagatgctgttagatctgggaactcagatgtgtagtagtaggccaagtagaaaaaggagaaatacctcctttgttcatcactgctgctagagatggtttgttcccccatcctgaagaaaactctctgctcccagccaacaggcactgtgcccctttcggttactgctgctttgcagctaacacacagccaggaagactccagccgttgctcagataactcaagctatgaggaacccttgtcacccatctcagccagctcatctacttcccgccggcgacaaggccagcgggacctggagctccccgacatgcatatgcgggacctggtgggcatgggacaccacttcctgccaagtgagcccaccaagtggaatgtagaagacgtctacgaattcatccgctctctgccaggtaaggcccttggaaattccatgtctccccggaatagcaaggaaagagaaaatgrgagaccctcccaccaccaggaggattaggtagtttagttaatgactcaggttcaggaactggggtgcagaaatgagtgagatgagctccctgcctataagagcttgcttatattcagcatagaatgcaaactataaatattccatagctgtaattctgtatattttctggcatgggaagtgatctgtgtgaaatacagagatgataatgtaattaactgtctctctctcctgggagagattaggaggggagtcaggtagagtgtaggatatgtgtcaggaacatcaaaattaagaaaatagccaggtgtggtggctcacacctatagtcccagcactttgggaggctgaggtggaaggattgcgtgaggtcaggagtttgagaacagcctgggcaacatggtgagacctgtctctaccaaaaaaaaaaaaaaaaaaaatttaattaagaaaatgtaaactaaatgacagtagacagacaagtatgcctttgctggatggagagactgcaagagggcgcacatgcagaggcatgaagatagggaagtctgtggtatggccagacatggcacagagccctgcgtggtggagcacaagtggtggtgaggcccgggatctaggagccagctgtaagaggcaagccttacatcattcacagatgccttcagtggggcctggatgcattactgtttttctgccagtctcactcatacaccgaccaggtcaggtattcatggyaaccacaagcctctttctcaagagactgcagtgtggttaagagcacagacttctgagtcacacagaactgggttcaaattctggctctgtcacttaacctagtatgttatctcttcatccccaaaatttttattacacagttgctgtgggtaaggaattcaggagtggcttcctgggccgttctgcctcaggtgtcttatgaggttacaattaagatttatcagccaaggctgaggtcacgtgaatactgaagagctgtgggatctcttccaaggtgcctcactcacgtgatttgccctgggctggctgttggcaagaggccttggttcttgtctatatgggcctctccagagggctgctcgagtgttctcatgatatgcatggcagtgggatgtccccacaggtagggatccaggagtgcaaggtagaagccactgtgccctttatgatctagcctctgaagccacgtactggcattttcacaatatatttttttaattaaaatttttcacaatatcttatgggtcacacaggtcagtcttactcattgtgagagggcatgaactgggaagcaaggattattgggagccattcagagacaagccatgtagttcaccatgacccccagaaatttgtgttccttcctcatgcagaataccctcaccgccaccaaatccccgacagtttggtcccatgacagcatcagtttgaagtccaggctctcatcattgaggtgagatgaggctcctggggtccagttcttcaagtataggtcctctcagtctgaagatctgagaactagagagagaggctatctgctcccttccacaaacccaatgcacagtgggacagccataggataaccattacagacatgcccatccaaaaagggagaaacagggagcgtacaagagtcgctgatccattccagttccgaaatccgctagggtttatggtggcatttcctcaattgggactcaaagsctgggagtgatttctgtcttggttctgccctctgagttctccttccttttctgtgaaaagtagcctgtattttcagtgtagtcgttttctcagcctgcttcctcctttttattttatattacctttgacttttttgttttttgtttttgagatagaggcttgctccatcacccaggctattgtgcaatggcgtgatctcggctcactgcaacctccgcctcctgggttcaagcaattctgcctcagcctcttgagtagctgggattacagacattcgccaccacacacagctaatttttgtattttagtagagatggggtttcaccatgttggcaggctgstctcaaactccttacctcaggcgatccacccacctcagcctcctaaagtgctgggattataggcgtgagccactgcgcccggcctacctttgactcttaaaatcagtaattcagtatttcttaaaataattgtgggttttctgggaatcttgttggggtccattccattagacaaaaaccacacccagaattatcttcaagggtaagctgttgtctgcattggtattcttctgaagctgaggggcagcatggacagtgcccttcacattcttagaaaccctgctgttgaaaagaggatctgcgaggcatgcctagaaaatccgtcgagagcctttggattgaatagctctttgaggcatcactttagatctttctgaagtcttcacaaaaagatttaagtcacatcctaagtttaatctgtagaccgtgttttcttgactgtgccctgaatttgatctttgcctagaaaccatttcttaatgttagcatcatgtgccatctggagaggctgggcatttttaaaaccggcagatcccggttcctttatgttgaacagttttgtttgtttgtttttaccttctctctctcctattttactgtgagcagcagtaagaagccaagcaacaccttccacattctgcctgaaaatctccttagctagaccacccacttcatgaggtacattcaacttacatttctgctaccaaccacatttttacaaaatgttcttttatttcataacagagaccctgtttcttccaatctccactaagagtttcctcactttcctttaggcctccccagcagcttccctaaaggccatgagacttctatatacagtctctcaaagcaccttagacactcacgctttccacagagtccttctggctcctgcctgtggccagttctgaggccacgcccacatctatagagctgtttgatgtcagcactccttttccaggtaccagaatctgcattagttacctattgccatgatgtaaattattccagaactcagtgactttaagcagcaatcacttgtcatctcaagggccatgtgggtcaggaatcgagtggctcggctgggcagtcctggtatgaggctcctggtgtccagttcctcttagtctaagaactagaaacagagaggttatctgctcccttccacagacccagtgtatgagtttgaggtcatatgaggtctcagggaagacgccatacaggctgcagtgtctgaggtctggagccagaaaacccacttccagcacggttcactcacacggcaaggaggccggggaccaccagggccttggctgctctccacgcatgcctctccaaagggttgctggggtggcttactggtagctggcttactctgcagtaacccaggcagaagagtgaggtgagaactgctgtgccctttatgatctagcctcagaaatcacacgctgtcacttcctcagcactttagtggacatgggtccgcccagttcatggagcaggggtctgaacaggggaacataggaggaggcccagatcgcggctgctgtgggtgagttgcacagcctctctcaagctgcaaaataagaacagcagcgccttcctcaaggcgtggttatgaggactaaaagaaataatggatgcagataactagatctagataactagatgcagtggctgccagaggtgaacactggcggcttggattgacactgtctttggtggtaccccctcaggctgccaggagatagcagaggaattccgtgcccaggaaatcgacgggcaagccctgctgctgctcaaggaggaccacctgatgagcgyyatgaacatcaagctggggcccgccctgaagatctaygcccgcatcagcatgctcaaggactcctagggctggtggmagccaggattctggcccagggcgcctcctcccgactgagcagagccagacagacattcctgaggggcccagaaatggggccggttggagggcaggggctctccctaggggcatagctggtgaggaggtctgggcacctcctccatggctctcaggggcctttcatttctgtgggaggggcagagaggtaggtggcacagaagatggggctttatgcttgtaaatattgatagcactggcttcctccaaagtcccaatactctagccccgctctcttcccctctttctgtcccccattttccagggggtatatggtcagggctccccaacctgagttgggttacttcaagggcagccagcaggcctggatggaggcctagaaagcccttgccttccttcctcccacttctttctccaggcctggttaactcttccgttgtcagcttctcccccttcagcctgtttctgcagcagccagggttctccccmctacaccctctgcaggtggagagagagaagctgggcccagccgggccgtgcctgctggcacagacgccttaacgctgtgtgtatgactgtgtgactgtgtgggagcctggactgacagataggccaagggctactctctggcatctccaggtgttttgtagcaaacagccacttagtgctttgtcctggactccactcagcctcaggatggggaatagccaagaatggcagcctcagcgcagaggcaaggtcagaaagagacggcgcttcagagtttcctttccagacacccctcccygcactgtgaagttcccctgaccgccctcctggttcacaaagagcattaagaaagctgcggtggtctgagcaacatagcccaragggctgagcctcctggcctgcctgcccgcccaccctgggagtcccagtggtgaggctcagagaactkytaaggggaaagaacagctggagtttctgttgatgtgaagaaggcagctcttggcctcccactcccacacttctttgcctataaatcttcctagcagcaatttgagctacctgaggaggaggcagggcagaaagggcragggcctgcctctgacctgccgtgtcctttgcaggaaggaggtaggcacctttytgagcttattytattccccacccacacccccaggcagggttggaaatgaaggacttttttaacctttgttttgttttttaaaaataaatctgtaaaatctgtctctttggtgcctttctcccctaggaatgcctgtctctgggcccaaatggctacttttcacccatacagacaggtgggtccctgggctggggaagggaccttaagtggatggcatatcctccacacttttctggagctgggtcatttgagggtgccctcagctgcagttcacacggtagataccagctttcttcacacggtgtcccttggagtgagagggtccagaagccctttctgctctgcgcccccctacccgccattcccacttgggagatgatgactgttgggctagcagcctctggacacctggggcagaacccagactctcccatcttccagcacacacctctcgatagagctgcacagcatccagaatagccttgggatggctttggttcactgagcacttttgcatgctcaaatagaaaatgattagggcagagatgaggcatctaagccttgaataaagaaggagaaagggcattccagaccgaggcataagtgcaaaggcacaagcatgaacgtggaagtgcaaatgagaggcaggtgagctggctggattagacgtgtgtgctgctaaccgtgacctgtgttgaccacatgcctctgaaccaggcactgtgctagaaatgagactggggtgaagcacagaataaccatgtgccctcttgcgtggagtgaaatctaccccacatctatggggggaggggaaaaagaggcagcttggccttactgctcctcccccttcatcaggtttttccctaagggaccatttctacctgttaaaaatttaggttatggctgctcacatctgtaaacccagcactttggggaggccgatgtgggaggattgcttgaggccaggagtttgagaccaacctgggcaacatagagagaccccatatctacaaaaaaataccaaaaaatggcaaggtggtgcatacctgtaatcccagctattctggaggctgaggtcgatcacttgagcccaagagttcaaggctgcagtgagctatgattgcaccactgcacccccaacccaggtgacagacaaaaaccctatttttttttaaaaaaaaagcaggggtgggggtggtttgagggtcaggccacaacctactgaatcacagtctctaaaggacaattacttacttgaaagtaactttcaagaaccaacactcacatcttaataactcctctttggaaagcctattaaaatggaactgtcttggaggagaaacacactgattagttgatccccagggggtagaactagggactggaaagcctgtcccaggaggcagggaatggctggcaggaccctgagctgacgggaggaggaggatgctgagattggggagtgagccctggggagcccccaggcaagaacgaacgccccatgtgctgccgcctctcctgctgctggagtgcaggccacgtgcgcaggtgcaccactggcctataggactctgggcagttcttttcactttctggaccttaattttccctttatggaagaaaatgaaaaccaggccccacctgagtttgttgtgtgtagcaaagagggagggaaccaaacctactcctaaaagaagatgtggtgaatttgattcacaccaataagtatccatcttctttagatgaaaagctccaacctgctgcaagtttgcagggtgcacctgcaataggcatttgctattcctgttgtttacacttcacactgaatttcacagacctatttccatcatgatccacaatttaaagaaatatttcccaaacttgtatacacatttcaatatctatcaactgaaacaaacatttcatgaaacaaaacctacccttacgtacaatatagaatattttccattgtattcctgttcgtattttaaaaatcttggtcacgacccactaaactcattacacggccttcagataggtcacaactggaactttaaaaagcactgcccagagtaaatcacaacggttcaacatccacgaatttacatggttctctctcctgggtgactggtgtatgtactggtgtacattctactgagaaggtaaagggctccactaggtgaactgtccaaggtcacaggtgccgagtgcccttcagatctggctgaggctctgtgcagaacggcttttcctgcgtggcaaacaccataccttgattgccagctgttcccaagaaccaaagacacttcccctggggagggaagaggagtctgtacaaaatgacagagcctccagccaaccagaactggcctactcagacccaccctcttccaggtgattggccccaaaagggttgccagccccactccaccttggggccagcttcccccaaaaggttgcatccccggcaggtccctcgcaggcagtccatcctgactgctcctgtgggtgcagctcctcaggtaaagggggaggagctgcttgttccagatctccaggagcaggccatttcttccccagctctaagctgggaaagtttgctccaggccatcctacctgcttccccatatggctctcaaggagggactcaggtgaggggggacaatggtatggagaggaagaaagcttggggacagctgagctaagagggatccagtctgatggctaaaacagtaccaaggggaggcaccagagtgagcccaggagtaccagctgagcctccagtcctggggaaaggtggctccgagaggggacattgccccaggagaagaaagacaatccgtgtgcatggacaccggggtgggggaggttgtattccacaagattttgtagccaatgaaaagctggactccccttgcttcccttaactctaaacccccttggcgagccggaaagcagagacccgggggtacattccctccccgactgtaactgagagctccctctatccccactgggactgatggtccaggactaggaacctgtgcccccttaagacctaatggctgatctttaaccctttcttgaagccaacgagagtggggagcagggcacagggtggagcttgagggaccaccttctgcaggtagaacctgaacaagaaatgtggaggagtggactgatcaggggcctccacagaccacgggctcccaggctggggcataggaggggcaggaggagctggtgggtcccacccagtcctgggtctcagcaccctcccaggcctgaccacaggagttcacaagaccaactctgcctgtgtgccctggctgaggcccagagcccagaataagcatcggtttgccctaccctggttgggaggaggctggtgaagagggtgggacagccacagagggggagaaagcccctccagccttttcctgctcctgtagtaccttacgcagtacctcgcacacctcccacagtgcacctcccgaggcagccttgccagctcccagtacggggtttgaccaggcttctaggaaccagagaagcccagctgcagccagccctccaggagctcagacaggagctgaatagagtgcgaagggaagaagccaagcccacggggagaaataacagggccgagaaccttgtgagatgagcctcagggctgagctaggcccaggtcaaatggaacccaaatgccatgctggaagctctggctgggggatcgggcagtcctactcaaagcccaaccccacccattacccgccgtgcaaatgccttggtgtaaagtgtaaacaggaatggcaaatgcctactgaaggtgcaccctgaaaacctgcagtaggttggggcttttcacctaaagaacacggatacttattggaggagaaacaagctgattagttgatccccagggggtagaactagggactggaaagcctggtgccccaggaggcagggaatgactggcaggaccctgagctgacaggggaggagaggatgctgagattggggagtgagccgtggggagcccccaggcaagaacgaacgccccatgtgctgcctcctctcctgctgctggagtgcaggccacgtgcgcaggtgcaccactggcctataggactctgggcagttcttttcactttctggaccttaattttccctttatggaagaaaatgaaaaccaggccccacctgagtttgttatatgtgtagcaaagagggagggaaccaaacctactcctaaaagaagatgtggtgcatctgattcacaccaatgaggccgcccagccttgcagaggtgagctgtcactgagatctgctccaagcctccatgcatcctctctcacacagtgaccctggcccagcccccttgctgagcgctgccctcaggtattgtgtgtcccctggacagcagtattcacctgagtgtcccaactcagtgcttctcaagctgcagtttgcatttccttgatctttccttctatgttctcagcgattgatcccagtgacccaaatggacccctgctttctcccctgagcaactgcaaccctaagcaagtgatttaacctttctaagcctcagtttcctcatttataaagtagacataagcacagcatctccttcaaggggctgtggtgtgcctttaacaggacaggcacataatacacttggccaggtatccgtctcagtgtctgggattatgcataaggagtgcagacttaatcttgaagaaaatggagttttaagcaaaggagtaccagtcaacttggaagagagaatgaacacaaataactcattcgttgtttcattcatttgctgaacaaataattatcaatagcatgaattatgaggcagaggcataatgagtgaggcagacagtccctagcatcgcttggcaggtactggaggagaggtctgggaaagggacagaggcacatcctgggggagggacctaacggaggagatgtcaaggccagcttcagacaggaggaagctgggtgctgaggaatgatgcggagcttgttggctgatggaaggaagagtgcaatcagaacagaatacagaggtggggaagcctaggagacttcatagtgaagggtaaaagatggagactcggaggcagggtcaggaggctgttataggaatccaagtgagaaacaaggaggcacggataggacagtgagggaggccaggaggggagttttgggcactaggaaggaggcaaaagcaacaacttggctgtcgggagagaaagcaggggtcccacttgggtcactgggatcaatcgctgagaacacaggaaggggagagtgaatggcaggatgggggaggagtgagtagggggacggaggagagtgagtgggagaacccccagggtttgctgatgggctgcatgtggggcattaaattatttgtaacaatatttttatttaaaccagcacatccgaatttatacctgtttcactgttttaatgtggctactagacatgtttaaattacatgtgactcacactatacttccactggatgatgctattcaagatctcttcctacactcatgaaagaacgcggctatacgtgactgcaaaggctcgagtgcacaggcacagatgcttccccctgccagaagcaaggtctgcctctccgtattagttattccttccttttcaccttaacacattagggtctgttttccagagagtacatataaatctacctcacccttttcaatagccatgttgatttctattatacaagttgagcacccctcatccaaaaatctgaaatccaaaacgctctagaatccgaaattttttgagcactgacaggacattcaaaggaaatgctcccactggagcattttgaatttcagatttccagattagggatacttagccagtaaatacaatgcaaatattcaaaactccaaaaaagtccaaaatccaaaacacttttggtccaaacttttggataaaggatacccaacctgtatagagatgcctaattcattgatccagttccctactgatgaaccctggggttgttgcattagtttgctttttcagagaaggctatgggaacatcctggg

SEQ ID NO: 97321 - DNA, 12234 bp, Homo sapiens
ttatgtaacactttcattagagaggcaaacttgacaattatttggaaagtttttaagtgttttatgtttattatttttaatgtctggaagcatttttttttcagctgtatgtacagttgtgttctcttatcttatttacatttctttctcttttttttgagacggagtctcactctgtagcccaggctagagtgcagtggcatgatctcggcttgctgcaacctctgcctcctgggttcaagtgattcttctgcctcagcctccggagtagctggaattacaggtgcccaccaccacgcctggctaatttttgtatttttagtagagacggggggtttcaccatgttggccaggctggtctcgatttcctgacctcaggtgatcacctgctttggcctcccgaagtgctgggattacaggtgtgagccaccgcacccggccccttacttagatttcttcatttcccactttcgttttcagtttgtctgtttcattcagtggtcaggagatggtcaacaagcccaaacagagaggtaatagcaaaaccaagcaaacaaaaaacataaactttgctatttgtattagtttcttgtggctgccataacaaattaccccaaacagactttgaggcttaaaacaacagaaatttattctttcacttctggaggccagaagtctgaaatcagggtgttggcaggactgaacttgctccagaggctttaggggcaatcatcccttgcctctcccagcttctggtggctgctgacattccttgaccgtaaccctccagtctcttcttccattttcacattgccgtcttctctgtatgtgtgttaaatgtctgcttttctcttataaggatatttgtgatggcgtttagggcctatgtataatctcatctcaaaatccttaataacatatgcaaagactgtttttccaaataagtgaacattcacaggatctgggtattaggctatggacccatctttggctagaaatctatttcatgataactgtgtgtatatgtgtttgggaaaggggatttcccccctcctctcttcctcttctaccccctctttcccttccttccttctcctcttccctccctttctcctttccctcccaccctctttttttttcttcttcttctctctctttttttttttttttaaatagattgggtctcttgctgtgttgtccaggctggtcaacataccagattaccagattactcctgggctcaagggatcctcctacctcagccgccccttcccactttgaccccagccccagttaaaattacttgttttggccggccatggtggctcatgactgtaatcccagcagtttgggaggccgaggtgggtagatcacttgagctcaggagtttgaggccagcctgggcaacatggtgagactgtctctactaaaatacgaaaaattagccgagtgtggtggcatgtgcctgtagtcccagctacttgggaggctgaggcaggagaattgcttgaacccaggaggtggaggttgcagtgagctgagattgtgtcactgctctgtttcaaaaataaataaataaataaataaaattacctgtttaattaacagtaagtcaggctgggcactgtggcttaagcctgtaatcccactttgggaggccaaggcgggcggatcacttgagaccaggagttcgagaccagcctggccaacatggtgaaaccctgtttctactaaaaatacaaaaattagccaggcatggtggtggacacctgtagtcccagctacttcagaggctgaggcatgagaatcgcttgaacccaggaggcggaggttgcagtgacccaggattgtgccactgtactccaggctaggtgagattgtgacactgtactccaccctgtctcaaaaaatcaaaaaacaaacaaacaaaaaaacccagtaaatcaaagtctgtacattttaaattaaggacttacggttataaagagaaatcaatttgtttttgtgggtttttttgctagcctgtacagggagttaatacgtagcataaaaagaatgtcagggagctctctgagtctgaatcttttctgattctgagggctgccagattcagaagtagctctttgttcaactaagctctttattcctctaaagaaaaaaaaaaaaggaatgttatttttggatttttaggaggtccttaaagtgccaatccatacattgaaaaagaaattttgagtttaaatttaaaatatttaaaaacgttaagaacatgatgttatatcataagatcaaagtaatgtaacataggatagagatgtaatgaaagaaaaggaataagtagcctaaggtaataatattaggaatgtaattttttttttttttttgagatgggagtcttaactcttgttgcccaggctggagtgcggtggtgcgatcttggctcactgcaatctccacctcccgggttcaagcgattctcctgcctcagcctcccaagtagctgggattacaggtgcctaccaccacgctaattttttttatttttagtagagacggagtttcaccatgtaggccaggctggtctcgaactcctgacctcaggtgatccacctgcctcagcctcccaaagtgctgggattacaggcataaaggaatgtaattttaaaagggagggttttatgctcaattccacataaagaggacaaaaaacttcagacaagggagttcagagttttggattccaccactgtttctgctgcttacaggttcatgaggcagtgccttctcttttgtttaatttcctcaactttaaaataaggattacatttaatgatctgtgatactctatcctttgtagcatcttttgttatatattttcttgcatttccaagagagaatcgtgtctgtccaatagagtgaaaccaaatgtgaagtctcttccaatagcaaattctttaactattggaagttcgttgcttttgcttagagctgtaaaatgaaccaaccctgagtttgtgtacagtgtctaaataacttcttaggaaagagatgacacagccagaaaatcaaatgaatctttctgcctatactgttgtcacaaacagggtaagattttttaggtaaggcaagatcactgtgatttgaaatgcttttccctcaaaactgaaattttttttctaatggaaaaagttgggggcaagaatgaagaatttgtgtctaattttagcttaatgtcttgaacattttttatataagcatttaaaaatatgtatttaaacattttactatacttttaaatgtaagctttgtatctgcttttgattcttatcaaattatatgtaagctattattaaactaacataaaaacatgtattcaccttttaaataagcttgtattgaaatagtttacagttacagtgtagttaaacttattgttcacatgttgtttgtttctcatttttcgtttctgtagacaacaaacttatactatttttaaaagtagagtttgcttctttcccccctgtatgtaattcttgggtgagcacctaagaaaaattattcagattaggctgtggccaatcttatgacctcttttatactttatccaggaacagtctgaagacacatatgattttacagctgtgcctgactgaatatgtctttatcttctcataacccagataacacttggttttattgtttagattttttttggtagcttaatatgtatgaagtcgtatcttaagaatattgcaatttatatttctccaattagtagtgagacagtcttttttctcaagtgccgattgaatctctgtggtttaaactgcctgtttttatcctttgacaggtttatgagttagtcattgtttgctccctaataatagatgatcgggaaatgttgaattggtttggtttatattataaacattgttttatttatcataattcttgcagatattgcctgaatttataatattttaatcttagatttgtttttttcattgcatgaaagtttattttacataattggatttgtcaaattcttgtttatgctttctttgaattgaccataaattcatctcttttccatagtgagataagcttactgttctgttttctccaaagttttttgaatgtttagttttttaatatatttataattacttacagcatatgttgatgtggatattttttgcatgttggtattcagtttttctgacaatgttttctaaatactgattttttctccatttatttcatattttaaatactttatagatttgatctttttttggcatttctaatctcttagggttttttttgtattttttattgtaaaatatacgtaagataaaattaactgttttaaccatttttaagtaaggtagtacccccaccatctgtagttttgcttttggcggttttagttaccttctatcaaccttggtctgaaaatattaaatggaaaatttcacaggcaaataattcatcagtttaaaattgtgcactgatctgagtagtgtgatgaagtctctctccattttgctctttcctgcctgggtcatgaatcatccctttatccaacatattcatgttgtagacacttcccgcctgttactcacttaggagccgtcttggttatcagatcatttgttgaggtatctgcagtacttgtgtgttcgagtaactcttttttgttttttttttttgagacagagtttcactcttgcccaggctggagtgcaatggcgtgatctcagctcactgcaacctccgcctcccgggtcctggttcaagcagttctcctgcctcagcctcttgagtatctgggattacaggcatgcgccaccatgcccagctaatttttgtatttttagtagagatggggtttcaccatgttcgccaggctggccttgaactcctgacctcatgatccgcccgcctcggcctcccagagtgctgggattacaggcatgagccactgcacccagcctgagtaactcttattttacttaatggccctgaagagcaagagtagtgttgctggcaatacagatacaccaaagagaagtgcattaagtgaaaaggtaaaagttctccactaaataaggaaagaaaaaaaatcatatgctgagattgttaagatctacggtagggctgggtgttgtggctcacacctgtaatcccagcactttgggaggccgaggcgggcggatcatgatccagactatcctggtcaacatgctgaaaccccgtctctactaaaaatacaaaaattagctgggcgtggtggcacgcatctgtagtcccagctactcaggaggctgaggcaggggaatcgcttgaacccaggaggcggaggttgcagtgagctgagatctcaccactgcactccagcctggtgacagggagagactccatctcaaaaagaaagaaaaaaaatctatggtaagaactaatcttctgtccatgaacttttgaagaaggaaaagaaattcatgctagtttttctgtcacacctcaaactccaggttttggccacacagtgtgtgaaaactgctgagttaaaatttatcataggtatatatgtataggaaaaaagacagtctatatgggtaccatctgtgggttcaggggtcaactgggggtcttgcagtgtatcccccccttggaaggggagactactgtatacaattcagtggaattaagtacatttacaatgatctgcagtcatcatcactattatctagtctctttatttaaggtattttcacttcaacctgcaacattattgctgttactcttggacaaattgtttaaatctctgaatcccagtttccttgtttgtagcatgaggatgataataccacctgcgtcttagttgtggagacaaaatttgatgagatagtgaatataaaaattacttggagctggatgcagtggcacatgcctgtagtcccagctgcttgggaggctgaggtgggaggattgcttgagcccaggagtttgagaccagcttgggcaacataataagaccctcatgtcttaaaaaaataaaaaaaataaaaactaaaaactttgtgtattatatatgctcagtaaatgatagttctcttatctttcccactattattggttttaaagaatggtgtagacaggttttccttaaatggcctctgttgttctcctttctcccaaaatattcattattwattttgtctaattttcattaagaaatttgtaggtattggagtaaacctttgttcacttctttttttttttttgagacagagtctcgctgtctcgcaggctctatatatttatatatatatatagagagagagagagagagaggatggcttgcttccctctctacctaactgcatgttgaaaaataagcatttgttaatcttaaacatctgtcacatgagtcatacactgggttgttttttatatacgtgtatgcacacattatttgaaattgaaagcaacgtctcaatggatttgaaactattaaaggctattgtctaaaacgtgaaaaatgtataactaaaaataaatgcacatattaatatttaaagtgcataattaagaaaacctattggtgttttgtttttcttgtataccaataattaagccactactgttgacactatttggctttctgttttaacattgaatgagtgaaagtacttcttatatttatgaatttgctgctaaaatcttggccaaaaaaaaaaaattgtctaaaatgtgtgggtgaaaaatgttaatcatgtatgtttctaccttcccccccaaagttggacaccaactatataccgtaggttgcttaaggtgatttcactattgttaaatcaataagataaaaatgaaatagttgtgtatatgcaacattgtgtacagaggagataatgaatagtattaaacgttctcatcttcctttaccttttgttccctaatacctattctaccttttaaaatttcagacttcactgctctttgaattcataattcaaatttgcacattattattattggaaaatcatatctaataaaggttttaggccggatgtggtggctcacacctgtaatcccagcactttgagaggccgaggctggtggatcacttgaggccaggagtctgggaccatcctggccaacatggcaaaaccccatcgctacaaaaattaaccaggtgtggtggcgcacacctgtaatcccagctacctgggaggctgaggcatgagaattgcttaaactggggaggtggaagttgcggtgagccgagattacgccgctgtgctccagcctgggtgacagagcaagatgctgtctccaaaaaaaaaaaaaaaaaaaaaaggttttagttatttccccccccaaaaaaaattaaaaataaaaaaaaatatatatatatataaggcactttggaaagtgtagtaaataaacttaaaatacaatgtagtcagtgagcaaatctatggactaccttttttctatgtgggactgtgtcatagatatccagttaactcctgaatatctctgtacatacttagctgcatgcaaattctctttctaggacctataaatcagactttgccttacttagacacttcttttgaagttgtaattaagagtgatatatgccttgttttcatggaaaacaatttgacctttattctgtgctttttttttttttttttgagatggagcgttagtcagtttcctgtcgcccagcctggagtgcagtggtgcaatctcggctcactgcaacctccgccttctgagtttaagcagttttcctccctcagcctcctgagtagcaggaattacaggcgcgtgccaccacgccagattaattttttgtatttttaagagagacagagtttgaccatgttggccaggctagtttgaaactcctgacctcaagtgatccgcctgctttggccttctaaagtgctgggattacaggtgtgagccactgcacccagcctattctgtgcttttaaacaaacagaacacacacacacacacacacacacacacacacacacacacacctacatatatttaatttctcttcctaagcctaagagctttaataacacattgaagcaacctaatttcttgcttatggccatttacatttacagggtacatagtatgttgaacttgggacaaaacagaaactatgaggtaggaatctaatttgaattttgaaataaaatatttgttactaattatttcccttctaacttctaaagagtaaaaataaaatttatggctgccatattacagaaagatcctgcttttatttttaagcatgcaaaatctcaatagtattcaaaattgtgtggctcttgaatcaaaccaaagtttctattttttcactgtcagcattcacaggtagagaagtgtaaagtcttaggaaatactatttctattctcaatttaaaattttctcagaattctgtccatgaaggcaaatgaatactgacaagctctatttccaaaaaaggtgataaaacaagtgtatttagaaaccagtagtaagaattgaaattagaaaattgtgaaaagacattactttccaaatgttctaaaggtacttaaaagattaactcggggcatgtcttgtaatttcatcagctgtttgactaagttttaatttattttaattacattaaaaatccacttttcacttctgtgttacaactgttgtattacttgatattttaaaagatgaatctcactgaatgtaaaataatgtcaggttacattaatggtaaaaacaaacaaacaaacaaaaaaaaaccgttgaccgggcgcggtggctcacacctgtaatgccagcactttgggaggctgaggtgggcggatcacgaggtcaggagatcgagatcatcctggctaacacggtgaaaccgcgtctctactaaaaatacaaaaaattagccgggcgtggtggcgggcgcctgtagtcccaactattcaggaggctgaggcaggagaatggcgtgaacctgggaggcggagcttgcagtgagctgagatcgcgccactgcactccagcctgggcgacagagcgagactccatctcaaaaaacaaaagacaaaaaaaaaaaacacgttaaattctagaactaatacaaggaaactaatactaagatttttacagtaattctgtacttcttttattaccaagttttgcaatattgtgtcttagttatactgtattttcatctcttgctagtaagtatgacttttgattgtatagcatgcaccacttgtggaaaatggtatgaagtcttaataaaagttttaaacattgataaatgctgggactgtgatgaatacttgcattcttatatttagtatgttctgatatttcaggtctttcagggtacaaattattggaaggcaggagaatactgtattgatggaaactagtatttagatgaatgttttggtagaattacataatttgtggtcattagtgcattttatacagaatgtaccagaatgtatgtttgcaaacttcccacacattgtatgttgccagtagaatcccgggggattttgtaatctattctttccttgtaggcagctttttgttttaaaatgatcaaaattattcgtggtcattgaccagttattttgagatagcaagcctggtttttaaacttttcttttcttttcttttttgagacagagtctcactctgtcaccaagctggagtgcagtggtgcgatctcagctcactgaaacctccgcctcccaggttcacgcgattctcttgcctcagcctcccaaggagctgggactacaggcttgcgccaccacgcccagctaatttttgtatttttagtagagacagggtttcaccatcttggccaagatggtcttgatctcctgaccttgtgatccgcctgcctcggcgtcccaaagtgctgggattacaggcatgagccaccatgcctggccagttcttttcttctaaatgtagaaattatttgtgtactttttattctcctagattgaaaagccaagaagacagagaattttaaagatggaaacaacaaagggtgcttattttcacagaatagatgtagaaaggaatgtctttaaatgtttcccttaaagaaggttttcttgcagcttacagaatttatgtcaagaaatagtagattcttctttttctattataaaatcaatttaatattaccatatttctaaaaagcaaaattcaatattttaacatttattgataatttatatccccaccatttatactaatgtttctatgttttttcttttaaaatgattcttcattattcaacttgatagagcgttttcttactttttaaaacccatgaccccttttgacctgtaagtagtattatgttctcctttaatgtaattcagatttttaaaacgaattagtttttgtgtttaaaaacaaaattaaaccacattattgagtgtgtatacacataaatattttttaacaattattcttaccttcctcctatcagagatgaaatttataactcttcccccatggtggagtggatatcccttttatctcccttgctgaaaatatactagagattgtagttttatagtcatggccttcaattagggaaaacatgtaatgttgtaagttttctatggatgagaactggtcacacaaaaaatcaacaacttggccaggtgtatgcctgtaatcccagcactttgggaggctgaggcaggcagatcacctgacgtcaggagttcaagaccaggctggccaacatggcaaaaacccatctctactaaaaatacaaaaattagccaggcatggtggcgcgcctgtagtcccagctacttgggagcctgaggcagaaaaattgcttgaacccgggagacggaggttgcagttagccgagattgcgccactgcactccagcctgggtgacacagcgaaaccctatctcaaaaaaaaaaaaaaaaaaaaaaatccaacaaatgaggtattgaaggtattccatttctctaatgatgtggtcctattttgttgtttctaatgggatgaaataatatatgtacataatgtacatttagacagtataaaatgaaaaggattgtcccttaaagaaaagatacttcaatttgaaactaagacataaactagtaaaaccaaaaatgtttgatctttcatagctgtgaatcagttttaggtcacattgactgtgttgttctaagctgagcaaaacaagtgcagggaagatagctcctatgagctttacttattgcactctgtaattctgtatcactagttacctgtgtcatgtagtaggagaacttagcttttgaggctctgtgtatgagctacagtgagagcattgagcatcaagtgcttctgacctttaaacttcttttttcttttgatattctaaattggggtagggaataaagctgtgttagagttggacaactttgcatctaattgtaaccttatgtgtgttttctctccttttcacattctggagtgtggctctaaaataaagttgtgttgtattgcaacacgacagagtaatagaagtagagtggtggtatactggcataacaagtttttggttttcttgttatttgtctattttcagtacttgtgtgataagattatatacttactttagctttgtatgtgagttaggtacagtggttggtagaaaagctaaaaacagctgtgactttaattaaatatacaagcaatcacatcttttgggagaagtgctggtttcacttttgttagatagaaatggagtatttcatttttataatgtatgcagctttctaatttttgtctctttgtctcctgtcagtaggacatggtaaggtggacttagaatcccatttttccttttttgtttgaaaatcaggacagaaagagcagggtctgagaacgtaaagattttgcttaaataattgggcagtacagttagtagaagttcattatttcagaattaaattaggtcctatctttggatgattattttctttagttctaaaagtcaaggtttcactctacttatttatttttattattgagatgcagaagaattgagttttccttgaaattgatgacatatagacagatagttggttgtgaatgcatttagttgatattccggtttgtcctatttaaagtgattctgtgtgtctgtgttaacagttatgtaaatg

SEQ ID NO: 97322 - DNA, 12853 bp, Homo sapiens
tttttgagacagagttttgttctcattgtccagactggagtgcagtggcacaatctcagctcactgcaacctccacctcccaggttcaagcaattctcctgcctcagcctcccaagtagctgggattacaggcatgcgccaccatgcctggctaattttgtatttttagtagagacggggtttctccatgttggccaggctggtcttgaactcccgacctcaggtgatctgcccgcctcagcctcccaaagtgctaggattacaggcatcagccaccacacctggctcaagtctctgattttttttttttttttttttttttgaggcagagttttgctcttgttgcccaggctggagtgcaatggtgccatcttggctcatcacaacctctacctcccgggttcaagcgattctcctgcctcagcttcctgagtagctgggattacaggcatgcaccaccacacctggctaattgtgtatttttagtagcgacggggtttctccatgttgatcaggctggtctcaaactcccgacctcaggtgatctgcctgcctcagcctcccaaagtgctaggattacaggcatcagccaccacacccggctcgagtctctgatttttaaaactcttcataatacccctttatccaattcttcatagatggtaataacgtataattggtgacatttcacatcgctttgggcttataaagaatgtattttgacttcaggcatttgtgtttactgtgccatcagcctctagttcattttacttattcttttcttctccaggtttttcgttggaatatacgttgcacatttatggcgattctgagtgtgagggcagacttctgccaggctcagcacagcattttcgctgacaagtgagcttggaggttctatgtgccataattaacattgccttgaagactcctggacaccgagactggcctcagaaatagttggctttttttttttttaattgcaagcatatttcttttaatgactccagtaaaattaagcatcaagtaaacaagtggaaagtgacctacacttttaacttgtctcactagtgcctaaatgtagtaaaggctgcttaagttttgtatgtagttggattttttggagtccgaaggtatccatctgcagaaattgaggcccaaattgaatttggattcaagtggattctaaatactttgcttatcttgaagagagaagcttcataaggaataaacaagttgaatagagaaaacactgattgataataggcattttagtggtctttttaatgttttctgctgtgaaacatttcaagatttattgatttttttttttcactttccccatcacactcacacgcacgctcacactttttatttgccataatgaaccgtccagcccctgtggagatctcctatgagaacatgcgttttctgataactcacaaccctaccaatgctactctcaacaagttcacagaggtaagattgtggcatggtctactttttggattgatttctaggtaaaatcccattaaaaaattctcttagcacaaagccatttattctgtatttggagtcatcctgccaatcctggtttgaattgggttgggttagttacagcagattttttcaagaacattttgtgaaatttggggactgtagagatatctagtactgttttctctgtgttctttctacatttattgacaggtttttttggtcaaacattcagtaatgataattaacatttattgaccacgatatgcacttagcattataacaaacaatgttacacattatgcaacgagcagtgtttgtgcttaaggtcacaaatacaaaaaccctatgaggtgtagctaccattatttccctcttaccaatgaggaaacaggttcagagccatttagtaatttgcctaatggcacatagtatgtggtggaactaatgtacttgcctaggtgtctgacactaaaaaccattctgtatgtacttcagatattctaaccacctttgatgaaaaggcacccccagactacttcgttgtaataatcgtatacaagggtccagaaacttgggtgaaggaaaggtggtagaggtagtatttttatgtcagatccttaatattttttctattggtaggagaaaaaactctttgtacttctttgagcaagcatttgaacataagtttttttttttttttgggagatggagtctcgctcttcgccaggctggagtgcagtggcactatctcggctcactgcaagttccccctcccgggttcacgccattctcctgcctcagcctccctgatagctgggactacaggcacctgccaccactcccggctaattttttgtatttctagtagagacgggatttcaccatgttagccaggatggtcttgatctcctgaccttgtgatctgtcacctcggcctcccaaagtgctgggattacaggcatgagccaccgtgcccagcccttttttttttttttttttttgagacggagtgcagtggcacgatcttggctcactgcaacctgcacctcccaggtttaagcgattctcctgcctcagctcccaagtagctgggactacaggcgcgcgccaccacacccagctaatttttgtatttttagtagagacgaagtttcaccgtgttggccaggatggtcttgatctcttgacctcgtgatccgccttcctcggcctcccaaaatgctgggattacaggcgtgagccactgtgcctgaccagaacataagctttttaatcattcttgggttgttgagtttaaatgatttttcttgctgtatttatggagtagagttagaaaggtgggtgaactcttagtgattttcattttatagatgggaaaactgagaccaaaagaggatttgacttgcttaaggtcacaaataccataaaaaattttatcgcaacttttcaatgaatggctattacagagtttattttaatgggattttatttgtattttgaaacatttttaaaattcctgacaatacttctacctttcttgagtctgtattataagaaggcctttttgtgaaaaatgaagtcctttagcaattaaaataattttacactttagataactaaatgatggacccttcttataggatatcactgtgcctgcttatttatacttataattccctgagcttcttaactttgtatacacagcgtacaagttgattctacgcctgtatgccctcagattgttcagtcacctttaagcctggctgaattatgtggtactattttcaacctgtggattccttggccatagtctccagaagtggcacaggccactgtcctcctgcaactataaaaaagatattggtagccccttgaagataggtagtcactgggttagggattcaccgtagggagagttttaaaggagcaaggcttctggctataactgcattagctgtctttttaatataccactttttttcttaatttcagaattttatttctttaaaaaaagcatgtttatttcataaaaatataaagatacagataagcaaaaagaatttaacaacatttaattgttaataactggcttctagatgtttttctctgcatatatctgtgtgtattcataaatacacatacagataggatcacactatatattttttaaaatctttccccatcttccttggtattgtttttatagctgtcatagtgttcactatatggatgtgccatacttctttaatcattcccttatttttggaccattaatgtggtttctaatttttcaccattccagtttgtggtgaatgtgctgttacctaaatatttgtatatgtctttaattatttcttttgtataaactcccagaagtagaatttttaggttgcagtgtatgtgaacttttgtgtaagttttcacgttatgctaccaaactgccctttagaaaggtgagtctcacactgccactgagatttcatgagtgtccattgaatatataaccacagtgagaacaattctgatctttgtctaaaaatgatatctcattgttttaatttataatagtagatttctttttttttttttttttttttttttttggagacggagtctcgctctgtcgcccaggctggagtgcagtggcacgatctcggctcactgcaatatctgcctcctgggttcaagcgattctcctgcctcagcctcctgagtagctgggattacaggcccgcaccaccacactcagctgatctttgtatttttaatagagacggggtttcactatgttggtcaggctggtctcgaactccttaccttgtgatatgcccgcctcaggcctcccaaagtgctgggattataggcgtgaaccaccccgcccggcctataatagtacatttctacatttttggctgtaggtttcaaaaacaagttccattataattttttttttttttaaaggaacttaagaagtatggagtgacgactttggttcgagtttgtgatgctacatatgataaagctccagttgaaaaagaaggaatccacgttctagtgagtgtgtagtatttaaatttttcaaaacaagttgtatctttcaaacataaatatttataaaactaggccaggtgcactggctcacacctataatcccaatattgtgggaagatcacttgaacccaggagttcaagaccagcctgggcaatgtggcgagatctcatctgtacagataattaaaaaactggtggggcatgttggtgcacacctgtggtcccagctacttgggtttttgaggtgagggaatcacttgagcccaggtggttgagactgcagtgagctgtggccacaccaccacattccagcctgggtgacagagggaaaccccgtctcaaaaaaaaaaaaaaaaaaaaattaaaaacttggtattaggtgggcacggtggcacacatttgtagtcccagctacttgggaggctgaagtgagaggatcgcctgagcctgggaggtcaaggttgcagtgagccttgattatgccactgcactccagcctggatgagagtaagaccttgtctcaaaaacaaaaacaaaaaaaccctggcagtaatacttttggatttttttaaggttgtagtggaaaatacattattgatagcaatctttcaaattcttttggattaacaaattggcagttttgttcatttgtgctcttaaagcctacaaatcatagtattttcaactaataaaaagcaaaatttagtgtgctcttattttaacaacatgtaaatttgcaagttttattttttaggaaattaatacaatatttagcttttgtttctaggctactaatttgaatataatgaaagtaatttccatcagacattcttaagtccatatggaactctgccactttgcaagtacaagattagttacttaatattttgtggataacttgtaggaggcaaaaaggtgggataagaggatgaggagaggtagaaggcatcctcctccagagtaatcagcatagtttctgatactttttgttaggtttctgaggagctttagtatgattagattttttgtctagctcaatttgagcacaaagtgattggaattattttaaattaagttcctttttagcatcaaaataggctgtttccttatagcaaatgggagcatcagattagttaacattttattctttcttccctaagtagttgtctaagttgtaggagcagcttttaggagcacgtaatgaaatgatcttgtaattttagatgtctttgagctgttggtttgattgtgggaaggttatgtagtaggaagagaactggagattttataagtagttaggaagaacgtaacaaggaagatactggtttaaggttatgttcctgcttcttattgagaggtagttctgtagtctttattatattggtcagtggttgggaaggcagttgatgcaaaaagaataatgacctattggtaaggcagtcctcttatatctgatccatagtttcctcatgtccattttggtgaaaataaaaactaaatagccaaatgtgttttaaaaaaatgtgttttagggccctgtgtggtggctcatgcctgttcccaccactctgggaggccaaggtaggtggatcacttgagtccaggagttccaagactagtggggcaacatggtgaaaccctgtctctccgaaaaatacaaaaattagctggacgtgatggcatgcacctatagtcctagctacttgggaggttgaggtgggaggatcacctgaacccgagaggtcaaggctgcagtgagccatgattgtgctgctgtgctccagcttgggtgacagagaccttgtcagtcaatcagtcaataatgtgttttaatagtttggcatggtaataatttgcttgcagtcaaatttctaaatgactttactgtccactgctggaaatcactgggaatgagtgtaaacatgtcaaatgcagccctgtgtttaaaaagtagtaataaaatttaaacttccgaaaataagctgcatacaagtttattttgctgcattatgaatatgttctctagtgagcaaaaatcaacttgttttgacagatggcagagtgagaaaatgactggattgaccatagtctgtttgagtcagtaatgttggtaaacatctttgtgaaatagawatgaactaaagaacttgaactagtttgaggaagataatggtaggcctaagatttattccaggcctttaaatttaggtttttgttttgttttaaatagctgtgatctgggaaatgcaaatcaaaagcacaatatgataccaccttactcctgtaagaatggccgtaatcaaaaaattaaaaaaaaaaatagatgttgtcagggatgtggtgaaaagggaacacttgtacactgctggtgggaatgtaaactagtacaaccactatagaaaacagcgtggagattccttaaagaactaaaagtagaactatcatttgatccagcaatcccattactgggtatctacccagaggaaaataagtcattaaaaacaaacaaacaaacaaataaataaatagctatgatcagataaaatgaaaggtttaacttacacttgaaaaaacaagggcatttagccttaagcttggaatttccttttcccagacagagattttaagagttaatctaattttgctaggtgaggagggttttggaacatttcatggtaagaggatatccccaaataaggcctgtcagtcctctgaatgctcttgcaaaccagacacacattggaatagactaatggtggttttagctgtatcaatttgaggttcagatgtttctaaatgattaatgatttttttaaaaatagacactacttatatgagtaagtgaagcatgttttatattgtttcttaactaggtgcattttagggagtattagaggaagtaagctcttgactaaggtactggttttattgctatttacagttaaactctctagtgacatttataataacacagtcctttaattatggggcgtagttgtcaactcaatcatgtactgttttggctaatgggctacatgaagtgttctagtggtgccaataatgaatgcagaatcaatttaatgctctgtcacttttctctttttcctcccctaatatcttaaagtgtccttatccaatctcattagaatagccttatgtttttaaaaaaattcctaacagtgtttttgcatttctatctttgaagcttagatggcaggagggaaggcttgtaaaatgtcagcccccagtccccctcctccactccccatttgtgttggtttcttaggacctcttgctaagtagtgaggaagataaacccctgcctatactgtgaatgctcgtgggattagtcttaattgaaagatagcccaaataggtgaatacagaaagagaaagggatacttgacaaaatggtctccatttgcccaggaccctgtcatgcagccctgtccttgttaaatggggacatatataatttagtaagcactttaaaaatactcactgcttgccttttaataagcacaaagatggtagtttgtttctgttatgatttactaactattggagatttcttatcagataacctttctctaaagatgtcataacttagttatcttgaattataatcttcaattatctgtagagaccaatgagacaccagttggtatgctttgccagagtggacttttaaatcatgttgacatgtgctgtgtcctctgttactttgtcttggctttaattacagttttgtctattatgtctaattactactctattcagatatcatttttgggagaacactagctcttatgactctgatagagatttctgtaagtttttgtaaattcagatgtgtgcgacactgcattgagaagggtaatttatttggcaaactttaatttcaatcctggatcattttacagcaatgatcagaattgtgttaacaataggtatatatagtgcagttagttcagttaggcctgccgtgtgtactgtgtgcaggtattctgtattaggatgttaatcatggagaaaatatcaatttaatgtaaaaggtcatttcttttcaggattggccatttgatgatggagctccaccccctaatcagatagtagatgattggttaaacctgttaaaaaccaaatttcgtgaagagccaggttgctgtgttgcagtgcattgtgttgcaggattgggaaggtaaactcttacctttattaccctttttgtctgaattcattaccatgcctaagttagttgaaagtttcactttggtagacatttgcatatattatactaaataacattaaattacctgaaaggaaaggaaatgagaggaaaaactagtgtaatgatttctcaaaagagcctgttcatttcatctggttgtctgattctgatgccagcctggattgtgggtgttttatttttctccctatttcaagtaatcaaaagttcaggtcactgaaattggcaacaaaattaaaataattttagagtttgatgaatctatacatggttaattttggactgagatgaatgggaagttaatagatagcagatatctgaactttaaactcttgaaagaagatgtatggacaagaattgactttgatcttaaaaccttttcccctgagcattgcttagaatggtgttgcaacgctgtcatcagcagcagattaaatgccaatttaggatgcacactttgactcaaaacattagtgtaggctgccattgcctcaaggtggtgattactcaagctgttagttctgctctgcccttttgtttgctatttccttttttgtagtgtggtactgtttgttcataaggttagaagttttagtccttatcctgaaggttgaagataatgttgtaacgtgagttggcagttttataactagtagctatcctagttttaggtagcccaaaattggtgccctgtaatgggctttataaaaacatcatttcctttgttaaatttttttaaaaagatagaacttcttctagtcatcaattcttgggcattttcctagctcatcaaaaggattttcttgaaaacgtctagcacctttttagcatttgataaggaaatattaaaatcaattggtaatgaaaattctgacacattggagataagtaatatgtttggtcatttattttactgtgataatggctaaaggccaatgaaggatttttgatcatatctagtgatgagagaatttaatatataatgtgatgttttaaagagtaaagatttcttaaggtttagaatttagtgctttactaaaagtagataatcaggctgggcgctatggttcacgcctgtaatcccagcactttgggaggcggaggcaggcagattgcttgagcctaggagttcaagagcagactgggtaacacggagaaaccccgtctctactaactattaaaaatcaaaaattagctgggcatggtggcgggcacctatagtccgagctatttgaggaactgaggcaggaggatcacctgagctttgggaggttgaggctgcggtgagccgtgattgtgccactgcactctggcctgggtgatagagcgagaccctgtcccctgccccgccaaaaaaaaaaatcatagaattaatgatgatgagatatatttactgtattaggcagataccagctactttagtatacaggaaaaagaaagctcatgcgttgcattggtaatatgcagttacaggtttttaaaaatcctttcactccaagacttatggatacttacatacaggtttctttctgcagggcacctgtgctggttgcacttgctttgattgaatgtggaatgaagtacgaagatgcagttcagtttataagacagtgagtatgaagtttttgtgttcagaaacacagaaagcaagatcatgcatgaggaaggaattatggaagggatattcatttatagtatgggataatttgctttttttggcttgaagtattatttgaagatgtaaaaaatttagagcaagtgatagagactcagtacagctggtttccagattcaaaagttttctaatttggacattatagactgtgtccagtatattgttttgagtatctaggaatctcaaaaatgccccttttaatagattccaaataccttccaaatataattctctgttaggaggaggcaagaagaatgtgtagaggagcagttaatcacctgagactcttttttttttttttgagatggagtctcgctctgttgctcaagctggagtgcagtggctcaatctcggctcactgcaacctctgcctcctgggttcaagcgattctactgcctcagcctctcaagtagctgggactacaggcacgcaccaccacgcccagctaatttttgtatttttagtagacggggtttcaccatgttggccaggatgatctcaatctcctgatctcgtgatccgcccacctcggcctcccaaagtgctgggattacaggcgtgagccaccacgcctggcctcacctgggactcttaagtgatctattcagggacaaaatcaggatggtagtgcacagacaggatcttgacattgatctggaataacgaatcatgctattttgttatccagaattctttgacaatttttgtcttgccctttccctttcaacccttcctttaaaaaaagaaaacgaaagtagaaactattctgatctttattaaatggttaatagactataatgacagtcagcaagaaaaatttttctattccttctaggagggcttagaaagttcatgttgcaacttagctctttaagaattgttgtagtatgggaaatatgctggttttcagctgtgtggaattagaaaggctttaggatgtaaataatgcatttcagtgaatcagacagctctttttttacatgataaagtttgccattcttgtattttcagaaaaagaaggggagcgttcaattccaaacagctgctttatttggagaaataccgacctaagatgcgattacgcttcagagataccaatgggcattgctgtgttcagtagaaggaaatgtaaacgaaggctgacttgattgtgccatttagagggaactcttggtacctggaaatgtgaatctggaatattacctgtgtcatcaaagtagtgatggattcagtactcctcaaccactctcctaatgattggaacaaaagcaaacaaaaaagaaatctctctataaaatgaataaaatgtttaagaaaagagaaagagaaaaggaattaattcagtgaaggatgattttgctcctagttttggagtttgaatttctgccaggattgaattattttgaaatctcctgtctttttaaactttttcaaaataggtctctaaggaaaaccagcagaacattagcctgtgcaaaaccatctgtttggggagcacactcttccattatgcttggcacatagatctccctgtggtgggattttttttttccctttttttgtgggggagggttggtggtatatttttcccctcttttttccttcctctcctacatctcccttttcccccgatccaagttgtagatggaatagaagcccttgttgctgtagatgtgcgtgcagtctggcagccttaagcccacctgggcacttttagataaaaaaaaaaaaaaaacaaaaaacaacaccaaaaaaacagcagtgatatatatattccaggtggtttttagtctttactgatgaaagggtgttcatgttagtttcttcaaaaccctatctaatactaggcaaagtagccaagagccttttgttttgtttttattttgataaattagtggagaaatggcattttaagaggagtctcttctcaacttacctgagagtcgaattcttctcttccctaaccaatgaagctaagtggttatcccagaaacttgtcttctaaaagggaggactccaggccatcaataaagatgtccaggcagtgagcgtactttttacaccctgtagaattgtgggctgtagcgttactctgattttctgtctagtatcagagaatgctggtagcttaaaatttttattttaggacttgtactctgaattttcaggaaccgtcaaaggagcagcagcaaattcacatattttcgacttgagaaatgcttgtggtatgtgttttccaaactgccccctatatgtaaagttcagtttaaccactgattgccttgttattactaggttttttgagattaaaaaaaaaaaatccctggtttaaaaccaacaatgatgcctagtgagtatgtgtccacaggccataaca

SEQ ID NO: 97323 - DNA, 17966 bp, Homo sapiens
caagagaatgagtaaatataatacacatctagaagtccctacctggggttatggggggtggaacagttacaattaagggacgcagggaagagaaacagtagaagcagaagtgaaggaaagggcaaagtagaattaagtagcttacactcaggagaagattctgttttagggctcaagagttaaaaaagaaagagcacatgcaggattctctggcaggaaacagacctcctttggccacaagtttttttgccttcaaggaaggaaaaatgcaccttacattctattattgaaaagtcaaaaaagaacagatgctggtgaaattacggagaaaagggaacacttatacactgttgatgggggtgtaaactggttcaaccattgtggaaagcagtgtgacgattcttcaaagagctaaaaatggaactaccatttgacccagcaattccattacttggtatatacccaaaggaatataaatcattctaccacaaagacacagcacacatatgttcactgcagtactattcacaatagcaaagacatggaatcaacctaaatgcccatcaatggtagactggataaagaaaatgtggtacatataaaccatggaatactatgcagctattaaaaagaaccagataatgtcctttgcagggacacggatggagctggaggccatcatccttagcaaactaatggaggaacagaaaaatcaaatacttgtaagtgggagctaaatgatgagaagacatggacacaaagaggggaacaacagacactgggacctaccagagagcagatgataggaggagggagaggatcaggaaaaataatgaatgggtactaggattaatacctgggtgccaaaataatctgtacaacaatccctgtcatatgagtttacctatgtaacaaacctgcacatgtacccctgaacctaaaataaaagaaagaatccagccattgcctcacttaattaagaaatttaaaatatgtatacccactgctttctgattctttctaagcactaagatacagcatgaacaaacaaaagatttccactctcatggagttttccttctagtgaagacaacagacaataaacaagtaaataattcaataaattatttcagatagtgctattaaaaatatgctatgaaaaaaagcagagtaatgtgataaaacagtgcttggaagtatcagggaagacgtctccaaaaaggtaagacttgaactctcagaagtcggccccaccaagatcaatgtgctccaagcagaaagaactagatgtgcaagggcctcagagtagaacatgccggtgtggatgtagcactgtaaatcaggcagagagtagtaggagatgaagtttcatggcaggggtcaagatcaagtcgaaccttgtagtttgaattttatactagattcaatggaaggacacttggaaaattttaggcaacagagtgccatgatctgatttattattttaaaagttcactttggctgctatgctgagtagatgtagcagaaaagaatagaagcagaaagatggaaggggacctcctgcaggccatgtgaaatgtgatcaagttttggactaagtttattagtgtgaaaagagtagtagagaggaaccatatatatttgggaggaagaactaaggacctagcagataaacttaagagaactctccagaaaagtcaaggctggcggtgttaatttgcaagtcaatttttacatttattctccaactctctcctgggctggcgtgttaactgcctgctgaaatttttccctgaatgtcccattgcagtctccaactctaagtttgtcgaaatcaaacaaagaatttgtcaccttcccacatgaagcagtacctcttccttatctacctatttctatttttggtacaactattcacccaaactccacacacttcagagtcactgtcatccctttgccctcatccccaccccgctacaactaaccaaagtacacaaatcctctttttgcagtatcccttgcattcatttcctcttttccatccctaaggtcaatacttcaaaaaaagcctctaactggtctccaattcatggtattatactccgctgccaaaagactttctcttgaactggatacaaatttctcaatctgatatttgaagtcctcattaatgcagctcaaatccttccttctagtctctcagcatgcttgctaactatgacctgctggtgagccaaattgactacagggcccctaacataccttatactgtctcacgggtttcctcactcctgcttcacatggatgtacattctctatgctccccactggccaaaagtctacccttcctccaaagcccaagttaaacacaaccttcttcattaaactcatcttgctataatctaaacgtgattttttctgcctctaaactcaaaggaaatgttatttagaattttcttagggctcctatcacatacaaccttgcatctgtggattgtggatatttgtctttcacaccagttttcttctacgttatctgaaagcagaagctttgacagtcaccttacatttcgaatagacactgccacaggatcctgcattcagtaaacaccccaaaaacatttgtaaattttaacagactatttacaaaagtagctcctacttgaatttaagacacaaagcatacaaaatcggctttgagctttcagtatattgatattcaagcaggcaaggtaagcacctgagcttataaaacaaatctctaactttagaaggaaaaataacttgttaaccaagggaatatggtagatagtgcacaaatacaaaccacactcacttcattttcctgggcaagtcttaaaatttcatcgagtgttacaaacgtatcatttcctctgactgcatctttctccataaatccaagatgaatatctgttgcaactaatattttaaatgtgttttcatcatcactatattaagaaagaagaaacatttcaatatattaataattcattaaaggatattcaaacaaattgagacaaacttataaaataaataataacagttatagagtaaaatcattttttttagccttagagttcatctgaaaatctgaagtattcaacgttatcattaacattacagttttcctaaccactagttcaatacagaacaaatgtacataaatctttacaaggttctataactgcttcaaaaatttataaccttgttataaccagttttacaaactcatgtaacccaggcccaaaagtttgcttgttttcctcagataaataaacttgttatttatctgacttcgtactcttccaggaaaatcgaagttaatttaaaaagccttcctctaagtttatgagtcaattttatactaatatgcaataatttacattcagggccttgaagacacttgcatgactctactctctacagagttagatttcattaataaagttggccaacacagaattgtttcaatttgaatttggtaatattcaaaggtactttaatgtgaagtagcaatgtaatagttattaatactcttacactaaatttaattgtatgaaatacttttatttttatgatctcatctcaaccctcacagataaagagtcaggcattattatctctgacaaatgagaaggctaaacccagagaaattaactgctttatcacataactagtgacagaaacaggactaaaacccatgatgaaaactcaggctattttcaataaaccacaatgaatttttaaaaaatctctgtatatatctccaaaattcaaatctttacaaacaaaagatatttccacaaacgatttctcttcaaaaacttcaaaaatgatatgcacacagttctcactgatatatccaagaaggtaggtcagaatacttttcaaatcataatactacatgtttctgtagcaatttatgaagtattttctcatgaattctctcatttaagcctcaaaattaatctgaaaaaggtataattattccaattataccaatggcaaaattgaggcaaggctcagagaactgctgacttgcccaaggtcacacagctagtagggtccaaggacttgaaactagggtaaaagactccaagtctaaagtctttcccacataactttttttttttacgatctcggctcactgcaacctccgcctctcgggttcaaatgatactcctgcctcagcctcctgagtagctgggattacaggcatgcgccaccacgcctggctaattttgtatttttagtagagacggggtttcaccatgttggtcaggctggtctccaaatcctgacctcagatgatcccgctagcctcggcctcccaaagtgcacataacttttacagtccttttatttattcccattccattcaaattcatttccagcttatttaatactagaggaatttactctaaaaatcttaaacagaactgcattgactaataagaatttgtcaggaaaattcaagaatatttatcacttcaataatttaagatgaagcctaagaacataaacaatactatatcaatatatcaaattactgcaagactccaatctatagctgcatattagcttccagttaacaaacagataaatatttaaaacattccaaatatcctttttgatgactaatatttctgttcataaacaggttccttatttactgcttattaaataagttttcttttactgtgatcacagttgacgagctttagaaaccccaaataataagggattccagaagtcaggtgcttacagtgcatctgcagtactcatttttatggtcagtcaagctcctctgggaccaggttcttctccaagaacccctgggtactgtactcaaatgtcagaaaatgcactcgattccaaattctagaaattctaaaaacaaaattacatcataaaacacattttttaaaagcctgcacgtatttaaccaacatgatttacgctgcacaaggtacagacgtcttaattagactggcaaatttagaagtctcattttcatctaagcacccactatacttttttttaatgaactgagcatagaaaataatatatctccagtgtacatcctgtttcctagtttcaccaagatgattaaactcctattttcctttcccgtgctcttatgggaaattaatgtatgctaaataaatgggcagaaagggtcacatacggttctggttcaacacacaaacaactctagatgtgcagatatttttaagttgcacgcataggttactctggagaacagaggcaatcctgtatttcctattcaaaccccacgattttttttaaaggacctggctagtttggaaaagggaacgggcccgcgtttaaagcgagtgtaaataaacaaacacgtggtctgcggaggaacacctttaagcaccagcaggatgactgaaaatagccaggtttggggaagagtggctgccaccgcgagacaacccccaccacatctggagctccagattccgtcgggattccaagcctcaacacgccctcaccgcagggaacctcggaatcagaacgctgagcccgccaggacccctcccctgcccactcggcccgctcttcccgaggttccagttaactctgggcttccgcctgggaacctgcagaaacaggagacgaatgcgattcctaaattaccccactgctggactcttcgaagccccacaatcgcgacccaaggctgtcttcttttcgggaagaaagggcaggatccgtgaaaagaaaacaacacggtctgaacttgcctctgagaacccgcagggccgtaaacctgaattccgcgggagagaacggcgtccgtttctctcgcgacacttcatggataacgtagatgcttcaagtccagttcggctctcattggctaccgcacgcagtgagggggcggggaaagtagcggcgaggccccgccctcacgcaggagccaatcctgagcaggctaggagacgaacccggaagtgagatgcaaggcggcgattttcccttctgtcaggtgggttgttattccctgtcccggacctcgctttttgatggaccggcgccatctaagaactcctgagcccgtgggggtgggtagcctgtggacacaggccgagccctgcaggtcaggccgcttcgtggtccccaggtaggaccgaagccgcttctccgctcttggctgtttggaaggccgcaggcggagctcacgggcctgtgagctcccggctggtggcagagtgccggagctggatcccctctccctccctcccagtcgccagaccctctacaggtgtcgcccctaggtccttgagttcagcacatctgcactgctttgtgctgagagcagtaagatgtatagtgcagcgaaaaataatgtagaacttttgaattagaacgtctgccctttcagttccattgaagggtccttgatctarggcaagttgttttaatctatctgaacctccttcaccagtaaggtttatagccccgcctatcactgagttgtttgtaaggagttgacatagttcggatctctctcaaaataggatatgccctttaagttaggaaacataccctgacattcctgatggaatatcaggaatatcatcatcaagtcatcagttttgtttcttaactgtaagtcgggtagatgcgcctaggcttggctttttaaactaaatataccagtaaaattttgtacataattttttgtatctggatctgtaaactcaaaatttatataaagggagtttttattgaaaggaaaagcatgttgggggagagggtaagatctgtggtataaggttactatatttgatataattacaagtgaacttttatttattagcatctgttaagtgtttaatgaattgatgtatggtcatttttgtgttgcaagkttcaggaattagtttgagaatcaaagaaaaagtggaagctccaggagaattaataaaacacagagcaattctgattggatatctctgattccaagggtgtctctgattgggtgactgaaaagccggattggccttaggaatactttagkaaaattcttacattttacaataaagtaacaggwccagaaaagttactggacatgagtaatacatttaaacttgagtttagtgctattgccactagtaataaagtttaataccacattaagattgtatactgttaaacttgtgagattaggtatcaagaaatcagtatcttggggktatgcctaactctggaacttctcagaatccattccaggcaaaatcaagtgacaagactttaattaaatgtaatgctacacatacttcttaatgccttctatagacaagtaggagataaatataagttaaatgtggtccttatctttcagcttataatcttttaaggggctaaaacaagaacaaagttagaggtgaaatgtagcaccaaaaaaagtagaaagcagaaagcgatctaaatgagaggatcaagaaagaatgaaagagataacatcagagaagagccttgaaagactgattatatttcaacaaatagagttgagaggctgggaattcgtatttgtaaattatctattggttattctccttttctttaattgattaaggtttatatgttgtgtaaccctttaagctgatattggtttaaaaattaatatggcagcttagcagaataaacatcagttccttcaggaagccttctttaatcccttaggactaggggaattatgaacctcctgtatactcatggtttctagacaaggtcttgtagtagtacttatcatgttgtctttgccagacacatgatgtctttgccagtcacctacactagagtaagcttcctgaggtgaagacatggatcttgctcattattgaatcccagtacccagaagttggcacataccagacattctattcatattagttgaatgaaggaatgaatgacagccaaaattcagttgaaaacaaggacccaactaagaactatagttgcctatcaataaacaggactactttttaaagcagtgaattttcctaggcctgaaattatcaaagtagaaataggataattagtgtagatgctgtgataaagatatatgtaccgatgacagattggaacagatgtccttttgggggctattccatcttcaagaatccctgattcttcgaaatagtatttttaggaattagaagtttttatttctgctctatattatctgtgtgtctagtttataaaaatcttgaatgcacctgtcttcattgtattagttatacttcaaaacctttaagyattcatcactgttagcataacaccatcatacctaaaccagtagattaaaaataatagttataataatataattgacttagaagaaaacaacaaaagtaagaagcattagaccactattagatcatagtttgttgttttctgtcagcatcagtatttagtgtatgtaagggatatcatgagaaaaacargagtttagacagggtttaatygtatatgtttgcaagacttayctatgcagttgataaagcctgaattattgttttactaawaacttttgtatttgtgttttcagatcttgatgaacaaagcagtcataattcatctctagaaagatttatatcctggcatttgaaatgctttttatttagaatagtagtaaaaaatggaaaaagaaaaaggaaatgatgatggaataccagaccaagagaattccttggatttttctgaacactttaaccaacttgaattgttggaaacacatggacaccttattcctactggtactcaaagtctttgggtaggcaattctgatgaagatgaggagcaagatgacaaaaatgaagagtggtatcgattgcaagaaaaaaaaatggaaaaagacccaagcagattgcttctttgggctgctgaaaaaaatcgggtaaaaaaaaaaattacagagggaagtgtgacagtaggaaaagcactgggttcaagccagaagacctgcctttactgttatggccatcatacctatctcttgattgtgaggaccaaatgagacaatgtacatgaaagcacatattaagctgcaaagtgtcatgctaggtattatttgggggtttaaggataattatctataaagatagcaagcaatcatctatattttaaaatcatttatataaagtcattaggatcatttaggaaagagaggatggaaactaacatttattaaaaactaactataccaggtaccttattacattattttatttaatcatcatgtatccctataagtaatattcttctcttttatagagtaagaaattgagattcaggaatattaatttgcccaggatcatcgaagtggaatgaacatcaaaagcctattccctctgcttggccacttccacctcattttactaagtttccccatgtctgtgttagtaaactaataactaaaagggtctcgcattttaaatagctttttaacccaagagcatgccacatttaaccagaggcccatagaacaaactgaaaattacaacctaaaaggttgtttctaaggttgtattgagaaggaattgagctcttgaatccctagaattccttattaatactttattcttctgttaaaagttttatttttaaaagtttcatacagtgtgtatattggtgtgataatcctacagaaaaatcaagcagttatgttttcttcacagataacacataaaatattaaacagaaagcctatgttattcattggactgaagcttttatgcaataaaccttagttggaccaggagtaaatgtatggtttgatattcagagaatctcattcttagaagcaacaaagtgtagttaacactaacttgttcattcttaaatcagtagtcctctcctccccaaaaagagatcttaaattattttcattttaaagtcatctactaacaagtaagtttttattcaacttaattaaatctaacaccacaagacaattttgttttagttattgttttggtttgagttgagttgaaagatttcttttttttcttctcagcttaccacagtgcggagactsctttctgaaaaggccactcacgtgaacactagggatgaagatgagtatacccctcttcatcgagcagcctacagtggacacttagatattgttcaggagctcattgcacagggggccgatgttcatgcagtgactgtggatggctggacgcccctgcacagtgcttgtaagtggaataataccagagtggcttctttcttactgcagcatgatgcagatatcaatgcccaaacaaaaggcctcttgacccccttgcatcttgctgctgggaacagagacagcaaggataccctagaactcctcctgatgaaccgttacgtcaaaccagggctgaaaaacaacttggaagaaactgcatttgatattgccaggaggacaagtatctatcactacctctttgaaattgtggaaggctgtacaaattcttcacctcagtcttaacaattctagtaattttcctaagtttctaaataccagtgcctcctgtgtgtgagatgtattcccataatcaaagttgacgtcaaacatcttactacaaaaattcagtgacattcattataacattcttccaagtgaattgcctgactttratgtcaaaatgtatttgaaagtaatttgcatatatctttaattatttctgtggagtttgtgatttttttatcagaaataattttaatgtgtgtatacttaaaaacttgacacgggttgtacagaaactggtatttttggtgctgatacaagagaaatgtatttttaaatatcccacatcctggatctttgttgggtatttagtatattgacatatatttttataaggtgaggtaactcagaacttaatttaaaagtcttaaatattctgatacaattcagctgtcttctctaccttaccatagccagttgctttcattttaaaccagagcaagtaacatattagtgacttgaatcttcataagttaaagtaaaaaacagcaaaaaacctagatctttgtcttttagaacacagaccattttcaggaaagcagttagctaagtgtttaattcatgaatattgtrtactgcatcccctaccacaatttacacaatcctgtggatagtcctacctcaccctggtcaacctacatgatccttaagctaatggcgaatcacgatgaccttgtagacatgcacacaactatacctttgtccaacagatcataatatatctgctatccaactggttttacctgcctaatcctactgatttgggcactgcttgtatagtctctcaagttcacaggaaatgttgattttctaaggtcctcatttttacagagtatacaggcmaagtgacaggggaaaaggaattagtctaagagtaaggggatgattattatattgaggctaaaaccacaaagtggctcaggctttaaaaaaaaaacactgtggataatgacaaaaagcataagtaaaaatatttgagaaaaataaagtacaagttttgaacaacacaaaaggcatgaattcattttttacctgtgtatgtctttcttggatccagaacattattcatccagcacgcacttagttatttaacatctactcactcagtctctccagcagcaattttgcattgtctatctagccccyctgtgattgttcccaaagttttgtcttctcaacaccacaacactccaggggaagggaactaaaccagttgctctttacttcagttaaatttttaagatgtccaccaaggcttatctctttcaagccatcctacgtaacccagtcaccctagactaagtaataatgttatttaatcaaagattaaatatttatttttgcttagaacttattagatcatctcagaaaagtcagagataatatatgaactgaatcatcgtgacaacaggatcttgagagttagtgctttagtttatgttgtgatctcttcctagggagatgctttgtggcagaggttgctttctgtttaatctggcctaagttagtggcaccaaatgacagatacagctgacaggcagtgatgatagaataagaccttatttatccaagcagactgctgaatgaggttgcttagcctgaaagtcacagagctgatggctcctttctcacttgagaatggattgtacccatgattccatgtaaactttccattaaagtatggagccaaagaagtcttgtttccaataaggacctaagatgtgtctattcccttgttttcagacctcaacactcactcactgatgctagagagcaaactctacacataagacaaatcccacccctgagggcagaatttgtattgtctgcttcctttatactttccagagcattcactagactgctctgtgcacagaaggcagtcactaatcgtgctttgaaaggattacttctactttccagtttaggccggctaaatagctcagtttacaaacagaattttctctaatcttggaaagtctatacaaagacttattaaaaaataaaatctgagtttttcataactaagggtttaattttgattaacatatgcttgaggaagaggtaatttttgtgactgttcaagattcatagcgtcattcttaggcctaaagtggaactagttgcctttgcttttatgaatcttaaatatgcttttccagggagccttccaacccacagcctaccacagtggtgggatttagagtctttatactacaatatgaagacatttatttgtattatttgacatctattatgttatctaacactatgctggaaaatcatgatcagaagaagcccagagactatactgagatttatgtcccataccaaaatgaaatctctggatcaactcttgattcctgatcaacacatacaccatcttcaccctacctgcaatggctctaggaatttatgcaactgcctacaaaataatatcaccaaatcattatgtctttgctataattagtttatcataagatgctccagtccatctgtaggattactagatgaccactcaatttgttcaatatgaaatgctttctctaaaggatatttaaggtctatctttattaagttcagaagagagtaaaccaagaaggattaagtgtagctgattgatgttttaaattcctggaaatttccctttgaaactccaaaattttacttctcagaacctaagtggaaatgatctaaatcagtgccaacacatagaaacatgggcctcatgtaattttatgtttttagcatgactattttagatacctcatataagaggactcatgcaataaggacagaattgcattttatggcacacaaacatagataagcaaaaatcctagtagttgaaaatcgtaagagccatattaaaaacaggtgaaattaattttatatatatatgacaatacatccaaaatatgagatatatatttaaaattttttgagatgttttacttttttttgcagtaagtcttcaaaatacagggtgtattttacagcacatctggatttagtcacatttcaagttctcagctatgtttgtctaatggctactccattgaaagcacagatctacatgcctgaaatcattccctggaggcacagaaggatggttacacagagcattaaactctgagtgagacaaactgagttcaaatcctcagtgccacctgtgggtcactttgggcaaaaaaaaaaacccctcggttttctcataggtaaatcagggataatatctatcttgttgtaggctagtttgttatttaaatgtaaaaatcatatggtgttatttattttgtcaatttctttaatactttaaaaataaatatcaatatgaaatacatcgaaatcatattgtttttttaaaaagctatgtgtttatcaatgtcctccagtcatcttttatgaatgaaatagtctcatctgatcttcatgaaagttcttatatatatataagatgtggtacaccaaacctctgtgacaatattaatagctaacaactgagtgctcactgtgggccaactatgctgtatgtgcttcacgtgtgtgataccatgtgagcctcacaacaactctctgagataatcattgtataaaaggaaatcaggtttatagaacttacacggattgcccattgtcatgccatgtgcgcatgatggaggtttgtctatctgattctaccacctttcctcttcaccatacactagtatttgatatgtatttgtaaagttgattaaagaatgcatcatttggtgcatgtttagtgtatcttcttaagttcccagaaagctcatgttcaaatgtcacagctttttacctgtggtgtttttgaatattatctgtataccaccagtttgtctatcataataaccaaaattccattttctttaatattatttttatgtagtttatttatagtagggtttgaggacataacaattactatcaggagcacaagcaactgcatttgcttttaaagctgcagtttatattttttgaatttggttacttgtatctacttttaaatatgcttgccatttatccacatatgaagtatatgttgtacataggctataactaaatttatttatttatttttcaatttttgttttttttctttttgagacagactctcactgttgtccaggctagagtgcactggcatgatctcagctcactgcaacctctgcctcccaggttccagtgattctcatgcctcagcctcccaagtagttgggattacaggcgtgcgctaccatgcccagctaattttttatgtttttagtagagactgggtttcactatgttggccaggctggtctcaaactcctggcctcaagtaatctgctggtctcgacctcccaaagtgctgggattacagacttgagccaccatgcttggccactaaatctattaattatattccccttccatgtaagattccatacttatgtgcaaatttcttgttattgtgtgaagaacacttaacatgagatctgccctgttaaaactttagttcatagtattttttttatctataggcacaacgcttgtagatctctagaactgcagagattctagattgtacagcagatctctagaaattattcatctcgtataactaaaactttatactcattgaataactacttcccgtttacccttgccccagatcctggcagccaccattctactctctgtttctaggagcatgactattttagacacctcatgtaagagaactcatgcaataaggagagaattgcattttatggcacacgaacatagataagcaaaaatcctagtagttgaaaatcataagagccaaagcaatatttaaaaagaaaacacggtggctcacaccatccaacattttgggaggccaaggtgggcagatcacaagatcaagagatcaagaccatcctggccaacatggtgaaaccctgtctctactaaaaatacaaaaaaattagctgggcatggtggcacacccctgtagtcctagctactcgggaggctgaggcaggagaattgcttttgcttgaaaccaggaggcggaggctgcagtgagccaagatcgcgccactgcactccagcctaggcaacagagtgagactccgtgtcaaaaaaaaaaaaagaaagaaaacgttaaaatcgggatttttataacctaattttaagactagctatacttgcagtgagccgagatcccgccactgcactccagcctgggcgacagagcgagactccgtctcaaaaaaaaaaaaaaaaaaaaaaagactagctataaaacaacagtattgagacagtgtagtattggtggatggacatgtggatccatagaacagaacagagtctagaaataaatccagatatagataattaatttttgacaaaggtgccaaggaattcagtgggacattctcttaaacaaatggtgctggaacaactgaatatcttcttggaaaaaacatgaactcatttataggcagaaagcagttcagtggtttcttggtcacggggacagaggttggactacaaaagggcagggagaaccttttggaggtgatggaaatatgccgtagcttgatcgtggtaatgattttgcaggtgtacacaactgtcaaaagtcactgggttttaaagagtaatgcagggtttttgtacataagttatatttttatgaagtcgatttttaaaaatagatatccagatatgactaattttattcttttattattttccatggcaagcataagatgacctcatcctcaaattctagggatatatcttcaggggggcctgttatttaaaaaaatatgtttcaccaattcactggaattttaaaattccaagtaacacaacctttataatcagaaggaccaatttctccattaaatgacagaatgggaaacaaaataattgctttaaaataattagtccatttggcaggattcaagaaatttgaaaagatggttagttactatataagaaggatttggttggcttttaatttaaatcaggactgttagaacctacaagaggataccaaagtggttttagcatctacttttccgaagaaaaacgatagcattcaacatcccattgttcattcagttttgctataagacaaactgagatgatttcttgagacctgttttagatctatagaattaaacacaagtaatatgaagtaacttatttactctggtaatatattaaaactttttatttctttgataaagacttcattttttacacgaatgtgtaactttttataagaaaactttagtcttgggttttgtctccatctagtggtcatgttggtcttttccatttacagtcaggcttgggtaaatgatgtatcgcctatactgacagtgatctcataagattataatggagctaaaatttcctatcacccagtgatgtggtagctgacataatgtcatagcacaacacattactcacatgttcaaggtgatgctaaatgtaaacaaacctactgcactgccagtcatgtttacatacaactatgtacagtacacaacactggataatgataataaacaactatgttactggtttatgtatttactataatatacttcctgtcattattttagggtgttcttctacttattaaaaaaagtgaactgtataacagtttcaggcaggtccttcagggagtattccagaagaaggcattatcataggagatgacataggaataactccataatgttattgcccctgaacacctcccagcaggacaagatgtggagggggaagacagtgatcgtgatgaccctattttggccttgactaagtatgtgtttatgtctttgtttttaacaaaaaagtttaaaatttaaaaatatataaataatgcatattgaaaatacaaaaaaagctcatagaatgaggctataaaaatacttttgcatagctgtacaaggtgtttgcattttaaactaagtgttattacaagatttaaaatgtttttaaaaattaagtttataaagtaaaaaaaggacagtaagctaaaggtaatttattattgaagaaagaaaaatatgtttgcataaatttagtgcagcctaagtgaacagtgttgataaagtctatagtagcgtttggtaatgtcttaggccatcacatttgcccaccactcactcactgactcactcagagcaacaccaagtccttcaagctccattcatgaagtacacactctacaggtgtaccttttaaagtcaactataccatatttttaccgtaccgtctctatgtttaaatttcttaagatacacaaatatttcccttgtgttacaattgcctacagtatacagtatagtaacatgttctacaggtttgtagcctaggagca

SEQ ID NO: 97324 - DNA, 15873 bp, Homo sapiens
agcattaaacactatagccaaaatacggaataaacctaagtgtccatcaacagatgaatggataattgtggtatggattgtggtatatacaagcatacctcattttattgtgcttcactttattgccctttgcagatattgcatggttttacaaattgaaagtttgtgacaaccttctgttgaacaaatctactggtgatatttttccaacatcatatgctcatctcatgtctctgtgtcatattttggcaattctcataatatttcaagctctttcattattatatgtgttatggtaacctgtgatcagtgatccttgatgttactatggtaattgttttggggcaccacaaaccacacccgtataagacagtgaacttaatcagtcaacatcgtgtgtgttctgagtgccccaccaacgagctgttcccagttcttctccctctcctcagagctccctatcacatgagaacaacaatattgaaattagaccaatgaataacactacaatgacctctaagtgttcaagtgaaaagaaaagttgcagggctctcactttatatcaaatgctagaaatgattaagcttagtaagaaaggcatgtcgaaagctgagataagcagaaaactacacctcttaagtcagtgagccaagttgcgaatgaaaatgaaaggttcttgaaggaaattttaaaaaatgctactccggtgaacacacaaatgataagaaactaaaacagtattattgctgatacggagaaagttttagtagtatgcatggaagatcaaatcagccattacattctgtttagccaaagcctaatccagagaaaggcggccttagatctctaattctatgaaggctgagggaggtgaggaagctgcagaagaaagcttgaaggtagcagaggatggttcatgaggtttaaagaagctgtcttcagcattaacagtttggaagaagtttatttcaaccctcggtgatgacttggagagcttcaagacttcagttgagggtatcactgcagatatagtagaaatggcaaaaagcactagaattagatgttgaagatgtggctgaattgctgcaatctcatgataaaacttaaatgaatgagaagttacttcttacagatgggcaaagaaagtggtttcttgagaagcaacctactcctgctgaagactcagtgaacactgttgaaatgacaacaaaagatttagaatattacctaaaattagttgataaagcagcacagagtttgagaagacatattcaaattttgaaagcaatactactgtgaatacaatgctatcaaacagcattgcaagctataaggaaatgttttgtgataggacgagtcaatcgatgtagcaaacttcattgctgtcttactttaagaaattgttagagccacccaaccttcagcaaccactaccctgatcagtcagtagccatttacatcaaggtaagaccctccaccagcaaaaaagattatgacttgatgaaggctcagataatcattagcatttttagcaataaagtttttttttattaaggtatatacatttttcagacataatgctattgcaaacttaatggactacagtatagtgtgaaaagaactgtaaatacactggaaagcaaaaaatattgtgtgatttgccttcttgtaatatttgttttattggagtggttgtaaccaaacccacagtatctctgaggtgtgcctggatacaccagagaataccattcagccttacaaaagaaaaaaaatactgtcttttgagacaccatgtttgaacatgaagaacattatgtaaagtgaaataagtacagaaagacaagtacccaaatactgcatggcctcacctatatttgaagtataaaattcaaactcatagacatagagattaaaatggtggttaccagaggctgggatatggaaggattgaggagatgttgatcaaagaacacaaactttcagttaaaacataaataaataaaaataatgtagaagaagtttgttttccttgcttatttgttttccttgcttatttgtttaatcattcgatgtgtatgtgtgttttgattcttaacacacaattattccaaaaaaataaggtgctttgaaataaaaccaactttcccccatagggctatttattttttaaaaaaatatcatcctaatgtctgcatttataataaccatttatttgttttaaaaatatttacttaatatctaaaacctaccaatactatggtcttccttaagaaattgtcacagccatgcaaccttcagcacacgctaccttgattagtgagcagccagtactaggctaagcactttttaaaaaaaatattatttatttagagacagagtctcactctatcacccaggctggagtgcagtggcatgataccggctcactgcaacctctccctcccaggttcaaatgattttcctgcctcagcctcctgagtagctgaaactacaggtacatgccatcatgcctggctaatttttgtatttttagtacagacagggtttaaacatgttggccagactggtcttgaagtcctgacacaaatgatccacccgcctcagcctcccaaagtgccgggattataggcatgacccactgcacctggcctagcctaagcactctaaatatgcaggaactaaagcagaaaagatttgcctttttactgaagtgaaccatagaaaagtgtatgtgtgaggaggggatattaactcaaggctaattatgctactgtttattcaatagattgaaatgttgcctttgttgagatgagatactgtataattcatattgtttattcattaaataaacaaaaataccaaaaatatagccttttagacaatttatctctgtgcttttttattttcttgtgtgtttgcatttagtttcatttctattctttaaatctcagaaattcattctaaaaatggatttgaattcttttttgataaataagccataaactacataaccaagtcaatttaatgttccatgattagatgccacttttctttttaaatcacagcaggattcatataatatttaaaggaaatacgtctatgctttatagttgaaagaagaacatcaacaaatattttggcattctgttgtgcaaattttccaaatatgaaatgtttatgttttgcttttagagtctttattcaattttacttaacaagcattaaattttatgctatgtggagaatattaaatttatatgcagtctttaataccttacacaaacaaactgccttttttcccacagggtgaaaatgattttatttttcagcacatacacacaatcagtaaatcatacacattaaaggcacagaactaaaagttttccttgctttaaaaccaacagttagcctgaacccctggggtgcttttgtcaccacactgtcattcacacatcccatgggagatgtgggttctatttctacatatctggtgtatataactacacttcaagaagctataataaatatatagcaccaccattcaatgttctgcaaagacagaaaattctacacttttttcaaggaaatattacaaaaacaattctgcacaaagcactaacacagtgtcacacaggaatgaacgaaacctcctcagtgtaatagagagccatttggatgtgtaaaatcttattggccattctgacccagccaatttaacacagaatattctgataaagccttaaaaaagactaacatccaattattattatgtgtttgtgtattattttatgttatcattaaattattattattttacgttaaaatttatttgttcttccattcctcgtttcaattctgtggattaagggtgaggaacaagtcaggggtgtttgtttaatatattgcttagtaataaggatagtgttttggcattctggctgacttgcattaaatatttaaaacaaataactagaatttaggctgggacccaagttggcaaaacccactgttacatactgagaatcctggctgttgcataagcagaattaagaaaatttgagtacaaaaggaattttctaaaggaataatagaacagttgcttagtctatggctaaagaaatacagagagctgctaaacttagttttatttattttgcaaattttaggattcatgtagaaattcaagacttatctttttacattaccatacgaacaatttttttctttgctttgctaaatattaaaattttaattgaccatgacacagaagtaaaattatgaatttttccactattattgtttatttatttttcttttctcaacttttattttaggtccaaggagcacatgtgcaggtttgttacatgggtaaattgtgtgttgctgtggtttggtgtacaaatggttttattacccaggtagacagcatagtacccaacaggtagtttttcgaccctcaccctcctctcagcctcctccctcaagcaggacccagtttctattgttcccatctttgcatccatgtgtactcaacgtttagctcctacttataagtgagaacatacggtatttggttttctgttcttgtgttaattcacttaggataatagcctccagctgaacaatttgaataagtaatacaaattccaagaggtttggtctcaaaaagtctagagtttaagaagaatattttttaactcctgtactcatcattttcccttatcaaagtaaagcatttctttcacaggttatacagtaatacctctattaatgaaaaaaagacatttgaatatcacaatttgtcatcaacaattttgtgattaaaataatagttgaaggcattggaatgtattctaggaagagggagaatagggaataggatacagaagatattatttgtaattgttactttttttaaaaaatgtagattctagtgccagggtttggactgctacaccctgttgtttgtcaagtgctatgagatcagagagaagaaaatgatatttgtttagtttcctaaaaataaaaacaatcacttattttcttctgaaaaaaaaatgtagattcagggggaacatgtacatgtttgtcacatgggtattttgaataatgttgaggattgggcttctggtgtacccatcactcaaatattgaacattgtacccaagaggtaatttttcattcctcagagccctcctgccttccctgcttttggagtacccactgtctactatttccatctttatgtccatgtgtacccactgtttagtgcagacttataagtgagaacaggtgatatttgattttctgcttctgagttagttcacttaagataatggcctccaggtccatctatgttgctgcaaaggatatgatttcattctttttcatggccatatagtattacttggcatgcatataccacatttttaaaataaaatcaacagttggtaaacacttaggttggttccatgactttcctattgtgaggtactgtgatgaacattcaagtgcaggtgtcatttttaatataatgatacccagaagtgggattgctgggtcaaacagtggttctatttttagtcctttgagctatttccataccgtcttccatagaggctgaactaatttacattcccaccaacagtgtgttccttttctctgcatccacacaaacatctattgtttttcaactttttaataatagccattctgactggtgtatgatgatgtcttagtgtggttttaatttgcatttctccaaagattagggatactgatcattatatcatgtgtttgttggctgcttctatttcttcttttgagaaatgtttgttcatgtcctttgcccactttttttttctttaaaggctttatttgcattcttgtaaattttattatttcaagtcaatgtattaaaaattactgcgcatatagttattgcttttataaatttgttttccgtgattccttcaaaagctttcttattgttggcattttctgcagagaagactacagttttacagcttatgctaccatttcttatttgaaaataggacctaaagctaatcttctgaacaatgaggcacatgctattactgtgcaagtgacaaagtccacacagaactctttcagggtaaatggctattaattttcagttttatatattttaaaaagtatattaaagcctatgggatgcttttctgtcatattcccctaggtccagttgaacatgagaaaagtcagttttctgattagatttctgggtatggaagagagaaaatatagttttctgtaaagatataagtgaaagaatttagactggccttttaacataaactaggggtttccagtttcttggaatgggaggactctgttttaatatctaattttgttatgcactctgctcttatttggttgtgattactaatagttgagaagtctgtttctgctgttccagtggttagaaaccactgttttaaaccaaatactatcaagtctgcaaaagcatgtcaagtcaagtgccattgtgtctaaggacatttgaggtctttagaacttctctcacaatgtagccccttttattcaaaatagagctcatatttgaatagaaatttgtagataaaaaactagacccctgtatacttaaaaagccaactgatacagaaagaatattttgaaatatttaatctcatgagaaaactgaatagctggatttttaccaaggtgcttgctttgttattttttttttttgtaggctgaatcgtctcaaacttgtcattctgaacaaggtgataaaaagatggaggaaaaaaattcaggcaacttccagaagaaggctgcaaacatgcttcagcaatctggttctaagaatacaggagctaagaaaagaaaaatcgatgatgcctgacatgamtgttactaaattttctaattaaagatggtttatgcatgtatatgccactatttttgtagttagacaatagtttttaaaagaatttcatagatattttatatgtatggatctatattttcagagcttatctctgaagatctaaacttttgagaatgtttgaaaattagagatcacgattatataattttccagtataaaacaagggaaaaatttttatgtaaaaccctttaattgtaaaatatttgagaataagttcatataattgtcttaagttttttatgcctttatatacttagctatattttttcttttgacataactatctttttgaaagcaatattatactgacagaggctcaatgagtgatactttaagttaaatatgtagatcagggatgtccaatcttttggcttccctgagccacattggaagaagaattgtcttgggcctcacataaaatatgctaacactgatgacagctgatgagcttaaaaaaaaaattgcaagaaaaatctcatgttttaagaaagtttacaaaaaatgtaaaatatttgagaataagtccatataattgtcttaagttttttatgcctttatatacttagctatattttttcttttgacataactatctttttgaaagcaatattacactgacagaggctcactgagtgatactttaagttaaatatgtagatcagggatgtccaatcttttggcttccctgagccacattggaagaagaattgtcttgggccgcacataaaacatgctaacactgacgatagctgataagcttaaaaaaaaattgcaagaaaaatctcaagttttaagaaagtttacaaatttgtgttgggctgcattcaaagctgtcctgggctgcattygacccgtgggctagagttggacaagcttgtagatgatttcaggttataaaaccagaagtacaattcaacaaaaaaggagtaagtcatcaatataaatattagcaaacgagatattgctacatctctatttaaagtaaaatacaaccgattttaaagttcctgaaaccacagccatattttgacatttcacaaagaatggttctaatctactagagtacatttggctaaatagataacttacctaaatttgctccaaagctaaatcacaagtaaacatatttatgtttaaaacacagaaataaataacttaagatttttatccaagtggtcagtgttgtattggaaagatatatctataaataaactttgaactgatttcaaacttagaatttatgtttttatatttttccactaatatcattatcacttctgtaattttcagtgtggtcatcattaactcaatacagtcattcattttattgacttgtgatttttctggtgtcatttggaactttatatgattcttgaagaaattccatttttagtcaaaataatcttctatatcaatatttggatctagcagatcttctccatatgatgaaagattcatttggtttaagattaggttttcaaatgtttcttctaaatcagtttcaccaattaagaaagctcccatcattcgtccattttgcatgacgactttgatgtattcttgtcctttggtacatctcagcattaattcatgatctgaacctaagccctgtgcattgtattttcccagcagtacaaccttatagttaaaaaattttgtcacatgagcaaacagttcaaagctgaaatccatgtcaatagagtctcctgaactcgctgcagccatgcactttgctgcataccatcccatctgtctagcctgggtccacagcctcatctgctgccagactgggctcagctgccaggatgtagtacagatgtcaccggcagcatagatatcaggaagggatgtgtgcatatgatcatccactttcaggccaccatcttctcctagatcaaaactgttaccatggagaaaaggttctatattcggtgtaactcctgtagcactgacaatgaaatcgcagccatatatcttttcattggtcaattccacatagacaggccacatctctgtattagttgtaactgacgtatggtctcttggaaaagtgaaggactttttcttcaaaattctaaactcatcctgaaggtagattttctttacttcacacatagyttcaaggtgaatcttatgagaaaactcttttgttcctttaagattcaagccttcatgccaatctggtcccaacgcactgcctacattatctgatttagatttgcttctagcttcctttttccttccttcagttgtatatctggttcttttatatgcaattttagcctctgatttttcagcaatgagctttgaagtcaagaattcagctgctcctgcatcgaagaaagtattccctatagctttatctttaatggcccaaatcacttcacagccttcaatttcatacactaactcaagtgcgatacmaccrttccctaagatcattattcttttagctttagtaagctgtttctgaaattcctgagcactgtctgtatcacggattcctaatacataaggatttccttcacatatcaactttggtttagctccagcacacagagtttcttatatacatgctgattgccatcttctgttacaatgcagtgttcttcactcttcagttgctttacgccagattctataaccttgatgttgggaaagcgtttttctaacatggtacttgattgttcttcaacatcaaattcttccaatattttagaaatctgcttgaaatttgtaactgctttcataacaggagaagctgttaccaagagaatatcttctgatggaaagtgagtagccaactgctccgcacaagtgacgcccgcgatgccgccgccgaccaccatgaacttccctgcagtcatgggagggcgcgctgccttcatgctgccggactcccagtggtttactgaatatcgcggcggaacagcgagactctggactccaggagaggaagcagccgcgaggcggtcacttccggtgccttatccagagaatccgacctacgggtgctcgggccctttgcccacttttaatgtagctctttatttttttttcttgttgagttgtttgagtaccttgtacattctggctattagttctttgttggaggcataattcgcaaatattttctcccgttctgttgtctgtttgttgatttttttcttttgctgtgcagaagctttttagtttgataaagtcacatttgtctatttttggttttgttgcatttgcttttggggtcttcatcataaattatttgactaggcccatgttcagaaaagcttttcctagattttttttttaaggatttttatagttgcaagtattatgtttaggtctgtgatccatcttgagttgatttttgattatgatgagagataggagttcagttgtattcttatgtgtatggctagccaattttcccagtaccctttattaaatagggtgtcctttccctattgtttatttttgtcaactttgtcaaatatcagttgattgcaggtatgtggccttatttcagaatttttttattttaacaacacctacacatgattcaaaatatcaactacactggggaattattgtatcaagtatcatcttgtccaatccatccactcaatggtataaatgaaaagaaggcatggagaggaagacaacttgcatgacatcacaaggcaaactcgcaagaaggcaaggattgaaccctgacctcttgacctacacagcccaccatagacggctctgtgccagaatatgttttcaaaagaatgaagactagaatgtggagttcagtggaatcccagagctagcacatgaacaagtccatcaagtagcctgtaaatacattaatcaaagatgaatcacagagctatttcaacaaatactccagaaagtatttgttttaacaactttattaatgattttcctccaacattcgtgaaaacattagagatgtaaaggggcccttacattttcagtcgcactgctatattttataagaggaattatatgattgctttgtttccaatttggagatttgagtgctctgggcatatccttaatatttgccaagagtctgctcgacgaacaaagtcaatctgtgactcaataataatcttctgattatcccttggatttgtacagcatgttggaattttcaaagtttccacataccttgttgcattttatcgtcctgcagtggtgtggaacacacaatcacaattactgtaatcacggaagctaagataagggagggttgggtgagttgccagagatcacacagtttataaattaagagagccctgattggggcctgtctcactcagtattctttccatacatggtgtggaaagatgaaaagagtgagacttttgaaactaaaaatggcctgactttaaagcctagttccactacttgctggctgagtgacgacaggctgatcacatggtctctcagggtcttagcatcctcatttgtaagactgggataatgataattttaacagaacaggatcaggatgaatatgatggttaatattgaatgtcaacttgattagattgaaggatgcaaagtattgaagaatgcaacaattctattaagctggaagttaagattgccacctggatattttgagctcctcctacctttagaaggtaagttagggaggctaagaagggagttacagtgtttggttggggtgactgacctggactatcaagatgaaatcagtccactacttcaaaatggaggtaaggaagaatatgtgtggaatacaggagatcccttagagtgtcttttagtattaccatgccctgtgacgtgattaaggtcaatgggaaactagaagaacacaatccaggcaggactacaaatagcccagatccttcaggactgaaggtttgggtcactacaccaagtaaaaaaccatggcctgctgaggtgcttgctgaaggcaaagggaatacagaatgggtagtagaagaaggtagtcatcaataccagctacgaccatatgaccagttgcagaaatgaggagtgtaattgtcatgagtatttcctctttattttgttaagaacatgtttgtgcatgtatacacttgtactaagaaaatatcttcatttcattcatttctcctttatcatgtgacataagatttattgatttcatgtcagcatttaagtgttattactttatgtgatagcacttgggttggggattggtgcatttctggttgtacaaaggatagttgtattatgttatgtgtaattatgaacttattgtctttatttgaagattatgtatgatttcaggagatgtgtatgggttcaagttgacaaggggtggacttgtgatggttattactgaatgtcaacttgattggattgaaggatgcaaagtattgttcctgggtgtgtctgtgagggtgttgccaaaggagattaacatttgagtcagtggactgggaaaggcagacctaccctcaatccgggtgggcaccatctaatcagctgccagcgctgccagaataaaagcaggcagaagaaagttgaaatattaaactggcttagcctccaaggctacatctttttcctgtgctggatgcttcctgctctcgaacaacagactccaagttcttcagctttgggactcagactggcttccttgctcctcagcttgcagatgtcctaatgtggaacctcaccttatgattgtgtgagttaatacttcttaataaactctcctttatacatttatcctattagttccgaccctctagagagccctgactagtacaatgaagtttaaatgaaataatacatatcaaaagcataggccagtacccacatatacatgtacacaacaactactatcaattattattgttgttattaagcattatgacaatgataatgattattcagctggcatatgaaagatactaccaacaggtactattaattatgaaactattaactatgaaattatgttgaagaatttataatacattttatgaagctatataagcttcataaagcttatatagctataagcatggaatgcagattaaaaatacacccttattcagtacagcattttcagtaacagtgaaactctggaaacaactgtctataaatacatttctgcttagttttatcaattaaaaacagttttataaagcataaaaagtgccacataaatcataatatcatgatgaaggttgactttgcactagcaaaatgtctcagacacagataatcagaatttgtctttctagacattcccgtgaacatgaacaacgtgtaaaaaactccttgacaagatgatagagttcaactgaagaaacattccttggaagcttgctgtgctggtgaaaagcacgtgggttattgggatatggcaaggaagtgccccaagacgggtaaaggaaagttcaaaggcccagaaggaaaagaaaaattgcatacttagagcactgaagaaaggcccatatgatgatagcagaaagcaaaacgttattggtcagggtcttgtcaggttacagctatactgactgagttatgaccattggaatgtgagtttagcctatgtgattctccacttctctctctactctttcctcagtagccatggaggccacttgtctaagatggtaaaatcacaagataggagactggattccacagtctctctcgcagcagggctgctcagtagaggcacccaacctgcctcagacctatgatgtgagcaagaaataaatgtttcctgttttaagggactgggatttcacgattgtttgttatagcagctagcaatacttaccttgactaatataccaggtcttggtaagaaatcattttcccccaactccatcatacacttgagatgtgatctagactcgcacctcctccatactaagaatgtggtgaaaagaatccatcaagattctttcccaacccagtctgactatattcactctcattttaattaatatacttcccatttttaggttctatgccataaattaattaaaggcaagtcccaagattaacacatattttaatctataattctgaatccaaagctttgcttaaaggacaaatatgcagttggttttatgctcgttcaacattaatcattatgaattataatttcatatcaatttttatctctttgaaagtaattgtatgtgtagtttgcattccagtcagatggttttaaagcctttcaagtattctctaaataatttaaatggtttcttaaatctcagtgttcacaagcagtgtataaattaatacattatttgagaaaatattgagggaataatccctctaaaaatgaaaatctctagggcaaactatgtattagagactttatttctttttgatgtttattttaacatttaaaattatcatctgacttaattttatagtaacctagttagtattaggaggtgtaagatggaggctgaaagaaatgatgtgtccagggtctacggctcaggaaacagaggtgcaggactaggatacaggtattcttgtctggagcatgtcctttgcctacgtctttcactatcactagagaatgagctttttaaaaacttgcataagtgtgcatgtgttatatgacaccctcaggaaaatcccctatataaggtctaagaatgtctgccctgccatgcaatgtttgcttgaatgttttcctgacatctttaaaataataaatgaacctatataacacaattgttatttggatgcacattggttaatatttacaaattttctacagtagtccctaatttatcataaacattatatatttgttaaattaaatgaaagcagctatacagtgggctagaagtaattttagagcccttagctcagcacctactattgtcctacatactattaagctgtctatattagtttgctagggctgctgtaaggaagtatcacgaattgagtggcttacacaacagaaatttactgccatatgtattggaggctatgagtctgagatcatggtgttgacagatctccattctctctcctaggttctggtagttccttggcttgcagcagcataactctaatttacacatggcattctccctgtgtttgtgtctgtgtccaaatatttccctttttgtaaggacagaggtcatactggattagggcccaccctactggcctcattgtaacttgattatttctgtaaagaaataatagagaaacttatctgtaaagaaacttatctccaaataaggttacattcagagatactgggggttaggacttcaaagtatcttaggaagaggtacacagttaacccataacactcactctcctaaataatctgttcactagattatgggagtggtccgcctgtgatctaacagtccacagaatgcattaagaaaatgctcagaagcagtgaatccatatacccatctaatattacaacaactttcaccattcttgattccttttccaagttttatttttctccttagcacttactatctaccgtactatttattttactaccttttctcatttatgtctatcatgatgataggatgctagatccataagagtagcgatttctatctacatgttccttgctatgttttctaccatgtggaacagtacacgccatgtaggcactctatagatattaatggaatggttaacttatatgaacttaatcaaccgtaagtaaagattattaactattggaaaaatagacaaaatatcttttaatgtcttagactttttaatgagtcaattctctactttcccttcaattttccattacaaagcatattagaataaagaaaaagaagctttgagaagagctatgcagtagtctccgagtggcccagtcaccactctgtaaaagagaaattattttt

SEQ ID NO: 97325 - DNA, 16835 bp, Homo sapiens
tgcttcagaacatcatgtttctggtaggaggtgcccttctctgcctgagagcagccctcagaaatgcattcctcatgctgctgacctgggctggctggttgcagcttggggaaggacttttcattggctaatgttttgaagccaaggacctgcagcctctctccaggtgccaacagagtggtagaggacttttagatttaagtactggagggactattacatcttgttctctgattctaccaaggagagaataagagcagagagggataatgcccaggaggaatttagattcataggttagaaccacatttctcaaagtgagcttcttggagcccttgcaccaagattggataaggtctgtacaaaaagtctctaaggaaagaattaacgccctcacttaccctgattggtcattatacaaggatagtagacaaatggtcagggagagaaaagttgacctctaggacttctgttagcttggatttcccaagggtaagtacttgagaagaactggaaacacctctgagattgaaagggtagattcagaccatgtggaagctggatagacaggtatccagatacaggccaccagcttttccacccctagaaagtagagcttatacacaggcacgagatacacttcacattgtcctctcaagaagttatcttagtggagaagccaagggaacttcagccatctcagcctcgctgtcattttctgtaaaatgacgagcagacaccctcccaactctgctatctgaacaatgaactgctaattcctggcagacaggggccaggctctgcctgggctacagcccccattgctggcatgcactctgatgccatctggaagaagcttgcgcctcatgaagtggctttagctagctccatatttcctccctctgttgctgagcgtcccccatcctttctgttctgccagaaacttagactacttagcccagtccacaagtggcggtgatagaacagctaacagttaatagccaagcagtaggctgaaaattcattatctcatttttcctcaaacaacccagtgaggtgggtactcttatcccggttttgcagagtaagagagagccttagagaggtgagggaggccttaggaacttctcaaaccccagtgctccaggtggacttactctggccttaacaggctcttcggttccatgcatctttgctcattactcccactgccagaatattctccctgccccccacacacctcacctctgtttgaatcctcctcattggttaaagggccagctcaaattctgtctgtccatgaaggtcactgctccgtgatgttcatcagccacacttgctttctcctctgaactgcatgacccttaccacatcctattttgcatcgtggcactctgtgtgcatggctgtacaatcagcctgtaagcacctggattgctgggatcgtgtcctgcgcatctccatatcctcaaaaaaaatcctgtatgtagcacccagggagcctcctgaccaaggcctggaagaagcccttccagcaagacggagagctctacggcaactgttcaagcccgaagtcctcatagctccacatgtaattcattgtaatagcagaagagaagtattcttgaatgcctgggattattcaggagccgggggggacagtccagaattctcatttgtcatccttattcatgcagtaaacctttattgctgagagacagcaaatcagttccctgctccatgtctgtctccagcagaaagtacctccctcacagctccattgtgagggtcaagtgaggcaacagatgaagtggttgtgcacatgtaagatattctttaaaccatgaagacagagcagtcaaggtgcttacaggctgattaggacaaaaacatgtatacaagtttatcgtaatacaaggtagaatgtgggaagggtcatcagggtataggataccataggaaaatagagtttctcacacatggaataggtttggcaggaggagctctagtgcaaaggctttgcaggtcagttagactggcaggaacagagaggatcagtgaggcacaggaaagccttggttctgctccaaagggattttccgctcttctgtatcaggagcatcctcactgctctcctgggatcacgtggtcagtcagttgagtgtttcacatgtacagggcaccccaagtgctggagaggaagaagcccagtctctgccctctagtacttgggatgataactgctgccagggagtatgatcaccacctggtgtcagagctggttgcaagaggcttgaaggctctcaaacttccaagggcttattttctaacagaaagagtggattgtgaacactaacacttattctactatgcagaatgcaataagtggcttaagagagttgaacctgcttctcagaatgttcataggggggtcatttgctggaaggatcaggctggtcttcatacaggaggcaagtctggagctctgaaaaatagcctagggagtggggaggatggtaccctcagaggaaaacctggggagatcaaaggaagtgacccaagggacatgtccccgacaagaataggacctttcttgcagcggagaatagacaataacaacttgtaaaattgctgtttctgtctaagagcctgctaatatcctagagaggattttgcatatgttatctctaatccttaaaaccactcttcaaggtaggcacaacccccactttacagatgaagaaatgaggttaggacaggatttgcccaaagacacaaagccagttgatgggggaatcagaagtcagacccacatttgtttggttccaagagcatgagaaaaactttaagaagtacagacgcttccacacaaaacaaaccaagatggacccagaattgccactgccctgcctgtacaacatgagcaccacccactgcatacctactcccaagccttttcaaatctggtacctactttccactgttccacttcacttggcccaccctgtgccccaccccctacctcctccatcccagtttcacccactcctaaaaatgatctccccaccccaatccccacttttctctagcagaaggcccgagacatgtatgcagaggagcggaagaggcagcagctggagagggaccaggctacagtgacagagcagctgctgcgagaggggctccaagccagtggggacgcccagctccgaaggacacgcttgcacaaactctcggccagacgggaagagcgagtccaaggcttcctgcaggccttggaactcaagcgagctgactggctggcccgtctgggcactgcatcagcctgaatgaggctggccacctgccactttgccctgccctctgcctccagggctccactccccttccttttcttggtgaaaggcacctcctttcctgataatgaatggtgttccctttgcttggctggggagccccccaggccaggtttgctggccatagatacctttgggctgcctgggacaggctcctgaggaggattgagggtgaaagtctcccacgagtacactaaacctaggtctggtcaccaatagggtttggagagcaaagggccacaactcatcagctgcctgtctcttagatgcactttctttttccaccagcacatccttcaacacacagaatttcagggaagagttctccccaaaaccctagctctttacccttccattttagccttccacccagcttccacaaaagatttggctctaccttggatctgctagtaaataactaataggcaggcagttatttgggtaaggaaaaaaggggtgggagagacagaaaatttgcccatctgctgctcctcccccttggctctccacctgggatttgctattgaatctctaccctctcccaccacacagtactgattgctcactgaaagactcagcacccccaatggtgcgcggaagccaggcgggcgattacaatccaattacctattgtcgactcagcccacacaagcttttctcctcctcttgcagggcatggggccaggctccactcccaaatgagactggccccctccatggttcagggtaacagaagggcctgtaggccctggtgaactgaatccagcacaggcctcccctgtaacacaacaggactgagcagaaccaaacacttcttccaactgactctgctccctgccctcaccatctcaaactctgattcccactccactcttcgaggtttctctcagctttttgacctggctccctaagtaggccctagatgatttattcttggcatggcaaagcttgttctaggtcctctgcttgtgagggtcaaagctgtgtcctttcccttacctccctctgccaggacttgctgcagagctgctgagaggattagtgcctttgaagagctgtctgcctgagcaactctatttcaggtgccccacaccggcaagtaccagccagcaacaccaaccaaatgctactctctttaaagtccattttccttcttctttttttttttttttttggagacagcatctcaccctgtcctggctggtctcgaactcctgacctcaggtgatccgccggcctcaccctcccaaagtgctgggattacaggcatgagccaccatgccagacttcccattttactttctgcaagctgtttccctagcagctccctctaggggagaggtgaaatcttgcaagttgtagcaagagcacacaggaaacccctaactttcctataccccacccgcctcttcccctttctgtcccgggatacctggcggcaagagacttcttggctattgtccatgctcccagaatcaagcataaatgccagacacggcgattgagaagccaatcagtgaaccctttggcaaagcccccatccacacctggcactcccctctaccaatccctggcacagggttcctggagagcaggtgctgtacattttacagctttacaatggggctgttgacagccataattagggaggcatgaattatgcggctataatgcagagccctacaattaaggcgggaatgaggggctggaggcagcaaacggaatctgccctatgagcgtggctgttgagtcctgtctcctgggtctgactttccgtaatatgattggggtacagtagaggtgattaatggggctggcatctctctttggcctgaggttctgtattctgggaaaggtacacagggtggagtagggagaagctgccccaggaggcgatgtagtggtggaaagaagaggcagagaggtcgtcgtcgtcgcccagcagcaagggctgcaaaatagtagaactcgtggttgctttggacaggtgtgatttgtgcaagccaggttcaacccttgcctcaagaaatcagatgggaccaatttagtgtccttccacctgtgagccaagcccccatttgaggacatctatcgtattcttgtgtgctgggtctcaaatagaatttttaaagattcttagatgtaaaacttgtttgctaactgcaacggaagaacaccttcttttgctgctgcaattgcctaccctccctcaggtgcacttggctagctccaagaccctggctttggactagggggcaccggaagagcccttttgccatcacaccacctgttcctctacttgtttcctaatccccgggcgctttcctccaccctcctttcctcgcgcaagtgaaaggcagccagcttgacagtgtggaaggagggatttcgccagctgcggctgcagtgcccaggcttggtggccgcgtcgggttgggcagctgggcaaaatgtctccgagaggggtagagtgtagggggaagtgagtgctggtagacctcgacggccgctctccaccatactgtggcggggtctggaggtttgggaatacagggaccttaagggagccacccgagaggagttgggggtgggggcttcgatagcatttggggaggcggctgcgcaacgggtgctgaaaggacagctcctacctgacccacggcacccaaaaggcacctctgcatggaaagkctccccctgaaacccctagcccacctcgagtgggaccgtctttcaggtgaggtgcacgaaaggcttctccgaagtggcagctcggaaggatgcacgtccggctgcgccaagctggtttccccgcctttttcccacttyggcgtcagcctgggctctgggaactgcagcctgtgcctccagccgcgcgcttcctcctgcttccagaggagcagggcagtgcagccaggcctcgcaaacccctcttctggggcccccagcgggagcaggaaggaaagccgctgagatgcgccgtgagtgtcgcacggcttggagaagtgggttgctgggttgcataaggtggaaggaacttgctagtttgcaaaagacagctcttggcgggagccggaacccggagcccgccgactcgcgcacccctcctcatttactgccttcgacgcgcgccaccccgactgcgcccccaccccctcggcgcgccgccgtctccgcgcactaccccccccacacacccccctcctcactccctccagaggaggtgagtttaaaccccgcccacgtgaccccagctgggccaatgaacggcggcgggaggtgaaatccggttctaacyggtccggggctcccagcgctataaaaactttataaaccccccggagcccgagcagtgtgaagaagaggcgagaacgacccccggaccgaccaaagcccgcgcgcygctgcatcccgcgyccagyacctacgtcccgctgccgtcgccgccgccaccatgcccaagagaaaggtacgtggcgcgagggccccaggcgccgggccaccactgccgccaccgccgccgccgcctccctggtgcagggagcgagaatcggcgccgagcaggagccagcgcagcctccccgcgcgggggctggagacggtgtcgggcagctcggggctaaccctgagcggctcggctgcccgcgggcgccagaggccatattggaggagcggcggccgcggcgggaggagccatgttggcggctgtttatcccgctctcctcgggctcgccgcccccgccccgtgccccctcccccatcgcgagggccccttccctccctctgcgggcgggcaattcaaacccgaaagggcgggaaggcggcgctcggggttggcgggcgggggaaagcgctgccgccaaaaaaccgccgccgtgagggcggggcttgtgcggtatggccccgccccctcgcccacgttccccgcgcacgagacgcgcgctgtcgccgcccackagttccccgggctgcgcgcgcctccctctcccgccctcgacggctgccatagcaacggcgctgggctccgcctccggagggggtttgtttgcgccatctgcagctgttgctcctgcctgtcgcggtggtgcgggctccgctgccctccccggctgcgctccggtccagccctcgcttctcggggtcggcgagccggagctcctgcgcgcgcttcgttcttatacgaacgtcgggctcactcatttatgtcctagaaaagttgtgtggacgactgctttaattttcatttttagcactctaaagtttgggaagtaattaagaaccacctcaraatctgcagttttttgttcttgtttcttataggctgaaggggatgctaagggagataaagcaaaggtgaaggacgaagtaagtcattctctcttcaagggtcaaagccttggactagcagaggccactggactcggtgattaaccgtaacctgtgtcctgaatttacactcctataatctagagcaaattgataccaaactttcaaagcgacttacctgtcctatttctaactttctcgttgtctttaatagccacagagaagatccgcgaggttgtctgctgtaagtgtatgcttttgaattttcgtgcttgtccctgaaactaaaaaacatcaaaaaacaattccctttgcttccatgaattatggttagtgcctggttttgaatcattgcctctacttgggactsttgcccctttgggttttgctggttctgaaattctgatgcctgtagccaaagtgggacatttgagtgggcttctggaaatccaacattctagaagaaagccaaccacaaaaacttttgaggaggaggagaaacttctctacccttggtacttttggttggttgtgggtggttttcttcagtccattgtactgatgttcactttttcctctcttcctgccaaaaaaagaaacctgctcctccaaagccagagcccaagcctaaaaaggcccctgcaaaggtaagtgctaacattggaactgatcattttcacagaatgaggactgtccttagtgccttaacttaattagcataatggtgcctccattaatggaggttataaactgtgtggatagcttacctcgtccgtgtcattcataacgttggtttcctgatcaagaattctgttgttagtttataggaaaatctgcatttaaatattaaataccccagggtttaaactratttattcttctgttacttaggaaattctaagtactaaagattatagcaaattacagataatttagcctagttttgatcagttgttcttgtcaaatgggtgagggtttgtgttttatcttgagtaaacaatcctaccttgtgcagaactttgcagaccataccttggtaatacgaaatggggagaaacagttctattttttcccctttttcagaagggagagaaggtacccaaagggaaaaagggaaaagctgatgctggcaaggaggggaataaccctgcagaaaatggagatgccaaaacagaccaggtataactgctgtttcaccctttgttagatttgttcattcagttagttgctgatatcaaaaatttaattgcccttttcttgtatcactccaaatgtaccatttggtccagtgtgcttgtggctttcctgttwacttaaatcctggattcttgaaatctctactgtcagctgaagggcattgtgttttatactacatgaagttttcaagctaggagtaacctcaggtctcttattctggtgttcttcctacctcaattttacagtgaggcccagaggagaggtgacttagcaaagttacctagtaagtcattctcagaagaaatactgagtctcagtacctgaaacctgaactttggcctgggagcaaagtgatgctgtaggtggaatgtgaacacagatagttttgaaatctacgcattgcattaatttgtctgttttcttttaggcacagaaagctgaaggtgctggagatgccaagtgaagtgtgtgcatttttgataactgtgtacttctggtgactgtacagtttgaaatactattttttatcaagttttataaaaatgcagaattttgttttactttttttttttttttaaaagctatgttgttagcacacagaacacttcattgttgtttttgggggaaggggcatatgtcactaatagaatgtctccaaagctggattgatgtggagaaaacacctttcccttctagttttgagagacttcctcttggctcccaggaggagggattccctgactttgacacacatggccaccttggcacaaaagccttgtggtatagaaaaacaaatttgtttttatgtcctcttctccctttccatctttcagcatagacttaactcccttaagcccagacatctgttgagacctgacccctagtcattggttaccagtgtgtcaggcaatctggactttccagtgatgccactgagatggcacctgtcaaaagagcagtggttccatttctagattgtggatcttcagataaattctgccattttcatttcacttcctgaaagtcagggtcggcttgtgaaaagttgttaaacaacatgctaaatgtgaaatgtcaaccctcactctaaactttccctgttcagagcatcagatgaagacttcattgggttttatagtggctttctgatttttggtagtccattgaagaagggagtttgaaagttgttgtatactgttaacgattgtctgcccatgtcctgcctgaaataccatgattgtttatggaaagtatctttaataaagctggatacagtttggcttggaatgctgcctctgatcttttcccacaagtggggtaacctggtttatccaagtctcttggaacagggtacgttctgctttgaggtactccatgtacagtctaatgatgatctttcactgatttatagtcagcttccaaaacacacagtgctaggtgcagttaggaaggattccaggagtagacttagctgatggtgaaaggctgggagtatggagtgatttctgtacttggttatgcagcattccctgcagtgtttgttttttgcatgactccgaatacatgaagtgtattaaatgcagatttttggtagatctgcggttttggctgggtagctgacaggagcctctctacttccatctgcatttgcaacttctataaaattagcaaattaatagactcatgtcagagagtgtctctgtgaatgtgtacacagttgtccatttgtaaggtagatgacactttgctcctaagtagacctgcaaacaaagacaatggggtctttcctgattcctttagtttggagatgcagagaaccccacgtttctctaagtgaaatggcaagaagttatttgttagaatatggaactggtaacaaattcatgtttgcaccttgaatttgctttcacagacctggctgtattgttggacaggaataaagtaaattggagactaattgctttgtccattcccttagtcaaaaaagtatcgctgttaagttcttgaggttttttgtgtattatctctcaagtgttgagatgtttgtgtaatatatgtatcacactcatggatgaggaatcaggcacagatgaaacttgttgaaggttatgtgtacatttaatgagcagcagagtcaggattcagaccctcaactagacaaaagtcatctctgacagacttttattcaggataaaataccatttgtccatttagccagttaccagccatttactttcattattgctgaagtcattcattctaggttgtagacgggtaatttttattctaaaagcggtgtcctcttccagaggaaacttaagagacatcttagaatggtcaggggtagtgggctggtatttgagcagaggttgcagaatttgagaaagttacagctgaggttctttgttagtggcaagtctgctaagccctgggctatgctaacagctctgcctcatgctctttaatctttgagtcagacctatgagatacaggtgtagccccattttgtagtcgagagtgaggctcagatgtgaagcgactggctgaggttaaacttgatagtctgtttttacttattttctggccctcttcttgttgccatataattaggatgagtagggtaagcttgaactttttcgagtttttttctttttttccttcctggaaaatactgatttgactggctctggaccatgaaagtagctgggcctaaaaccaaaccagacatcaaaacgtggtaaggaccattcactaagacagccatggtagcatgctcagtgccagccctgtctccaggcccattcttaagatctcgggaaaagtcaccagatgcttgggctctaagtaaaaaaaaaaaaaaagtaacataaatggcacaaactagaggattcatctgatacaagtcccgaggtcgggcagttgtgaggacccaggtgggcttcctgtctttctgctctgccgccctcaacatgttctccagccacctcaccttcaaggcagttgctccagacatcgtaatttgccataccaatggcaagaggctggaggactgctccttttttccctgcatttaagaagaatgaaatatttcctacaagcaccccagcagcctgtgtttcactgggcagatctggattgcctctccactcctaaaccaatcatagcaagaggaatgaaaccacagaatctgcctagaccagtcagaattgttggaattcaatagaggagggatgatgatagaggaaaatggctgttgtgtggacagcctgctgcacggtctcttcaggcctggcctgattcattgcagcagttaacactgctgagaattacccctccccttctttaaattgagaaataatcatataccattaaaagtcaccactttggggggagggatagcattaggagatatacgtaatgctaaatgacgagttaatgggtgcagcacaccaacatggcacatgtatacgtatgtaacctgcacgttgtgcacatgtaccctaaaacttaaagtataataataataaaatttaaaaaataaatatacttaacgctcttggggaaaaaaaaagtcaccactatatcattattttaagagatggagtcttgtgttgcccaggctggtattcaactcctgggcacaaagcagtcctcccaccctggcctaccaaagtgctggccaccacacccagccaaaattcacaattttaaagcatatactacagtggttttagtacattcacaacattgtgcaactattgccactatctaattctggaatatatacgtgtgtgtgtgtgtatatatatatataaatatatgtgtatatatatataaatatatgtgtatatatatatatatatgtgtatatatatatatatatatatatattttttttttttttttttttgagatgggggtgtctcactgtgtcacccaggctggattgcagtggtatgatctcagcttattgctcactgcagcatctacctcccaggctcaagctcccacctcagcctcccaaatagctaggactacaggcacacaccatgcctggctaattttttgtgtttttggtagagacagggttttgccatgttgcccaggctagagtcttgaactcctgacctcaagtgatctgcccaccttggcctcccaaagttctgggattataggcatgaactaccctgcccagcctctgaatattttcatcacccccaaaaagctccatgcccattagcagttaactccccatttcttcctcccccatccctagacaatcactaattactttctgtctctctagaccttttctggatatttcatctaaatggaatcaatctgtgttttttcacgactggtttctttcacttagcatgttttcaaggttcatccgtatcatatgtatttgataacttgtactgccaaataacattccattgtatggatatatcacattggataagtcacattttatttactcatcagttgatgtacatttgggtgatttccactttgggactattgtgaataatgctgctacaaatatcatatagaagtttttgtaggcatatgtttttagctcatttgggcacatacctaggaatgaaattgctgggtcatatggtaactcgtacttttttctttctttctttctttttttgagacggaacttcgctctcgttgcccaggctggagtgcagtcacatgatctcggctcactgcaacctcctcctcccaggttcaagcaattattctgcctcagcctcccaagtagctgggattacaggcatgtgccaccacgcatggctaattttttgtatttttagtagagacggggtttctccatgttggtcaggctggtcttgaactcccgacctcaggtgatcacctgccttggcctcccaaagtactggggttacaggtgtgagccaccttgcccggccttttctttctttttaagacagtattgcttttgtcacccaggctggagtgcagtggcgtgatctcagctcactgcagcctccccctcctgggcgattctgctgcctcagcctcccgagtagctgggattacgtgtgcccaccaccacacccggctaattgtttgtatttttagtagagacagggtttcatcatgttggccagactggcctcaaattcctgacctcaggtgatctgcccaccttggcctcccaaagtgctggggttacaagtgtgagccaccatgcctggcctcatttatttatttattattttttattttttgagacagagtcttgctctgtctcccaggctggagtgcagtggtgcaatctctggtcactgcaacctctgcctcctggattcaagtgattctcctgcctcagcctcccgagtagctgggactacaggtgcccgccaccacacctggctaatttttgtatttttagtagagacagggtttcaccatattggccaggctggtctggaactcctgaccttgtcgttgtgatccgcctgccttggcctcccaaagtgctaggattacaggcatgagtgggagccaccgtactggcttttttttttttttttttttttttttgagacagtcttgctctctcgcccaggctggagtgcaatggcgcgatctcagctcactgcaacctccgcctcccgggttcaagtgattctcctgcctcagcctcctgagtagctgggattacacgcacccaacatcatgcccagctaatttttgtatttttatagagaggggtttcaccatgttggccaccaggctggtcttgaactcctgacctcaggtgatctgcccacctcagtatcccaaagtgctgggattacaggtgtgagccactgtgcccagcctgtgcatctttttttaaagaagtgtctattcacatcctttgccaagttataattagggagtgtgtgtgtgtgtttaacatgcttctcaggaaagtattctttgtgggttgtttttattgttgaagtgtaagagttcttttctcttacttttctttcttttttttttttttttagagtgagtcttgctctgtcacccaggctggagtgcagtggcatgatctcagctcactgcatcctctgcctcctgggttcaagcaattctccctgtctcagcctccagagtagccgggattacagatgaccacaactgtgcccggctaatttttttctatttttagtagagacggggattcaccatattggccaggctggtctcgaactcctgacctcaggtgatccgcctgcctcggccttccaaaatgctgggattacaggcatgagccaccttttctattctttcttttcttttattttcagacggtctcgctgtgtcccccaagctagagtgcaatggtgcaatctcggctcactgcaacctctgcctctcaggctcaagagattcttatgcctcagcctcccaagtagctgggattacaggcaatgcacaaccacgcctggctaatttttgtatttttagtagagacagggttttgcaatgttggccaggctgatcttgaacttctgacctcagatgatccgcccacctcagcctcccaaagtactgtgattacaggcgtgagcccctgcccctggcctcagagttctttatgtatatatatgtgtgtgtgtgtgtagtttttggtttttgatttttgagacaggatctaactgtgtctcccaggctggagtgtagttgtgcaaacacagctcactgcagtgttgatctgggctcaaacaatccccccttgtagccaggactacaggcgcacacagcaccatgtccagctagttttttgtttgggcggggtttttgaggcagaatctcaactccgtcccccaggctggagtgcagtggtgcaatcttcattcattgcaaactccgcctcccgggttcaagagattcttatgcctcagtcttccgagcagttgggattacaggcgtgcgccaccgtgcccagataattttttttgagaccgagtcttgctctgtcaccaggctggagtgtagtagcgggatctcagcttactgcaacctccgcctcccaggttcaagtgattctcctgtttcagccttccaagtagctgggattacaggcgcctgccaccatgcccggctaatttttgtatttttagtagagaccggggtttcaccatgttggccaggctggtcttgaactcctgaccttaggtaatctgcccacctcccaaagtgctgggattacagccttgagctaccgagcctttttttggagatggagtctcccccgtgtcacccaggctggagtgcagtggtgcgatctcagctcactgtaacctccgcctcctgggttcaagcaattatcctgcctcagcctcccgagtagctgggattacaggtgtctgccaccacacccagctaatttttgtattttttagtagagatggggtttcgccatgttgaccaggctggtcttgaacccctgacttcaggtgatccgcccacctcggcctcccaaagtgctgggatacaggcatgagccaccaaccctggcctaatttttgtatttttagtagagacggggtttcaccatgttggccaggctgatctcaaactcctggcctcaagtgatctgccctccttagcctcccaaagtgctggggattagtggcatgagccaccacaccaagcctgagttctttatatagtttccatattagatacttataatatccgtaatcccttcattctgtgtgtgtgtgttttgttttgttttgtttttgagataagagtccggctctgtcacccagcctggagttcagtggcatgaacactgctcactgcagcttcagtctctgagctcaggtgatactcccacttcagcctcctgaatagctgggattacagacatgtgtcatgacgcccagctaatttttagattttttgtagagacgg

SEQ ID NO: 97326 - DNA, 12856 bp, Homo sapiens
tccataaagatttttacaaagcaggctctgagtttggcccgtgggctgcaatttaccaactcccgatctggaatattgattagaggtagagaaataaatgtattccagttcttaacaccaagaatacatcttcctttgttctgtcaatgggagtgtcagaagaacagatagtcccaattctatggttgtggtggcagcatggatatcttttagggaatttatcttaggtgtcagtgctgaagcaaaaatctctgaagtatgaatccttgaaggagagagatgagctgaaacttgtagctgaaagaggaaactatttgtctgagtacctagtcccctgcattcccatctttaccacttgccatgctgccataggacgcggtagggaatgacactgaaatggaattccatctgggcttgtgccacttagcagcttgatgacctttcctgggcctcagtttctctaactgagctttagcatccccatacatagtatgaagagattggactagagatgatatctaagatcccttctggctctaaagatggcatgtaggggattctgatagcagcagatgtactgcatatgactgttcttaaatcaggaacttgagatatagtgtttctgaaaaatttttgcctggaaaaatagagacatggtaactaattgtcacacatgcttattttttaggggctaagtgatggatcttgtactccgtgttgcagattactatttttttacaccatacgtgtatccagccacatggccagaagatgacatcttccgacaagctattagtcttctgattgtaacaaatgttggtgcttacatcctttatttcttctgtgcaacactgagctattattttgtcttcgatcatgcattaatgaaacatccacaatttttaaaggtaagaaatgtttttacctattttctaacgattaaagtaaaaataacaatatgatatatttctgagatttttagattaagctgattatatgtaaccattaaataaaattttggagaccaaccacaaatgggttagatattttcatgagggttaatccctgctctccttcccttagtttaagcaaatctaactttttaataaaactataagtctagtatcgtatcttgctagatgcatattggagcatttttatgctgatattgatgagtaaataaatgcatacatttatgtaattattttaatatatgattttcacaaactgaaatgtgtttttttaccatgttttgttttttggctagataggggattcaaactcagtagttttaaagttgtttacaatcatttttaaatttcggttgtttgtacttgtcagtgactccaaggactgaacagcaaaaagaaaaaatagagaggattggggatggaagttaattaggaaagaaatggttattccataaatagaagtttagaatgcagattttggaggaaggaaaaaaggtttcagaatttgaaatacttattgcattttctcagtacaaaaggaatgattttcttacatacctatttttatgtatttaaaattttaatagaaacagtttggaggtaagccccttcatgtaaaagagattttaaaaatccagtccagaacagttttatgctagttttgtttaacatggattttgtgatttttaagtattggaaatttcactttcagaatcaagtccgtcgagagattaagtttactgtccaggcattgccatggataagtattcttactgttgcactgttcttgctggagataagaggttacagcaaattacatgatgacctaggagagtttccatatggtaagtaaataacacgagtgtcaggaagagagtagtctaagcacaggttagtttccttaaaaaaacaagtctgcccttttttttttcatcttttaaaataattacaaattattcagttgttttttaatgttctattttcatgtgttcatgtcttgccacatgtgcatttctttagtttttctatcaatctgaaagtctgctgtagatgagattgtgtctggcggaagattggagtgatcagagatgggtccttgcatttgttttctattaattattgaattcaaccttctaaaaaaaacttgagtagcttatgtcattgctgaaagttaaaaacagatttttaaaatgcattattctgcttcttagaaactgtaactcttctggcatacaaccacccacttttctgtgcctgtatacttcattgtttacattacacaaatgaagtcctgaggtgcatagtggtttgggctctgaattttgtttctcttagcaacttacatggttgtattttcatgtcaaaaaaatcttgagattatgtaatatattagtcatagtactgtgcggatattcataagttatgtaaatgatacctaattgttagaccttcagattgttactcttttttgtattataaacagccctgtagtgagtaaacttttgtgaaattctgaaactttttcaagatacatttctaggatctagtatgtaaaaagcaagaatcatagtatttattgaaggctgatatgtgtcagtgacagttctcagctcttcacaagaatcagtccattgttttcctacaattctatgagataggtactatcactgtgctccttttataggtgagtcaatgaggtgtacagagagtttcagtaacgagttggtggtagatctgagacttggactcaggcttgcaggcaccagcacccccacactttaagtaagaagttagttattgccgggcgcggtggctcaatcctgtaatcccagcactttgggagaccgaggtaggaggatcacgaggtcaggagtatgagaccatcctggccaacatggtgaaaccccatctctactaaaatacaaaaaattagcggggtgtggtggtgcacacctgtagtcccagctactcaggagggtgaggcaggagaatcccttgaacctgggaggcagagattgcgccactgcactccagcctgggcgacagagcgagactccgtctcaaaaaaaaaaaagaaaaaaaaagtcagttattcagaagaaggaacaaaaaattatatactagagtaatgaattggctgggctttgaaaaatggatatgattatgagttaaaataaagggagagaggacattttaggttcttgaacccctatgatgaaagatacagaggtaaaacttccaagacagtgggaggacattgagtaaacctgcctggttagagtagaaatacaggagtgatgaggttggaaagatccgaaaggggtggagtatggaataaatgctaaatttaaagtatttagtggaaagtatattttaagcagggagataatgtgtaaagatgggttttaggaagattaatatgaaggaagtgatgattcccagagatttaaataataaagatgtcttaggagtatcctgtctcacaaatatctttatagtttaattaagaagtactttaggtagaacatttcaagtacttatgcgagggaaatgaggaaatgaccagattccaagaagccaagagagattagtttataatatactgaattagccagaacagatcatttataatgtttgagtctaggatcccattttgcactcagatggacatgtgaaaagtgaactctaatcccaggagctgagttttgattcttctgtttcccgttttcttttctaggattgtttgaacttgtcgttagtataatatctttcctctttttcactgacatgttcatctactggattcacagaggccttcatcatagactggtatataaggtaaagtcatttgtggtgaaaagagaaaaaaggttacacatttcagcaatgtatgattataaattctgttctctatttccaagaatttcctctacccatattaaatgtctaagtagccataatcataacaggtacagggtgcattttgttcatattcttctttatgggtctaaggggctgtcttaaaattcgtctgttccggtaacaggtacacatggacttacagagggaacaatagacattagagactccagaaggtgggaggatgggagaggagtgagggatgagacgctccctattgggtacaatgtgcactcttcaggtgctaggtacactaaaagccagacttcaccactgtgcagtatatccatggaacaccactgcacttgtactcataaatccatataaaattatactgttttagggcgaagaaggacattttatagaataaataattttgctgatctctacaggatttgttaggttgtttccaacatgagtgtgagaagctaagttgaatgttgcacggggtaaagtttgcagtgctaattgtgtccttttctcctgcagcgcctacataaacctcaccatatttggaagattcctactccatttgcaagtcatgcttttcaccctattgatggctttcttcagagtctaccttaccatatatacccttttatctttccattacacaaggtggtttatttaagtctgtacatcttggttaatatctggacaatttccattcatgacggtgattttcgtgtcccccaaatcttacagccatttattaatggctcagctcatcatacagaccaccatatgttctttgactataattatggacaatatttcactttgtgggataggattggcggctcattcaaaaatccttcatcctttgaggggaagggaccgctcagttatgtgaaggagatgacagagggaaagcgcagcagccattcaggaaatggctgtaagaatgaaaaattattcaatggagagtttacaaagactgaatagattattgcccagttattcttaagtaaggacaaagaaggaaatatcatcgtatttcttttttttaataaggaaaaaataatatccatacagtcaagatacatagtaaatggtatcatttggaaatcagcatcgtgggcactgctgaggaatgatcctagtggtaggtcagaagaagatgctgtgaacaccaggactttaatcttatgcttaaaatgccagatgttgttcgggggacaacttgtatctttctagcagcagatctgtagtttgtatagcctcaacaacaattttaaataagatggagaataaattattgaggggactaggctatatgcatttgccttcatccacccatgtttattaagaatcattgtgcttaataataccaagactaagcaccataaccaagaaatactaatgtaaagattgtttcttgtttcaggaatggttaattcttcaacgttggtatgataatgataacttgttttgacttgaataaagtactacatcagtgtggaaaaaaattctgatacattagcagctatgtaaatgacctaattgatagcaggtgtaataagactatcgtcttcctacacataggaggctcattctctggacacactatcacctattacattttactgattaacaaataaattggaatttaaaaatatcgatatcaccatgatttaatccagatctgggattatgtagctaaacattgtgatgattattatttaaaaccattatttaataagagtaaaaatatgtgaatctggatatatttaaaaaaagaaatttgatgcccagataatatattaggcactactgattttttagttaaattgatgcactacacttttgatgtttgaagttacaaacctgtaatttttttgtaaaggaaataattgccaaatacctaggcccattgctgacgattagttctaaaatcttattcctcctcttctcccctcacttttccctacttcctctgcaaaaagatttaacaaatacattcataaggaaatgtgtgttgtaacaaatatattgcaaaaacatagtttgtaaaggcattctataagctatttatgtaaaatcaataaaagttgatcataattaaactgtatcagttgagtattatagcagcacaaagtattctttgtacagattttgtgccaatttgaagccacagaaatgatgtggattgttaattgtgttttagaacatccccggacactcagtgtcacagggggaaagaagtgggtaccacattctgtttatatttcacattttaactagatttgagtgtttttagcaagaaatcagtcttaaaatctaatgtctgggatccagaagaaaatgtctttaatctgtgagttattgtcacaatgtcatcttatttaaatgtaccaattagcattttgtaataggcaaatgtcatttagtgcttttcaccaatcccactcacccccggtgctccgccttgcctaagaaaaagaaattaaggagaagtaaactttatttcctaatataatgtcagctgatatttattgagcttttcctctttgcccagagactaggacccaaagaagttaagtaactattcccaggtttatttctctctcwtatgatgtcccatgtggatgtttgtggtcagtggacagctttccacctagtctttctgcgacccaggctccttcctcttggggctctgcctttctctcagtccatagagccctctttgttgaaagagcacataggaaaagaaggaaaagtctgtgtggaaaatgtttctgggtcaggcctggaagtggtgcatatctcttccgcccatgttcctttggacagaactccgtcacatggcccacctagagagattttgggaaatgtgtccagctgtgtgcctgggaggaagggggcaccattttcttgagcagctagacagtttgccgtatttgtggtgttctcctcttgttgatgttgaaatggtgaatgagccataaagtatttcaggttatccacacactaatcatctcagtgtctttaattcttaactccaatatgaatgtttaaagcttcctctagattcttattcctatataactaatagagaagaaaggacagcttcctatggggaagacagaggcttcctcatagatgttaggaataatcaaacttgcccctgccctttcacccgtctcaaattctggtcttttaaagcagcgttatgttaagtagtcctaacattgtaatatacagtactgccacattctcctactttctattagaggaagtcagagaatatttatggaagtgaggacccaaattaccttctacagatgacttttatagttacaggacagaaagtgaaaatcaaggttacgttttctacttttgtggtagaaattgagaagtgggtggatatggttcgagaagacctttcagaaacacagagactgagtctttgtcttccatgctgtctctgcagtactgagtgaatttccttatacccttgtatcatgttttcctcccatcttctagaagctggggacagatttggaagagaattacacaagttcagttttttgatacatggattttacagtgcatgcaggttatttatgtagagaggaggtctgggagaaagatggaaactagggagatgactgagaacaaagatatttgggattaacacagatagaagaaaagtttgaaaccatgagattgtcacagcatgaaaaaagatattcaaagacactaaccaacttgaggggtgcagtggtctgaatgtgtcctccaaaattcaaatgtggaaatgtatttgccagtgagatagtatgtagaggtggggccttgaggaagtgattaagtcatgagggctctgggattaatgacttaaaaagaggtgtgaggcagctgttcagcccttctgtctcctgtcccttttttttttttttttttgagatggagtcttgctctgttgccccaggctggagtgcagtggcgtgatcttggttcactgcaagctccacctcccgggttcacgccattctcctgcctcagcctcccgagtagctgggactacaggtgcccgccaccaccacgcccggctaattttttatatttttagtagagatggggtttcaccgtgttagccaggatggtcttgatctcctgacctcatgatctgcctgcctcggcctcccaaagtgctgggattataggtgtgagccaccatgcccagccccttctgtcccttctaacgtgaggacccagcaacaaggtaccatcttgaaagcagcaactggggactcagcagacaccaaaccaactggtgcttaaccgtgacttcccagcctccagagctgtaagaaaataaatttctattatttatagattacccagttgaagatactttgttaaggcagtacaaatggactaagacaagggggaagaaatttgcattcctgatcttcccaacttcttcaaattcacaacacttgaatgacagtcttatttcagcacttactgctatcacctattacttttatgtgtgtcttacctatttgagatgccagattccttggaagtagagaccgtgtctgaatcatcattgtattaaaccactcatccttaacaaatgcccaagccatggttaaagttcaataaatactttgttgaatttattaataaaatggcagaaatgtcattctcttccatatatgtttaataaatccctgataggtgctaagcactgcactaggtaaaaattctcttctgatgctgtctttttggccaaccatttttttatcatttattcattagctgacatttgctaagtgctttggaggggtcaaaaggggaagtaatgagaaatcaaagatggtccctacatcaaggataaactatctttttttagtcactcaaagtcataaccctttggaaacaaaacccaccagtaccccagattttgaccacagatgaatcagtactacaaggactggttagagggttgaatgaatctgtatactcagcacttaacacagcactctgggtaaaagaaaaaagatcctcaaagatattagttggttacatcaagaaaggacaaacttaggttaatctataacttcatctcagaggaacaggaactttggagataaacagggctctgccacttgcaagttgcaccatccctggtttctccatctgtaaattgattaaaacactgcctatctaataagattaaataagttagaagcattcagttaaatgtcaactgaaactattgttcatgtaaattgtgcttgatgctttttctttctagattcaatgattattgtcattttacctccataggccctcaatagaaatcagttgcagagggcagaagcctagatattttcaccttaaaattggagggtgaaagacattgaggtgaagtagagatagagggtacacagaaaaatcgtataagtaaaactaacatcgttaacattatttactgtaagttatctttgtaagagtggtaaaatacattgtgttgttaaataatttcatttaaaaaatgcatcactttgtgtgtttttatattgctaaaaccataaggccagtctacaaggtttgtagataaaatagaaacataccttccttgaaaagcagaataaattttttaaaggcaggaaggaagtgtttgaaccatgtgtcaacaagctttactgtcaaagcaggcttttggtatgggaagaaaaatacttataaatacttgttttaatatttgctttattaaaatacatttaaaatacagcatttttaaatctctaagctcaacttgaagatataagaacagtaaatttgataaaaatgagaaattacattcccatttctttaacaatttgtaaattccaattatcctgaacatttaataccatttacatattttattaatcacattttcttaaacatttgataagagatttaatattttgatccaactaccaaaaaagcagacttgtgtacttgacagatttttctaaacacttcacaactcacgattcaaacaaagacaaaatagcatatcaaaagttaatcactcagttggaaagcactcataccataggcttttattcatttcttgaataattttgttatatcttcctcttttaggctgcaatgagctataattgcactactgcactccacgctgggtgacagagcaagaccctatctctaaaaataaaaaagtatatatatataaaaatatcttcctctattataatttaactcattaagccatttatttagatgtaaacttgcccccctgacatgtggtatgaaacaaatagaaacctagaaatttagtgcatattcaaatattaagacagacactggtgtggtgacttttgtctgtcgcttcattgggacgttttttctttctgatcaacttaatgaaattataatttactataattaagtgtagccatttttactgtagagttcaatgatctttgatgaacgtgtacacccatgtaaccaccacccccaatcaaagtaaagaacattttcttaccagaataaatttcctctccgtttgcagtcattctccccagccctaggtcaccactgatccaccttctgttactggaaggttagttttcttccctgatttagaatttcatataaattaaatcagatagtatatactcttgtgtttagtttctttagcttaacatgtttagagatatttgctgttgcctgtgtctgtagctttttgttttcattgctgaatagtatttcattgtaatataccacagttggtttatgtatttgctgatgaatatttgtgttatttccagcgtgggattattatgaataaagttgctacaaacatttgtatacaagtctttgtgtggctatatgttgttatttctcgttggtaaatatctattagatttgctgggtcatagggaagagatatatatgtatacgtttaattttataaaacactgtgaaactattttccaaagggttgtaccattttaccctcctgctcccaatgatgagaattccatttttcccgcatgttcactaacacttagtatcgtcagtccttatttgtaaccattctagtgggtgtgaggtagtgtcccactgtggcttaatttgcattttcctgtgactaatgatgttaagcaccttttctcctgctttttttttttttctttttcaaactttttatatcttttgtaaagtatctgtttaaatctttggccattttaaaaattaggttgttttggtgttattgacttataagattttgtatatattgacaaaaattctttgttagatgtatgtattaccaatatttactccaatttagcttgtcttttcatttccttactatcttttgataaggaaaaaatgtttaatttttattcagaccactttatcaatttttatctttcataactattgcattttctgtccaacctaagaaatctttgccaatcccaaagcaagcctggaatttcctttgtgacaaggtttttgataatgagttcatttcttagaagataaagacttcatgttttcctctcttcctttctcaattctgatacattatttttcaagaaattgtttactacatttaagtaataaaatttttttgccataaagttgtaacattccctatttcccttttaatgcctataggatcagtagttatatttcctatctaattcctgatattgatgatttgtgtttgctctttttcttgattagtctgagatgaaattaattttattgattttttttttttttttttttttttttttttttttttgagacagggtctcactctgtcatccaggctggagtacagtggtttgaccacagctcattacagcctcagcctcccgggctcaaacaatcctccctcctcagcctcccaaatagctgggactacaggcacgtgccagcacacccagctatttttgtttgtttgtttgttttgtagagatgagttctcactatgttgccagggttggtcttgaactccaggactcaagcaattctcccacctcagcctcccaaagtgctgggattacaggcgtgagccactgcgcccagcccaatattaatcttttaaagaaccaattgctatgggctgaatgtgtcccacaaaattagtatgttaaaacttaattgccaatgtgatagtattaagagatgtgacatttaggaagtgattagatcatgagagctccgcccttgtaaatgagattaatgtccttataaaagaagctatagagagctgacactccagttttcctgttccttctgccacatgaaggcacagtgttcatccctcaaccccatccccaggggatacagcattcaaggtgccatcttggaagtaggtactgggcccttgctagacacccaaccagctggtgccttgatcttggactacccagccttcagaactgtgaggaataaatttctgttgtttataaataacccagtctcagctgttttgttttagcagtacaagcagactaagacaccaacttgtggctctgttgatttttctctattgcttgtcttcaatttcatattttcttcatttttttttttttgagatggagtctcactctgtcgcccaggctggagtgcaggggcgctatcttggctcactgaaacctccgcctcccaggttcaagtgatttctcccacttcagcttcctgaatagctgggattacaggcacgcaccaccatgcccacctaatttttgtatttttagtagagacggggtttcaccatatttattggccaggtgggtctcgaactcctgacttcaggcgatctgtttgcctcggccttgaaagtgctgggattacaggcgtgagccactgcgcccagcctcaatttcactaatttctgctcctgtatctttctttctacttattgtgtatttaagttgcccttttttcccctagcttcttaagatggaagctcagatcat

SEQ ID NO: 97327 - DNA, 297160 bp, Homo sapiens
  misc_feature (1)...(297160): n = A,T,C or G
cgtgtgggtgtgtgtctgtctgtagttatagctggttttcctgtccagttcaatctcattgagtttatctctcttgttagagatttttgggatcctgtgcccaataaataagaagagatgaaccttgagtctcattagatgacagatttttgagaagctcaaatgtatgggaaggctccacttcttcacttaaagggactgcagatggtgtgaagcaggtgggagagaccccagtgctaagagggttattacaacagggcttggcaagaatttttcagggaaaaatgaactttgggaggcgggtgctgttttttgccccattttgggttcccagggaaaggtaacaatttaaacacacaccacctgaacagagacatagcttcctctcaagagccttggaaggctgggagagtggtgttgggtggagagaatgagagcaggctcagatgttgaaacaaccctaggggattggagttggaattgctgaactgagctagtccagagccatctatcattctgagtcttcccaaaacactatttacacagatcaccaactttcacacttaaggagtgtctccccgtttctcttcttactaagcatggagctggtggagtctggttggagatagccttcaggtctgtgctctttttctcagtgaatttatgttgcactgatggagcccttgcatggcaggagagctagataaacttttaatttctgttaaaagtcaaataggaagctcttatctgaaaattctgcttaaatccttgtctgcatcactttatctctacttgccttcttcttttagtatttctctgaagtgcaatgcccattaatgtcacaaatgtacttcctagtccttgggcagcagagcctggccctttattttccttgcaaaggaggtgaaagtggtaacttgaacttagtccacctggactttgtctcatagaaagtgatcttcaggccggggccagtggctcacacctgtaatcccagcactttgggaggccaaggcgagtggatcacctgaggtcaggagttcgagaccagcctggccagcatggtgaaacccccatctctactaaaaatacaaaaaaattaactggccatggtggtgggcacctgtaatcccagctactcgggaggctgaggcaggagaatcgtttgaacccgggaagtggaggttgcagtgagacgagatcgtgccattgcactccagcctgggcaatagggcgagagtctgtctcaaaaaaaaaaaaaaaaaaaaaaaaaagaaagtgatcttcagagggatgaatcccttcctatattcagcttctatccagaatagtactttttctcttgcataactgggtatagatttcagataagctccatttagttaaactccagttatttccaggaacatctggactccctgagacctcactagccttctttttgagcattaatagtttagattcaccataaagaagacagttacaaagaaccattttttgaatgttttcagcattccaagatattgccaagggccgtaaggttaaggaacagcggaaagaaatgctatttcttgtctggtattctccaatcagggaactcaaggaagctctctactcaggggatgaggctgtctcagccccgtgggtgggctaagtggactgtttccgagaaaagcactgggaacatggagtggcaggcagatattggcagaggcataaatataaccagggatgtagatgacaatttgatgacgtatcttgtgaatggtgtatattcacagaaggccttttaaagatggaggctgtgggagtaggaagacttatagggcttgtagtaatgaaagctttcagtgtatgtcaaagaacttgctgttagcgaggacgggaggagggccaaggaagaatggcggttagagagggaaagaattaatggttttgcggcaaacatggacttggccaggaaaacaattccttatttctagaaagaagaggagcttttaaattttttaaaatttttctcagtttatgacctggttaggaacactgaaacataaggagttggggaaaggatggttggaggctcactggaaatgagaggcggctatcagtgaatgagctctttatcagtgactcccagagactgctgctaattttgatttgaaagctgcaaattgctggtatgtggttacagttcctaagaacaacttagataagagattttcaaaagccgttttgaaaggggaagtgaaatttaagatttagttgtcattggtctacatctaagtgtttgtttctttagatgtgcacaccaaggagcatttaaaataaaaatctatttgcaaattaagatagtctttatttacatttttatatttttatttcaataaaaagtgtgttttatagagaaagctcccagagaagaaactaatctcaagactcccttttgtctttttttttttttttttctggtgccaggacaaaccgcacacataatacctgggaagaactaatcaaacgtgtgtgtgtgtgtgtgtgtgtgtgtgtgtgtgtgtgtgtgtatgtaccttgtgccttcggttctgattccataatagcaaatgacccaagcagcacatactcctctccaaccaggaagtgagaaatggaattttggttgactcctttttcttgttctaagaaatctcccaaggactgcaccatgtttgttttcatttccctggctcctttccattctggaaacttaaaatcggcttcatggcctcttgctttatagaatttgttcaaaaaggcttcgtcagaaatggatttgatgtgacatttttgctcttcacgtgaaagtacttcctattccctgaaagtggaagaggtggtggaaataaccctggccttggccgactgatcttgaacctgagaattagagactgggcctccgtccagtgactctgagccagtaatgaagtttaaagctatcggaagactggctgccgtccttggtagaggtgggggtgatttgatacacagaagagctttgtttcccagggctttgtggtctttccgggtcatttggggacttagggtggaggacgccagtcttgccttcctaatggagctgtgcttgtcctcgcccggcctgccccagagcgcatgctagcacagtcttgccttcctaatggagctgtgcttgtcctcgcccggcctgccccagagcgcatgctagcagatggcctttaccatcagccacttccagcgacattctaggatgaatgtgtgtataaagctcatgtttgtcactcgttagcgcttgacgctgggcaagttttctggcttctttaagcctcaacccacatctgtaaaatggtgatacttcgtagaattgtgagcattaaataagattacaaatgtagagcactcattttatttaatgtgaaatcacctatgggggaattcggggcttcccactgcctttgtttttcagcacctcccttcaccagcttttctgcacccccactcatttgtgagaaatagatagtgctggagacagctgagggatgtactcagctcagttcaggcttctcaatgccccagagtcctccagatccccctcattttttccctccatgctcttgtctctcacaaagatcatccttgtgacctcctatcccttgggctattctttgctgcattgggcattggacagtgctaagagggttgggcaccgtgcagcctagtgtttgcagctgccccggtgcgctctgctcagtccatattcttaccctgggtgtgccgagggacaggacaaagggcttattttatagaacatatttcttccccattcttctcgtttataattttggtttccaggaaagaatggaagaatgggcacctccaccctattagtgcacactctgtgtgtgtgtgtgtgtgtgtgtgtgtgtgtgtgtgtgtgtagcaggagcaaggggcagggtcagctgtgctgaggactaggaggtaaatggtctacgcatatccaaggtgggaagaccaagagaaataagagaagtaaatgaacagatcctctaaagtcatcttttccttattccagcacaccaaggcattgtgcatatggtcttggatccttattctctgttagccaatggaaaacatatatggaaagaaagcaagcaagcttgctgagattaacctagagagggcaggggccagcatcctgatgtctatgctaggccagcatggtaccagcagcagaatgtgggctgtggacatacacttaacatttctgatcagtttttactccctcaggcttaggggctacaaaggaagatagccaggtttctgggaaatttcgaagcacttggaaatatgatcgaagcagaaaattcctctgagtggaggagctgtgtaggctgtgtatagaatctgtggattgggaccatccaaggaatcagtgtctggaaagaagcacaaactggtgtgatgaaggttcccatgatgggtaagaactaccagggaaggttggagaagaaaggtttaaaactgacaaggaacctccaagccaccttagggacaatttgggttctttaaagttccatttgaatcccactccctcaacgagcactctaacttgcccctgtttatccaccccatctgccatgaccacatcaaactttcccacaagtgaggcccttcttagaacactatttgagttgtatattaaaatgttagggtgcctggtggtctagactctttccagcaggtcttgttctctgaacctctagaggagggaactttgccttcagaatattgctgagaggaagggtccagaatggcctggccagtatctagtgtgaccactctgcctctgagctatatttggctgagtcaggtggctggtgagtcccacacgtcctctggattgagtccacccacaggggagaggagtcagcctgtaggttttattgccaccacaatcagagctatcaactgcctttattgtctaggatgattgaatcaaaggagggcagagaaccttgggttcccaacgcattctatgagctcttgggttcttcctgtggctttgtaggaacaaaagaacagaacaaacatgttggagtagtgtccctaacatttatttcaggtggtgactaggagggttgaggtgtagatatacttcctctcttctcgtggagccttactgaagacaggatcgccgttcttgtgtttatcagctgagaagggcagtctcgccatcttaaagacctgccctccagccccttcaaacgccacacttcccaggaagcactctctccataagtgttcagagaaccctgaccagagaagctcccgcacttcttatatgaactccgattgtgctgagggggaggggaggagtacacaaagcaggaggtgggtggggaggctggggtcacacagcccaggaggggcacacccggcgaggtgctccgtcagcacaggctccctcctccctccctccccccagtacaccaggctctgaccggaccggtcccaccgcagagttcagcggcatcaagtccaaggacagaactgcaagagtatggacacaaaacaccaaacaaattgggggtgggctcccggccagcctggtgagagagaggctcctttagccaaggccatttctggcttgtcagcctccagggtatgggctatgagcagcagtggggagccggggtttctggggcagctcagtgctgggaagacgtcatccccttctccccagggctgtatgggagcacaggcacaggggtaggtagagcttgtggtcagcgaggggtagagcccacagagagaccagagagtggaccgcagtttcatgaaagcagagttatagctgccacttgtgcctgtgggcagagcaggtggtagaggggcctccaggaaagggccggggacacgggtgtccagcactaagcacagcgcactcagccgcagcctctgtctgtctccccacccgcccacctctggcacacagcacctggggacccagatttgtgcttgatcagagcttcgaaggaaggcagtggcagaggcgctgggaggctgtcctggaagtggccaattctggtgtcctctgcaaagtacccctcgtccctggacaaccagaacgtgccctgacctcttccctggcccgtccccacccgcgrtgtgtgatccttagacgtgagtctgcatccgccgctgcaggggtcgactggggtcagagttctgggacgaggactgggagtggtgggaggaggaagcagaagccttgctggccttgtcgaactgcacatagccatcctgcttgccgctgctgctgacgctgctgtcacactgcgtgtccaggaaggagctgctgtcrctgagggagcctctctggaactcccgctcacamagctcgatggacgagctgcccatgcccagcacaaaccgctgcccgtagtcgtagaggcggccctggccgctcagggtgctgtagatgttggtgaaggacatgcctgtgggcacacgctgcttrcccgcaggacgcaggtcgggctggcagctggagagggagatggtcggggttgagtggtgctctttgaaggtgttgacgctgtagtagccattggtggggtcctggatgggcgagaggaagaggagcgtcacctggtggagtctccactgagcgtggctggggtttccaggctgagcccgtccccttatgcggggagggaagagggaaaacaggaggaagggagcaacctggtagggagcaaactcaggggtgaacagctgcagggaaggtgcaggggaagaaggacactgaacaggagatggcagaagggggactgcggaccccaggaggggagggacggcaagggtgagggctgagggccgaaggagggaagcagaggctcttgactgggtttatgtcagggcaatgcagggtcatttgaaagtcaggctttttaattgtttttatccagaacatggatgcttcattttgaatctacatgtgaggaggctgtggaagagaactggggagtctcagccttagctctctyagcctcctcagcgttggggtagggagaggaggtgccttaggcagggacgggcacctgccaccaagctggcctctgaccttttcttctcygacttgctgtcatttgttgtatagatttggggtttgggccatcagagctaaagaccagattccatggctgtgtcttataacccrgggcccttcttaccttcaggttctgaaactctttctcctcttctttgaggacctccagctgtttcaggactgagtcttgctggaattcaccccggtccatctgcaacccaaaaaaggctgctcagtagataggaggtggctaaacctccacttcccccaaggaaaagatgagatcagaaactcaaaagattgccctgtataacccccaccacccctcactgcctggaccatgtgaaagagtcaagatgagttcctggagccccatcctaggagacagggaagcagttgaggggggtgggtgagtaggtgaggtgaggggcagttaggggaggcgaggggcaggtatccgaggccatactttcctcgcttgggcgagggcatcaccagagatctcccatggctgattcaattccattgactgaacgtttattgtaaaatgccggccagttgctctgctaaggaccagagatccacagattaacgtacattaagatacagctctgctcatcagggagatggacttgtagataaataatttcagaatgtcagtcactgggcatggcaaggctccttagggcagtttcttttccagcgtgcaggcctagtgcaggccttagggagtcacaaggaataaccatctgtgagatgctggcgacatgggccacacctgttattctcatgaaaagttaacttccttagagatgccaaacagcctgagggcaaggatcacttcctgcttgtctctgggtcctcccacacctggttcagtgctttgcatgttgtggtcactgaccttgcctgcttttgggatggaatctcttaattatttgatttgccaatgcctagcacagtgcctgatatacaatagagctgcttcaaatggtatgtatatgttgaatgaataggcaaagtggcttagctctaaattactgaaaattaacaaaattattagacataagatgaaaaagcatactccacacacagtgggcatatgaattaatctgaataaccacagtgatgcttaacctgtgacacacgagaggcttgccatgtgtctctgctagttgcayggtataggtagtaggttccctcctactctctgggccgggatgtttcttctcccttgcaacctgctttcctcgtttctttttggagccctgtagaatcagccaaagtgcggccacccggctgcctcctcactaaggagaccatgcggttcatttttccagtaaatgctctggcactgtctggactggagaccttctttcccatcagattcaacttctaagtctgccccttcttgcaratggggctgtcttggggccaggaggtgaagggaatgcgagaatgacgatatcctcaaggggtggcttagcccagagccctcagcaagtcccttctgctcccacctgacactgagctgcccccactcttgcctgtggatttggactaagggatgtggagacagtctgaggcaaacagaatgtttgccgatgggagagaattcaaggtcccgtttgggatgaaggacacacatgattaagcttaagtatagagacgtcatcccttctcacatctaggctgtggtttcctccctcgtaaaactaaacactccactgtgttaattttaacagtgtcaggccctgtgttaggccccaggggaaatagatgagcgtagactcagaaacatgacctttgcccttgaggagctctgggataactggggaagctgacatggaattgggggaatgcactataaaggaggcacatacaagtgttttgggagagcagaaggtgcacagctccgccaggggtggggaggacaagcccggaacatcttggagttgattgttatgggagaatgtgagattcaacagacaaaattagcaggcagagagaacagccggtgcacaggcctttgaagtccaaaagattcgaaggccaggaatcaagctctttggcatgtctggaaggccagatgtacttggccggaaaatggagctggagaggttggtggttgcctggcactgaggagccctgatggcacaccaggaagttgggctttgtccagcagatgtggggagccacygagggattttaagtgggcaagtaacaggaccagatttgcattttagaaaggctgctttctcaaggctctcgagggtggattgagaaaagagacaaaagactacaaggctgagaccaactgggaggctgctgtaatcatccaggggagcaatgatgaggcctgaagtaaagaagtgatggtggaggacaggtggggcacacatttgagacactttttgaagtggaattgacaggacctgaaaatcaattggagagagaaagcgtagccgagggaaaagtcagtttgattcagtaaacgtctgtgagcctctaccagggcctgtgtaaggctccgaagaccccgggatgaacacagcagcagctgctcaccctctagcaacataaaccgctaatatttcttgagcacttattgtgttccatgggcttcaagcccttctgagttttgtccacttcaccctcaccacagccctgtatactgtggctttcagacccatctcatggatgaggacatggaggcaccagaaagcccatctactatattccttgctctgctgcctccactccaacatgttacgaccgaggcaaccagaaacttctagcatggttgtccaggtttctgcttggacaactaggtagatgatggcccataaatggggattcggaagaggaggagcaggcttgatgtgcctggagaagtgatgagttgactggcaatccagtccccaaggaggaacctgtgtttcttgcagactgttttggtggggtgcgggggatgagggagagggacatgtattgaatatctataatagctatgtgtgtgtgtgcgggggaggggaggggattatatgttatataacaacatattgtggcaatttatgcatatgtcttttctccttactgaagagccaggctctctgaagggtagactgcatttttgttgttgttgttgttttgagatggagtctcgctctcacccaggctggggtgcagtggcctgatctcagctcactgcaacctccacctcctgggttcaagcaattctcctgcctcagcttcccaagtagctgggattacaggcgcccgccaccacgcccagctaatttttgtatttttagtagagatgtagtttcaccatgttggccaggctggtctcgaactcctaatctcaagtgatccgcccaactcggtctcccaaagtgttgggattgcaagcgtgagccactgcacctggcctggactgcatcttagatgtctttgagtctgccagaacacaagcacagtacagcaggcacacactcacatttgttggctgagagtgtgtgcctcacctattgtggggtgggcagggggcatcttgaacgctgctctgctttttggaagcatctagttcattgagaagcctctagtcccaggaccttctgggaatggagtcacgggatgggatggggcgtaattgcattcttaccatcagctgcttgatggtggagtgctcctcaccctcccgaccagaggctggttccttgtggacaatttccactcggatatcatttttggctgacacaacacctttgagatctggagataaaatagtaaagtgtagatgatagatttagttcttacctttgagatgtcaagctcccttgcagtcccctgcccctgccctgccaccctctgcatttcccctccagcccctgaactcagcagcttcaccagccccccaccaatagaacctccatatggagatgctgtgggtgtttgggcctcagaggaggctgaccccatggccggcctgcctcctgtcacatgcccctcagccatgcacccttggcttgaaagatcgtcttcagccacttgtccgccttactgagctaggtccttttcatcctactgaattctcacttccttctagaagtcttctctgacctgctctaccaggcgggctccaatccctccattcatagaaccataaatctcagtgttggaaaggacctcaaagtgcccatggccaacccccatccaaagagaaacgcccctgaggcagtgggcagcttctctgtcgacgcctccgtgatggaagctttactgctacttctgcaggaggcaggctgtttctagttggagagctctgttagaaaattcttggctgggtgcggtggctcaygcctgtaatcccagcactttgggaggccgaggtgggcagatcacgaggtcaggagtttgacaccagcctggccaacatggtgaaaccccgtctctattaaaaatccaaaaattagctgggcgtggtggtgggtgcctgtaatgccagctactcgggaggctgagcatgagactcgcttgaatgaacccgggaggcagcggctgcggtaagccgagattgtgccactgcactccagcctgggcaacaggatgagactctgtctcaaaaaaaaaaaaggaaattcttgaggagctggtgcggtggctcacgcctgtaatcccagcacattgggaggccgaggaaggcggaccacttgaggccaggagttcgagaccagcctgggcaacatggtgaaatcctgtctctgcaaaaaattaaaaaaatagcaaggcatgatggcacacgcctgtaatcccagcgactcaggaggcttaggcacgagaatcgcttgaacctgggaggcggaggttgcagtgagctgagatcgtgtcactgcacttcagcctggccaaaagagagagaccctatataaaaaaaaaccgtatatatatgtgtatatatgcgtatgtgtatatatttgtatgcttccctataatttccactgagacggtggtgatggaggtcctgagaccacatcattgctggggtggtcttgagagccaaggctgcttagctcggagtgcagaaaatgcaaggggaacagctttcttcaaacatgtgcaggctgcygagtggcagaggagcagacccattctggtgattcattttttgcattacacttatataatgttagtgccagatggggccatcagagtcatatcctcattataaatgaggagacaggcctggaataactgtggctggcccagggtcatgtggcagaagaggtgggactggaacactgtgtctccattgtcttcacctgttctctgccatccaatctctcacacgttatctcctcggtgcacgcaattcttcaagcgtgcacaaacactagaattttattggtaatcactgaagacctttaaaagttttctcaaagcaattcctttattgcttccccacccactcccccacagctgtgtgagtgacctgcttttctggtgagactagcagctctttatttttattttgttgtagagatggggtctctctagactaacagctcttgtagagcaaggatcaaaccacaaaccgcttttccccctatctttctgtacagttcctgactgaaagagctatgtgttcaatccaaaatgctggctgccctgcagatgaagttcagtctagtccaggtcaacctcagcctagcgcccactctgccaggcgccatgttgcccaggctcacatacaccgatgcatcagacccactccctgccccaggagctcacagcactgttaggacccctgttcattgcactcctgcttacttgctctccggggcagcctaagcctggcctttttctctgtccccctccctgagatcccggatctccctcccgtacttctctgggaacgggcacagcagaacgccacgatggttgccataaggacgaggaaggccacaccagctcctacggccaccccaatgatgacggccatcggcacagactctgtgggagagaagcgggcacagctgaygacggatggggaatggcctactatccccccawgatctcaccccgttcctgcgggggcagcccctgccacatggggccctcctgggaaatgcctcagtggggcctgggcaggcacaggccgagtccaactggggtcagctctagctgggactgcaaagaccagggtggaggacacaggggcttggtgggtggaggagagggcaggggaactgaggtaaagggcagaggaaggagagcgaggcaggcagacacggagaagggagggccaggggacaggaagaccggagatgaggggtggggctggcacratggagctctctctggcattaaacaggaatgctctatcacacagcggccagtgagtcataggccctggctttttttgaaaaatgactatggtcactgcccttgtttgttccgtatgttctctccttcccttccctttctcgggtgaatatagaggacatccggctcttagtgtttgcaggtctaagtagcttccccgcaggtctgctgggcatcagttgtggccctcaggtgtccaagtctcagggtccagggagcagggttacagcttctccactgccacctctctaaggagagaggcccctttccctccatctccaggtctgcagcttctccctcaaggctgcccctctgagcatccttgcacccctcctggcaagagaggcccacacactgggcaggcaagccctcacccctgctgagtctctgtggcctgtctcctgcccaagccgagtgggggtagggacagggagggtaaggatagagtcgggggtgatcttccacacagccttggcccttctacagctgcaagtggggtcggagcacatgatttagggccttgaggaatccatcaggaatagaactagagaatgctggggcagggagagcttggggctctcactgaggtccggagaagtcaagtgatttggccaaggacacacaggagctgcccagccagggtcaatccaggtctcctctcactgctcccacccctccactcaccccactcccaccccgtccagctccacccacagagtgacatgtgagatcccccacatctcatgtgctcggtaccgcccagactgctgctgctccgagtcctggctccatcccttctgctgagcaactgactttgcctctcttatatctgtaggatggggataatggtaccggcccctctgagggttgttatgggcttgagctgggtgaatgtgggcagaggccttggagcagagcctggcacccagccctgtttggtgtttgctgttgttgttacccaggaaggggtcaccagcagttcacggtcttttatttttgggatggagtctggctgtgacacccaggctggagggcagtggcacgatctcagttcactgcaacctccgcctcctgggttcaagcgattctcctgcctcagtctcccgaatagctgggattacaggcacatgccaccatgcctggctaatttttgtatttttagtagagatagggtttcaccatgttggccaggctggtctcaaactcctgacctcaggtgatccgcccgcctcagcctccgaaagtgctgggattacaggcgtgagccatcgttcccgatcagcagttcacagtcttaaaggccaggaaagttcctttgaaagactgagcccctccccagcctaccctgcgttcgtcagtgtgggcgagtggggacagctaggtatcagttctgggttgtaagcctcttgctgtctttttctttaaagggaggagaaagacctcaaaccctggcctctgaagatgctgctgggaggaggtatcaaggggtgggggtagggtggcagccatttgccctccggccrgagggagctggcgcccctggctggcagtgttgctggttaagctggcacatccctttgccaccccaggacttgcacacgaagccattggttacctaccaattagtggccaggacagctgtaggggtgacagggaggggaccaagaggaggtggaatggtggacacttagggattgaaacgggaggtgctcgcattggttcaacagtcagactgagaaaaggggctgggcctcagcagagcttgccttgaccaatagacgacaacgtctctaggtttagttccatgaagaaagggaaactgctgtggcagctcattggttctctgcttttgaattggattgatttgggttggtttctcctcagattcctagtaagtttccttggaaaaacacagggcttgtctcagcggaactcagagccaaagcatktccatggaaggctcttaacacctctgggcctcagtgccttgtctgcaccctggagagctgggcagcagcattgaaggtgccttccgatcctgggatccccagcccacgtttccacacgctgctgacggctgggggaggggtgccctcttagctggacaacggtcaccagggaggtgggcagggggagagcagggggtcctgtgggggcgagtgccccggggtgccatctcttcccagtccccagcctgcctgtgtgtgtttcctccttgcctggcttcctgaggtttggcctagggcgatgtgcaggcccctcctctctgcacagagccttccctgcatggctcctggagagggactggagggaggggctgtccccactcagcctcccctccatccaaggaggtgtgccaggcaccaggagccaccgaggggggaaggtgttggggagctctggatgagtgtcagcagacacaggagacacggagacaggagacaccaccctcagcactagcatggaccyggggagaaggcagcgggaggctggcagctttctgggttgccccagtgtgggctgcaggggcctctgtgagcaacctgtgccctgggttggtgctctgataggggcatgtctgccaggaggggcagaggcaggggcatgaggatcccacgtggagcttgttgaggaggtaacagaggccaggggccagtgtggcaggaggcctgggatggaggaccactcaagtcttcagcatggccatagagcctggcttgctggtcctgattctcttttctggttttctgctcggggtggggttgagagcaactccgcccagggggcctgatgactgctttgctgcgtgtgcctggggagggaggcgctgccctgcagcctcagcttggggtgagatgacacttccatggggactgcaggagtagggaggggtggcaaacagcaagcatggattgcacaagccacagcaggggctgggggcccccggtgtcctgggaagcagtggccaagctggtgatgatgtggagaagcgggaagggtcggagagagcctggaagcagaaggcagtcaggacaggggccagctgaccccagaggccaggagtcagggctcctgaagagaaaggatggaaggaatggagcggggacgagcaagagccagtgtcccagagaggaaggagttgtgggttccggcggcaggcaggagacaggtctctggggtccctaggcccaagctggctgggacctcctctccccactgctttgtctacactaaaccctcaggacgggggagggcggagacactagcrgccagcacaggcctccytaccccctgctgggttccctccccagctagccaggaagtcccttccccccttcccagggccattctcatcatctccttccgtacctgcttccagcccggctcccgacttcatttccgaacctgtttggaaataaagcaagcgtctacagccagggcctggctggccagggtggggtgggactgggaattagctgcttgagsggggctgggtgaggggctcctttcccagtcatgtctctgggaccccccaacagatccaggctagcccagctgaacttggagttcattcaggctgacttagagactctggaggggctagggaccggagagagatcacgtctcggaggggtctgggagggttggggtgagaacactcgggggagggcatggggatgggggcaccaaggggaagacacrgagggtaggcaacaggggaccaggaaggtttgggatgatgtgtggatgatattatgcaaattatgtgcaaagcattatgcaaagcagcacctattagggaagaggtgttgggagatgctgtgtgatttgacccataggtgtgatcctggtgtggcccactgaggcctgggggcccagctgagaccacccacttggcctagaatctcttgctgggcctgacagcctgcgaatggacctttacctaagagggtgtcagagaccgtcaggactgaggcctcctgggccccagaggcccaggcccagctgagcacgaatccctggtccaccatggcttagcccctgctggcaaaagggcaagatcaactgcccctctcagaacccggcttgctgctggctgtggtggggcttctggagccacccctccgtgcccctccaaggctccccatcctgttgtctgtgcctgagagctctgagcagacgctggagatctgagcctctttgaccaggagctgggacgtcagcgcacgggggcacagtggggtgaggcttgttcctcctgcctcctccctctcacccacccggctgctttgcccagcgctgcctttgaggtacaggggtccatgtgcctcctgggtctgcaggtcatctgagcccagcccccgaccctarggatctggacaagcaagcctaaccccttagctttagcctgggtgccctctgtgggacttctgtctgagtaactggatgggcttgtcatcttaactgtgactgggccaggttcccagcacacccatgccagtgtatcccacgctccacccaggcatgacactttggtgtcagaccagggcccatggcagagggcagggcacagaagccagggcctctggaggctrctgggcagcttgtcactgccaccagcctgctcactgttrtggtcacctcccactgaagcatcgccctcaagggctgcccctctgagctgtgttcttccctttcttggttcctggtggaggctcgtgccccttgcttcagcgagagcctggctgaggaggctgctggctggctaggctgtgtggtcagccaggaagagcactgtggcttgtccttgggccctggcccaccttgcagccacccgcgccctgacctaggtgaggagagggccctctggttccatcgttcgttgttccctcatggccctggcagctctcaccttgctccttgagccggatgatctcagtgtcggagccgaagctgttccaggccgtgcagttgtagatggtctggaagtcggcccgcacgatgttgctgatggtcagggtggagatgacgccctcctcggtgctgatggtctccaccgtatagcgccccgatgtgcccgactccagaacgttctccttccaggaccaggcctgcccgggggcgcagaatcaggaggagaccccaccagaggggcccaggacacgcccacaccagagtcacagtgccactgtcctgctcatgttcatgctcactgccacacactaacacatgtgcacacgggtatgtatgcaggcacacatgccacacaccacaaataygcacacatgcaggtgcacacacaacacgcatcaccacacatgggcatgcacagcwtcccacacggcacccacatgcaggtacacgtgtgcacacacaacacacaaacacatcacacgtctatacacagctccccacacatggccaacacgtttatatacatactacacacaccacaaatgtgtacacacagctctgcacacacacaagtgtgcacccactataacacacacatcaccacgtacacataccaatgtatatacacacaggtttgtacacacacaccacactacaaacatgcatatgcaagtacatgtaccacaacacacataaacatgcatcacaacacatgcacacaccaaagcacacaacacatcacagygcacacatgcctgcacatatgtgcacatgtcacaacatgcatacacacatcacagtacatgcacatcacacttcacactaaaaacatgatacagacatgtacatacacatggcagacacgacaccacatctacacgcaacacacagccactccccgaaatacatgtacacatgcacacacacaccaagatgcacgcaccatatgccacaatacaacacacaatacaagcatgcttacacacatgtacataccacaacacacactgcaacacatacacacattcgccatacacaccatcatgtgtacttacaggtacacacactatgacatacacacacaccatrtgctcacacacacaagtacacacactaccaacagatacacatgttcacacatgccatgacacatgtacacggtaacacacccacaccacacatgtacacaatccacaaacacatgtacacacacatactctggggcatcctcagagggtctttccatcccagaaaggggcctggggagcatctttctgggcaaagtgggtgccctgttggcctgcgcactgcgcctccacacaaatgccccccgggactgtggctgcctgggtgggtgtgagttaggacagcagccccatgaacgcgtctacctgtgtgatgttgtatgtctgtgtgagaaatgtgtctacagagctgtgtttgcgatcaccttcgtctgccttagtttacagggctgctggttaacagttttcagagccggccacatacactgtctgcacctcatcgtgtaagcgcctcgtatatcctggttcggggctgatgagagggactgagtttctcaagcttgctgctattgtcacgctggactgacccattcctggcygtggggctctcccaggcattgcaggatgtcagcagcaccctggcctctacacacccggtgccaggagtatcctccaagtgatgacaaccaaaatgtctccaggcactgccaaatgtcccctggggccagtgagaaccgctggcctagaatcagatatttctggagagaaggtgtgaaaatgtccaagagtgaatggaatatttgacaatgagcatgtgttacatttataattaaaaacatcaaaaagcaaagtgaatggggaggcgtaggtattagttttattcatgagttcttgcaatttttttgtgaatctttcagacagtgaatgaactgaatgcttgagaaagcgtgtagcagcaataatactctaataatatcttagttaacaggatgacagtttcagttggtgcagcctgggtgtctcagcccccgcatgcacgggttaggggtgacctcagctgcttcacatctgggccagccccaccctccctgcacaactgccctgcccactccacccctggacagtcttctagcaggattttgccatacactgggaattactacaaataagttttccccgagtagtgctataaaatgctcacttttctttgttttcatgcctgagatccctccagttttagatggatttgagtacaagactctgcccctggatcacctgaggtcaggagtttgagaccagcttggccaacatggtgaaaccttatctactaaaaatacaaaaaaattagctgggtgtggtggcaggtgcctgtaatcccagttacttggaaggttgaggcaggagaattgcttgaacccaggaagtggaggttgcagtgagccaagattgcaccattgcacccagcctgggtgatagagagagactctgtctcaaaaaagaaagagggaaaaaaagactctgccctcaccttaatttttttgttgttgttgtagagacagggtctcactatgttgcccaggctggtctcaaactcctgggctcagtcgatcttcccacctcagccttccaaagtgctgggattacagacatgaggctcctgctcagtaagaccctccctttaaaaaaatgcagatactggctgggcatggtggctcacgcctgtaatcccagcactttgggaggctggggtaggaggatcgattgagcccaggagtttgagaccagcctgaccaacatggtgagaccccatctctactgaaaatacaaaaattagcgaggtgtggtggcagatgcctgtaatcccagctactcaagaggcgctgaggcatgagaattgcttgaactgggaggtggaggttgcagtgagccgagattgtgtcactgcactccagcctgggtgatagagcgagactccatctcaaaaaacaaacacaaacaaacaaacccaaaaaacacacaaacaaaaaaaccaagcagatagctggtaggaggcgctgagggtggactcctcagttgccttagctgcattgcagggataagttctttgaggaagggagagagaatggaatggtcactttagaggggacgattgataggcaacagggcaggctaccatggacagtaaaggccacagagacctggcaaggagggctccaggaggcacagaaaggggttgccaactattacctgcgctctaagattttgctaaagactggcctggagcccaggaagagaagaagtcacttgtcttttctctccactaccctcgtgtgcccctctgcccttaggwtgcggaatttggtcagagccgttcatgtcagagctcrgcagaatggcagctgaaccctgggagagcactgcctrttctgagaaaggcctgcaattgtgtcttcacgatgcttttccaagacagccaaggcaggtataattttcctcagcaagaaagaggaacctcggaggtgtgcaccgcctggctggccacccaggtattggcaaaagtgactgtygggctgctggmccggcccccgcccgccgtccctggagcactcacgatgcggtccggcggcggcgtgctccggatgaagcacttgatctggcccttctcgccgtggagggcgtgctgggtctgggtgctggagatgatggggggtcctgttgagaaacagcgtcccattaggcacccgggaagggcacgtccctgctggcgccctcttgggtgggttcagaagtgtattcattaatccaagcattcagcaaacatttgccgaaggcctgtatgtgcaaggtaaagtgcaaggtagaggactcagagataaattaggcattcagtcataaacctctcaagggatcatgagcgaatgcttctaagtcagaacccccagaagatacaaataactgtaataaaaggtggtgagtgttagtaccacaggagcggtgcagataaagtgctaaccgacttcagaggagagagaataattctatctggcggacggggaaagctttagggaggaggtggtaagcctgcagagggggtggggaggtgtctagatgaaggaagactcccccgcctcagccagcggcacccctgcgagccattcctcagatatccagtagagggcgcccttgcctaacaaatgggagctgctcggccagacgggccaacgggaagaaatggttgctgtccctctccttagggcgggaatcaccccggacagggggaatgcatgcgctggccgtgttcacagccctcctcccacctgtgtctcaggaggtcctgcagttcatcatcttgtctgcctccacgtccatacccagactgcccaagtgaggccatggctcccaaactgaccccaatattatcatatcacagagtgtggcacatgtttatgggtgtcaggttctgagagcgcctgtctcattcaccacattgcacagccaagagagttcacctggtggaggggagcctgttccccagcgcctcctgtccagttccgcctgttacctaacccaagtctttcccctgtgacgcctgcctggccgtgaaagacaaaagaaggagcagctagcttagcctgggctctgctggcttcctggctgggctgggtggttgaaggatgggagtagggacggaaactgtcatgctccctttccaatccctggggtcacagttgggacttagatggcagataccagaggaaagacagccgggagcaacgcatctggagaacacacagaattatgcaggaacaaaacaaaaattgctgcaaacataattgctgtttattagccaccttaattaaagcagatttgcatttctatgagtagctctcagccaagggagaaaaggtactgtagacactccagtgacttctgttgagtttgagaaggcaaaagggctcggggcagcgtgaggtgggcgtgggggaccctccatggctttaagaatgggctgagcgctgccctccttcctaaaaatccttcagctccaacaggtctaggacccaaagagatgaggagattgatgttttaggaaccggatggtgctttgttttattgctggactaaaacgtgatgataatataaaaccttttctggtcaggtgcggtggctcacacctagaaacctagcactttgggaggctgaggagggtggatcacaaggtcaggagttcaagaccagcctggccaatatggtgaaaccccgtctgtactaaaaatacaaaaatttttagtatttattatttagcctccctacttgggaggctgaggcaggagaattgcttgaacctgggaggtgraggttgcagtgagccgagattgcgccactgcactccagcctgggcgacagagcgagactccagctcaaaaaaaaaaaacaaaaaaaaaacaaaaaacccaacatgcacagacacacaaaacacacacacacacacacacacacacacacacacaaaaaaccttttccttgtgcttcccaggagctaggaattccctgaggggttttcatgattctaaaagccatcatcaaatgcatctgcttcttaaaagaaaatgaaaaccaggataaagggaaatggggtgagggttagtaagatttctctccccttcctgcagatacctgatttgagccaaatcggttgaggtgtgtgccaatttctttcccaaaggactgctgcgctggccagcagttgtccaaggctgggatttgtcgcgataaaaacctgatctcatttgaatgctttcatatcaccagctccctccagcccatgcccaggtcccatccactgggcgtcccccctccctctgcctgctctgcagaagcaggggcagacagttcgccccctggcaggtctggtgcgctcccctccggggccactgaactcatccacctgcctccaggtgtgtgaggccaccctagtcaagaaataaacaagcagcttctttgcttccctccaatccctccagcttttctctgcctggaagcctcggggagcttgtgctggcaggggtggaggcagaggaggggagagaaagagacctggagagtgcagattcaaccttggtcagcgccagggcccgggtttcagtgccctccccgtccaagagaaatgtccctcccggcctgtgttccccagggggcattctctcctcaagaaatctctttaaatctcccttggaaatgtctgaacgtctaaagtgacagcagatgtcagctcctcctttatccacctgcttttccccagaaacgccaatgctcatttgatgctccaggcttgggggccctggagtgcatgagtgagtgtgagggtcccgggctggctggtcatagggccagcagagcagagccggctgcaggcacagacagcctgacttccgagtgccctggctggcgcgggctgtgtggagggccgctgatttcactggggcctggagctctgagccgagtgtcagacacctgcgctgaaaggaaaaggctgcagcctgtgttgccatggatatacggaggcgcgatcagatgctgttatttttagccctgcagtgccaatttattggtggcatcctggggacactcaggaaaggcaggagggctccgactcagggctctgccaggacaggtggctgtgaacgtgctggggtctgggtagactcagcctcccttgggggctgccacgactctggggtggggggagaggaatggaaatgcggggcagtgtsgggggagctggtgaatggagacagtagagaggtatggctgaggagacaccaagctggttttggttttctagcgaaggggagaatagatgaggccatcagcaggtggctttctgggtagagaggaagctgaagcccacgagctaatttggagacctcaggagggccctgctctggggccaggacccagatgtcctgcaratgttggtggttcagttcctgcagggtcccagagctttggggttttgatctgagtcaggctatggtgggaacaggggcctcccaaagggcagtgggcatgacagaggtgaggggggagcattcggaaacggcagaggaatcgaactggcagctttgctttttgcctgtggccaaagcaccagatagggcagggacgtccgcatttgcgtcctggtgccacaaccttcttgggtctggcctgagccaggtctcagcttctccatgactgtctacaccccatcattcaggcctggtgtgatgcccttgtccctacatatttcatgtaacagtcattcatctactaactcccaccgtgaaaatactcccctgctgcaattatttttattatatataataagacatgctccctgccctcaagggggcccctgaacacgtggcctcgtggagacggtgacagggctccctggctgggtgactcacacgcattgggaagaggctgatcaggagctgcagagatgctctcttaaattctcatggggccaggagaggtggctcacgcctataatcccagcactttgggaggccgaggcaggtggctcacttgaggttaggagttggagaccaacaatggtgaaaccctgtctctactaaaaatacaaaaattagctgggcgtagtggcacgtgcctgtagtcccagctactcaggaaggtgaggttgcagtgagctgagatcgtgccactgcattccagtctggacaacagagcgagactccatctcaaaaagcaaaaaaccaacaaaaaattctcacgggccaaggccatggtgagtggatgaaagggtggacacgttggccacctagtgacctctgatgctttttttcctggccaggataaaattcatcacccaccactctcagggctgagaccccttcaaagctaacaaacaaaaagagaggtgactagaaaactacccaggcccttcctccctcagcctgggtctgacggggaatccaggaggtggacctaattgttgtctacccatagttggaggtgacagcaaggcccagagccagcgacagctcctttggggctatgcctggtgccaagatgcctgaggtccttcttccctccctcaggcctggctcaccccagcgagggtcttaccattgacggtcagggtcacctctctctccccggctcccacacggggcaccacagcccggcacacgtacttgcccgcgtcctcctggcgcacggatttgagggtcagggtcttctcattgctcaggacctaggagaattggcaggctcagaygccaagagcaggcggaggggtgcactcttgtmtctgggaacaaggcagytgagaggctggcctggggtaactgaggcagtctccggcatctcagtaggaagcaaggtggggaggaaagaggccaaaagtttcctggcccagacaatgcctgtgggctgtacagaggagactgtaccagcagagaggccrccccgtgtgactgaggatgttacatcccaggcgcagccctgtgggctgggggcatgtgggggcacatgtgccggaggagggggatgcctgcctggggacttccaggtttcctcctacaggaacctccctgtacctgcggtggcttctcctctcccaggctagccatgggtgacatgatcctacagctgaacttctctgggggctcctggacctgttttcagagtcattttcaggatccctttgggatatagcttggagtgatgaaaacaggctctggcatgagcttggtctgcgttcgaatcccggctccagcagtgaacacctgtgtctctttggtcagttacttatcttctcagacgctccctttctatgtatggaggctgctaggataatgcagcgtctgctacataacaggccacacaaaggtcggtttccttctggtccccctgcttccctaccyggrrctctccctgttccttcctatgtgaggacatctgacaatctcttatgcacygaagaatatatacgtcttaaaagaggaacacaagggctggacacggtggctcacgcctgtaatcccagcactttgggaggccgaggtgggcggatcacctgaggttgggagtttgagactagtgtgaccaacatggagaaaccctgtctctactaaaaatacaaaattagctgggcgtggtggcccatacccatagtcccagctactcaggaggctgaggcaggagaattacttgaacccgggaggcggagtttgtggtaagccaagatcacgccgttgcactccagcctgggcaacgagagcaaaactccatctcaaaaaaaaaaaaaaaaaaaaatggaacacaggaaagtgaagcccaagtccaaggctaagggtggctttatttgggggaagtttaaaaggctctttctttctctttcttttctttctctctctttcttttctttctctctttctttctttctttctctctctctcttcctttcttcctttctttctttcctttcttcttcttttttttccccaaggtcttgctacgttgcccaggctggacttaaactcttgagctcatgtgatccttccacctcagcctcctgagtagctgggactacaggtgtgtgccactgtgcccacttgaaaagcctttctagtgccttccctcccagcacattggtgaccacctacttttcttgtaaggtttaggacagggcaagagtgcaatggctgaatgtgctcagggtgggacaggcacatgggggtgcctgggttccccctcctctttctgggatctttctccctgtggcttacactggaggctgactcccccagtctaatagtgagaggggcctgggcarcagttccttcttgctccactgtcccygccccctgccagaggtgccccgaggtctgagctgcagcctcaccactccggagccccgcttcatccagacgatggtcagggatgggttgccggtccaggcgcagctgaagatggcatcagagcccagatccacgagcaaggattggggttctgtggtcatccggggcccaactgcgatgtgaggaagaagaagacaggttcaggtgggtggggagctctgggatcctccttgctgctscctccttttccccctagaccttgactggggggaggcaggcagtggggtacttgtgccacctcagtcgcttccattttaagtcttatgtccgggcggggtctgggatctgggagtgggactcaggaagcaaggaggagaccactctccctgaggcttcgcctctcttgggcccatggaggtggtcggcagcgtggggcctgggaagaaggtgctggggaccaggttctgcctggatttacccccacggctctcatccccttccctctgtctggatcacgcccggtgctagaaagctgcggaagcccctccatcccagtggcgggcaggggccctcctcctgccctggaaatctgggctcttgggatcttcatgcctctgccttcaagctagctgccatctcctccagcctcagccttcatgacctggaatcgagtgactggtgcacctctggggtgggatgggggctctgagatgcagggtgatggaggcagggctctcgtgacccacgcctcctcccccagggtttcccacccggtgctctcaggccaccctcctattacagccgttccagcctctgtgtcacgcccattgcagtggagcagccctgggttccacttccgacccctctcctaagcattaaagagctgaatgcaggctcctctccaccttccctagcatgtctggagccttctgtagaccaagcttggtctacacagtgggggccgtgtggggattccaggctcagggtccgaccgtggccaggcaggcctcagagtgctccttccagggagcagacagagcctgaagcctggtgccaggagactgcgattagtcccctgatgtaaaaagggagtaacagcactttcttcggaggcttcaagggcaagggggagggccagattttttcaagtttgtaaaagcaagtttaaaactgtaaggggcggtgcatgagctaaggatgcttgttttgaacacatccagccagctagtccatggcagtgcgctgccttgctgcgggtccctgctggacctccagtgaataagaggggatgggcaggtgcggtggctcatgcctgtaatcccagcactttgggaggcagaggtgggtagatcacgaggtcaggagattgagaccatcctggccaacatggtgaaactgtctctactaaaaatacaaaaattatctgggtatggtggcaagtgcctgtagtcccagctactcgggaggctgaggcaggagaatctcttgaaccagggagttggaggttgcagtgagcagagatcttgccactgcattccagcctggtggcagagtgagactgtctcaaaaaaaaaaaaaaaaaaaaaagaaatawaaagaaaaagaaggtacgtccgtgagtcccctcagtggaaggcagcagaatgtgtgaatgggcaatggatttggtcattgcctgggttcagttctcatttggccacctactgtgtgacctcagacctccatctcctcattcagatgatgagaataaatatctacccatgatggcctgcgtgcttgtgtcccccgtcaaccctgcaattcgtaaattgaaatcctcacccctgtgggatggtagtaggaggaggagctttgcaggggcaggggttagatcatgagagtggagccctcgtgatgagattagtgcccttggaataaaggccccaagagcttgcttctctctttctctctgccatgggatgccacagcaagaaggcagctgcctgcaagccaggaagagagtccccaccaaaacccaccacgatggcaccctgatttcagccatttaagccaccgagtctatggtaacgtgtcatagcagccccagccaagaccctgactcatggggtcatgatagggattgaaataaacatgaaacaatgcacaaaccagctttcgtcgagtgcaaaccatcctacgctcatgacgcatgaagcttgtgttgtgtgcaatgaatctagccctggtttctccagctctaagcagaaaccagtggatgcctgctcgcctggggaagcctgcaccactgcactcacagtagacgtcaaccgtgcggctgaggttggtgctgcccagggcgttggtcacctcacaggagacgggctctgagaagtacgtgtagtccactgtggtcctgtacacctctccagatgcctccttgatgatctggccccgcttggcccacctgcaacaaaggccaggggctgatgtgggccttgagtggcaaggccaaccctccgggagctggacacatccatcccaygraaaaatgaggcctgggttgtgtggcaagtggggagtcctctggggtccgtcaaggggaatcttcacagaggggctacttcaasggctcagaaagagttggttttgctcccacccaggtggttgtgaaggcagtgggctttggtttgtggtcaccaggcagtcagtggcactcaacaagtgggttattctggagggggtgagttgattactcggctggtcagcccatctgctggctagacgatggaaaatccaactgtcagtgggcagacagctcgctgtcctgctctgagctggatcatgggcccctttggaaaagaaggaggccaagtccatgacctcagaggccagggtcaaacggagcatgcccatacatgcatgctcatacgtgtgcacgagcacacacacacacactgacaaggcgagaagctgtaggagaggtatgctgtaggggctccatctcccgtccaaacagtggaatactaatacccatcaggaggagtggcgtgagcgagtagccctggctgcccctctctttcctcttgacaagctctcagctctcctgtcctgttctgcctcctgcttccatggggttctgcatggtgtctcctcgccccagaaagtcctcctagtttccctggatggcacttgctcttcttcctgcctggcctctgcccttgcagcctggctttgctcctctgaagcaatggctccatcagcactggcttggtgaggggatgtgagtcggaagtctcttttgtcggccaatcggtaccacacaataggggaggacaggaggcctctggcttgctttggatctggctctggggcagtgacccctgtgttggaccagtgacccagcagcctgctgtgtgcagaaagcaacggagcctcacaggggtgtatgtgtatacacatgtatgtgggtgtatgtgtatacacatgtatgtgtgtgcatgtgtgttcatgtgaatgtgtgcatgtatgtgtgcacgtgtgcatatgaatatgcatgtgtgagtgtgcctgtgtgtgcatgtgtgagcatgtgcgtgtgtgcatgtgtgagtgtgcccatgtgcacgtgtgcatgtgtgagygtgggcatgtgtgtccatgtgcatgtgtgcatgtgtgagtgtgcatgtgtgagtgtgggtatgtgtgagtgtgtgcatgtgtgagtgggcatgtatgtgtccatgtgtatgtgcgcatctgtgagtgtgtgaatgtgtgcatgtgtgtgggtgtgagtgtgtgcatgtgtgtgtgtgcatctgcgtatgtgtgcatgtgtgtcaatgtgcatgtgtgcatgtgcgtgtgcatgtgtgcatgtgcatgtgtgcatgtgtgtgtccatcggcgtgtgygagcatgtgcatgtgggagcatgtgcacgtgtgtgtgcatgagtgtgtgtgtgtccatgtgcatggtgcgtgtgtggtgcgtgcatgtgcgagtttgtgcatgtgtgaatgtgggcatgtgtgagtgtgggcatgtatgactgtgtgcatgtgtgagggtgtgcatctgtgcatgtgtgtgtctgcatgtgaaagtgtgggcatatgtgtgtatgcgtgtatagatgtgtgagcatgtgcacgtgtgtgtgcatgtgtgcatgtgtgcatgtgcgtgtgtgcatgtgcgtgtgtgtccacgtgcatgtgtgcatgtgtgtgggcgtgtgtgcatgtgtgagcgtgtgcatgcatgggtgtgtgcatgtgtcaatgtgcatgtgtgcacgtgagtgcatgtgtccatgtgcatgtgtacatgtgtgagcatgtgcatgtgtgcatgcatgtgcatgtgtgtgcgtgtgtgcatatgtgtccatgtgcatgtgtgcatgtgtgtgtgtgcatgtgcatgtgtgtgcatgtgtaaatgtgggcacgtgtgaatgtgtacatgtgtgaatgtggccgtgtgtgtgcatgtgtgtgcatgtgtgggtgtgtgtatgcatgtgtacatgtgtgagcatgtgtgcattgcttgtgtgtccgtgtgcatgtgtgcgtgtgtgcatgtgtgcatgtgtgtgcatgtggttgtgtgcattagtgagtgtgtgcatgtgtgtgcgtrtgtgmgwgtgastatgtgtgagcgtgtgcatgtgtgaacgtgtgcatgtgtgcatgtgtgtgcatgtgtgagcgtgtgcatgtgtgtgtccaagtgcatgcgcatgtgtgggcatgtgcatgtgtgtgtgcgcatgtgtgtgcatgtgtgagtgtgtccatttgtgagtgggtgcatgtgtgagagtgtgcatgtgtgcatgtgtgtgatcatgtgcakgtgtgtgtgcgtgtgtgtacatgtgtgagcatgtgcatgtgtgcatgtgtgtccatgtgcatgtgtgcatgtatgggcgtgtgcatgtgtgagtgtgtgcatatgtgcgtgtgtgtgcacgtgtgagtgtgtgcatgtgtgagcacgtgcatatgcatgtgaagttgggggcttccttacggatctccagggagagagagttctccgtttcccctggtttaatcctattctgatcaacattcttttttttgaaaccacggaacttctcttcaggctgttacagttgaagtgtctatggggagtttgtctttccagagctgcagaggcttgttgcctccagaagcgtcaccccacagccactgctccctggaactgcagtgtctctgctcccctgctttgcctcccctttatcttattcctggagcctttcctggcaccacaaacgccgtctcctgcccttccctccattagcttcttgcctccgtctgacccatccagccccgagagacgactgtttcttggcatcagacagaacacctaggctggcaccaagcagttgttattgcaaattaatattgggtaattattaagaacacaattaataataacaactgtagtttaacaacagagcaaaccatatctcccttagagcttaaggagcttcccaacaaaccattatgagttattcatgtgtcgtttcaatctcttaactttgatttaatgaccagacttaaaagagtcaggccggcccctgcctgcggcaaatgaattcagttccaggcacagctagggaagtgtgtccagccccgcagttcctttcaccctgctgaggcgagggggccaggtggtgkatgcagcgtgaggccaagcgggcagctggctgggctgggaaggcagggagccctggctgctcacagctgtgggtgccgggctggggctggagggtttgggcccaggtgatagggccaagcatgcgtcttcctcagggcttcctggagaagctctcgcctctcctctccttccagggcccctcaccaggagcatcacggagggtggaagccccacctgcttggccccaagtaatcagcagaactgctgctggctccgggagccaaggttccctgccctccctgtcctctcctctcatggtgagggagccagagacggaagaggaccggagccgctgtcggggctgggtccgcaggagcccaagccaggtcttttggggaggtgcctcaggacccgacagagcccgcagctcacatctcgcccagccggtctttcttcccctcctgcactgaaaaaccctctgagaggtccctgccaaaagcacagacactcaaaccactgcatccacgcagctggccaaggatccaggccaagagctaaagagtgagtctcgccccaccctcttcgtgcctctcctgattttggtgcagtttcttccctgtcctycctctttgtctcctcccctctccccacccacctcccccaactcactgttgcttccccacctcccccagcccctctgaaagtggagtcagcttaagcctctcccaatcaatgtctaatttggtctgaacaaatgtaagaggattaattatttatatcacagaatcaggggggctggcgtgtcacagccgccaggttgtcctcaaatagaccaaggtttcatctcgtgtgggggggccacatcccgctatctgctggggaacactgagagactctcagaggaaagggccccaaagcactttgggctcctggtccctaggagcatctgcagtgacatccccatgccacccaggcctcctttccaggcactgggatggaggagggcgttatctctagcttcagagacgacagcctcttagtgacagcagggaggaagctatcaagatgaatgaaagtaaagaaacaaagtttcctgtaatcttgtcagttaggaaaaatcaatgtacttatgtgatgagatttgcttacggcttttcttcttggatcccaacattgcttctaaacacctggctgcttggtgagaccttgctggagtgaaggggctgagcgagtgtgggtgggtgcaggcgcccaccacctcccctctccgtggcccctccgcctcctcccttcccaggccactctggctctctggcattaacctgggggccggaggggctccctgaaagcctctggagtcctggagggagatgacccctcagtgaggtgttttcagggcccttcactaatcagaaggccatgagggaaggtgaccaggaagaactagtgagtctctgcagggcaccctgccctccctgcccctcccagctcctgcttggtataggaggggccggctgtgatactgtgagctccaggggagtacgaaagggaggacccacaggccacctgtagcatggggaagcccgcatgttctctgcttgttcattaacttttcagcttgcaaaaaacaaacttcggaattacagaaaagttgtaagaatagtcccattaactgccaccctcccatcgccggattcaccagttgttaacattttctcacgcgtgctttgcggagacctctcctctcctcccaccttcttctctttcctattattgctgttctgcttttttgaggttggtgaccctgggaatcaggcccagcacttcgtttcctgggtgtttgctgtccgggtcagtaggcaggtgtgggtgggggaggcaggcctgggggtggaggggtcaggtcccagggcgtgcagccctgctgtctgcccagcctacccatcactaggaccccaggtgaccagagcctggcagtgaggagaaacgaaagtcgaaagttgtgtgtcctggtctctggggcgcccaacaggcattctaagggtggctgtgagggtgaataggggtgcttgccgggtggtctgtgggtgtgaagggctgccctgggaagctagcatgacagatattttctgggcatgttgtacctggtgtttagggaccaggagcagagacctgggagcagacagaggagagaagctgaacttgtatggagaaacccaggcctggcaggtgcagcgtggaagcytagggccagggagtctcattgggcgcctctcttgtatcttcagtggcttctgaatagatgccagaccacagccaaaccagacttgccccctggacctggctggacccacatgattctggggagcctggagtccccggctcagaagggaccctggaggtcatctgttctttcttctgactctagtcaagcaaatggttaaactggacaggacaaatgggtttcatcctatttaaaaatatccttggggataggaactctgggctctgcctgggtttctgactccagtgctgcttaattacgcactctgcagggagcacctcctcatgtccaacctgaatccctggctgtccctgtggcccatttccttccattctgcccacgggggccacactggctcttgtcttccctgttctccattcccacaggccggcttatttcctaggctggcaccattaacatccttggcctttgcagatgctgcagcttaatggccgagatcaatggcagaggtgacacctgggctccaccactaagcctggtctggtggaaagagaccaggctgagtcagggccatggcaagttccacgtggcacccaaaaggaggtgagtctgcccttgagtgcctccaaggtcacttagtctcctagagtcttgtgcagtgacagtgcccaggcagaaaggcgcccagaggaagcgtgtgtttattggatcagtcagacacatctaaggagcatgtggtttatgccatgtgctgtgctgcatgctgagagccatcagtgactaaattgcagttcctgccttcaagaagctctgtcacaaggcagaaacaagtaaaacaaaaacagtgatgctttggccgggtgcggtggctcatgcctgtaatcccagcactttgggaggctgaggcaggtggatcacgaggtcaggagatcgagaccatcctggctaacacggtgaaacgctgtctctactaaaaatacaaaaaaaaaaaaaaattagctggcgtggtggcgggcgcctgtagtcccagctacttgggaggctgaggcgggagaatggcgtgaacccaggaggcagagcttgccagtgagctgagatcacgccactgcactccagcctgggtgacagagcgagactctgtctcaaaacaaacaaagaaacaaacaaacaaacaaaccaacaaaccaaacagtggtgcttttatccgtgttgtgagcaagagacacacaggggccatgagtaagtgtgatcccggatgctcactggactgggccggggcccagacatcctgatctacccaggtgaaccagtttgatgggcacaagactagaatggaggttctgatcttgctgcttctcctggttgttctggtttttttttgttttcgttttttttttttttttttcctgagccttttccccatgtttggagtgtggaataatcaggctattcaagcagaagccgtgagtcctgcttcctccagtggaagagggcgcgtgcacgcacagaggagaggaagggtccacacggctagcaggcaggcgggtttaagaggaagggaagaaggctactggacacgcggtgtggactaggcacacactgcagccatgctgaggaccctaagtgacatcccacgtgagaggcacgggggtgggggccagtggccaggccgggccccctcagcagtgactctcacctgtactgggtgacagctgggttggcctttgcagagcagtggaaagtgacgacgttgtcctccagcactggctgtggctccaccgagaggttgaccagtggagggtctgcagggagaggagagtcacttgtagaccggagaaagaatgggggcagggagatcctgggcgacatggaggatacagccagagactccaccacccagggaccctcagagcagcccccgccctggtggtcttcaggaagctgggggctccatgggaggtgcctgcttcagacagtcctggaggtgggaacagggcctccccgtggacttggggcctggygtggacacgaaccccgagccaggaagcctcaggcttgggcccaggggtttcccatcctccaacttttgggcggaacaaaataatctaggaaggagaggtgggaagaggggtgcagggcagagaggggcgcgtggacactcagtctcgcttcagtgcagactgtctttgaaatgtctgtttattatctcttttccgtaaaggttctggggcatttgttaacttgaaagcggcatttacaccctttcatcagcctaatcatctccactcagtcctggctggtggcgcacggcctcagcttcccaggccggggctcgcttcctcatttgacgtgataagaagccaggctctgaagtgctaaatggtgggaaggggaggagacagaaagtcagggagagaaagaggcagggagacaagaaccagagacacacagagacacacagaagggaccggaggccgacagcgagacaygtacatagaggagagacatggagaccatagaggaagagagattatgtgtgtgtgtgtgtgtgtgtgtgtatgtgtatgtgtgtgtatgcatgtgtatatgtatgtgtgtgtatgtgtgtatgcatgtgtgtgtatgcatatgtgtatgtgtgtatgcgtgtgtatgtctctgtgtgtatgcatgtgtatgtgtatatgtgtgtgtgtatgtatgtctctgtgtgtatgcgtgtatgtgtgtatgcgtgtgtttgtatgtgtgtatgcacgtgtgtatgtgtgtctatgcgtgtgtgtatgtgtatgtgtgtgtatacatgtgtatatgtgtgtatgcttatatgtatgtatgtatgcgtgtgtgtatgtgtgtgtgtatgtgtgtgtagagcgagagagagagagacaaagatgaggaagtgacagggacagggagagacatgggcagagagacagaaagacacacacatagaaattgagaagtgcagaaaaagggcgagaaaaagagaaatctagagaagcagagggcagagtgatggagagatggagagactgacctgtttgcagagactgtgaatcagacaagaatttcagaccaaaagcagaaaaggccacggagacccggcacatagggcccgacaatgacagggtgttagagagaaagaccaagtcaaacaacgaggaaaagagatatgaaggaggagcagacgctgcaagatggaaagatggaaacagctcgagggggctgcagcagagagacagagaggtgggaagggcttccatcagcctggccctgcccagctcaggggcagctggctctggatcctctccagaggctggtgtcacccctgctgctgggctcctggtggcccccaggcctcggcacccccggggcatccacacgccgagggatgggggataacgagccagttcccatcctttttccctgtcatggcccagagstctggctgagttgagtgggcagcccaggacctcatccccatggacaggctgggccctgggctgcatcttctgggtcagtccccaccaacaagcagrgcaaattgctggaaagtcacgaggacttctaggggtccagcccatttccagaaaaagaagtaaagaaaccagtttctcagaggcaatgaggaaaaatgctggtctctttcggtccccatgggggcaccacaaagggagcaaggccccagctggcccagttggtctgggctctggttgggactayggtggggtcctgagaccctcagagagtcatacagtcatgcactcagcctctaagctgcagaccgagccggccttactctgagttcggatcacataactgctcagctgccctcttcctgctggtgcccaagaggaccctgcctccctgcctagtgccaggcacgggagctggcctgagagatggccccagggctgtgctggtgtctgcaggcactggggagagaactctgttttctgagtagcaggtggctgactgtgctggggagcctgttctcccacattttccctagttccagacgggggaccacaaatccaggaaacctctgctcctggtgcggtcagcctgcctgcctttcgtggggaattacaagggaagtgccctcacttgtgatctcaatcccagttgtaaggcataattcaagtggtcacaaagatggggttacaaggaatagccacgagaacgctcctcccacccccagaaccccgtgacctctcctcgaagctgcaccctagcttccagggcaaggctgaatcaggagttccagccctctttccatgcagggctggctggctgatctgsgcgtccgtgggaccctacctagagaacatggacactcagggaggagcctgcatctcgccgtgggttggagaagtggaggtggggcagaggagcttgggaatcgccaccggatccaaacgcattgctggcccgtgccctcgcattataaaggccaacgctgggacgtgagtacccaccccaagtctggtttgaggaggtgagtgccagtcccataggctcaagggacccgccacagaacttggggggctgttccaggaggcccttccctcacctgggggtcttttctaaagtgatgaggtctgagaggcagggaggtggggcacacacctgttgtaggaccttcctgctgcccgatgcctcatcacgcccctgccatgatcagctcactcgtaaggctgctctcctgcactttcccttcctcttagcatcgtctttggtgatcacctgccccgaagcgattcacaagggttccacactcactggccatatctgcacctccaccccaagaccagaggtgcccaagcttctttctccacttctgctggtgtacagaatatacattttcaggagtctgccaagctccagaggtataaatagtttatgtcatatccaactattaaacatgattttaatctcacttgtgatgtcggcagcataacttgcaggagggcagctttgatgtagctggtggaactgagatcacattgaacagatgttacagctgagagtctgttagtgtttccatccgcccgtgtgtgcgtgtgtccatgtgtgtgtgttttcaggggaagtattacatggaggagagggtgggaaaagagagaatcttcatgactcagtgattttgtagcacattcatttgaaacttggcagctggacacagagtccagatgtggtgaggctttgggggtgttaagctttctctcccattactcaatctgagggctttgtcttccgttgggtaacatatgaagaccaagagaaacaaacaacaaatgtgcttttgctgagtttggatgcttcttggttgactgagaaaatgagcaggttcacaaaggcagctctgatgcagcccatggtgtccttagtaaacagttggatgctgactgaatgaacaaatgaataaatggaggaggagcgggagcaggaggagggggaaggggggagggagcgggtggagaacgtgtgctttgcttggcaagcacatacaagcaccttcaggctaggggcggtgagcgcggggacaaatggatgaagatcccttgcctgttagggctgtggggacacctgatgaggggcaccactcacctatggctctgcgtcctgacagcagctggtaggtgtggggcactcacaacgtgtcagacactgcgctagggggcttgacaggaaggatttcatttaatcctcactgcaaccttaggaggtaagcatgattacttccatgtacagaggaggaaatcggggcacaaggaggttaactaaccgggtcagtgccactcagtaagtggcagagagttcaaagcaggaagaatgctgtggccttcaccactacccagtactgccttggacgaggctggtctgggaaactgggctgctgggccccaagtgtcactctgacctcattctgacgcctcctaaggtggctgagatgtccttggaaaggaagccagaaagggcccagaggcctggcaagacccagtgtcctctggatgcagactgtcacctgcaccctgttgaacgatcttctgtgggcatgagtgcagaaggccgggtgggctgtggttaggagggcgagtttcccgttgcctggagaggttctcctggggtaatgcctggagcaggaaactgcttcttcccacctctccctgccaggacctacgctgctgtcgcagggggccagctagattgtcacttttgtccaggagtctgtaacattttgtacaggcctcctgatcaggttggggacaggctggggaagaagcgagggtggtggtggtggcagtgaatcgaatggcagcctggaagtaggaagcttggatgctctgtgtctcccgccctctccccttcctgatttggattgcatctggacagagagctctgatccgtggccagtcctcgggcaagaaggggccttggatgtcatttggccaaatcagacaaggaaccagagtcccctagggtgatgtgacaggcgtaggcccagcccacccatgggttgtggagccgtcgtggatgctggactgcatggctttgcggcatctcaccttttccagtggggcttactgctccatgtggctgctcaccacacaggaggaggcgktgctcagacccaggacccaggccagggccagggccagtgagggggaagagccgagggtcggagattaaggaggcctggcctcactttcagggccagccctgcttgcaytgtgtgcccygggacctccttcagtcaccctagctctaggcttggccagagctccgcggccctggctgcttgtgaatgaggatgccagaaggctccttggtacaggggtatgtcgggggttgtaggggggacagagatgtttgttaatagctggtggcaagacagtgaagataaagtcccccccgccccaagaactcagcctttgtgtgtgggtatcttgagcctacctgaggttttcaaccatttcttctgccctctggaatctaaatggtgtctgtcaggattctagacactggctgggaacttctgctctcagctgccaagatgagctctcagaaccttaagacctggaccccatctctggactccaggtccctggagagacactcggagcccagaatccacaaggcttagagaaatcagggctgttaggaagtgtttttaaatgcacttgctttaaaatgagtaaaaggctaaggaggacacgaatgccagcctgcagctccagccttgaaattcagagcccaggacagaagcagccaccyrcttgcagtagcgttatgtttggcggcagggaggggatctcagaggagagaagtccacttttgagtcctgactctttaaactgaactaatccagtcttgagaggaaggcccctggaacaccttgctgagctcttcttggttctggggctgacaggcaccttagggagacttttaggagactttcaggggtctctgttaggtggttgtgggatgcgatgctggtggagccctgaagcatcataactgtcaacatgaatcctaacacgggccaccgagggctggctgggcaggagtgtggagaggatgttaccagggtggactctggaaatctatgctacctaagtggtcttgggcaagttaatcaccctttcggtgcctcagtttcccayggtagggaccacagttgcaccttctccaaacagttgttgtaaagattaaataaggccaggcgaagtggctcacatctgtaatcccagcactttaggaggccaaggcgggcggaacacttgaggtcaggagtttgagaccagcttggccaatatggtgaaaccccatatctactaaagatacagaaattagctgggtgtagtgatggatgcctgtcatcccagctactcaggcaggctaagacaggagaatcgcttgaacctgggcagcagaggttgcagtgagccgagattgcgtcattacactccagcctgggcaacagagtgagactcwgtctcgaaagaataaaaaaaagattaaatgagataatacatgtagatttccttcttcttgtccccttgatcaacccttccatgagagtggctggtgcaccctctccagagcacagcgctgcttgccaattctgaagcctggggacccttcaaataccagcatctccactcagacttcccctccaacagaggggccaccggctaggccagcagaggcagcagctgaccgtatttattggtgtgaaagtcccaccttgtacaggtgttgaaatgtggcctgaagatgtcctttgcgaaagaccctcatctgtgaggttgcatctcatgacagtaaggaagacaagatggtccttcctgtccgtatctacaagctggccaatccacagagctgcctgacccatttcctgctatcagatgggccaggctatggtcagggttgctgggtgtttcaccctgggcctggcagggctgggttgggggagggggtgggtactcacgctggatgtcaatggtgaccgacgtctcctttcctccggggatggctttgttggtggcacgacacacgatgctctggccattctccacgtcaccaggggagatgaagagggtgctgacgatgctctcccgcttgccgtcccgaagcagggtcttgggagaaagggaaaggggagagaaagctccatgtcgcttggctggggtggccagcctrggttgggggtaaacgagcaccagcttagayagaagggggagctgtggatggaggggttcagcttaggagacctgggctgcccatgtctacgcagagctcgggggttaccccctggctccctggcctggctaagtgctgggctgtggaaggaaaaaggaactagacagttttccaccatgtgaaaattagcctggattcacatgctaaaagcacaaaagaaagcaggatgggtttcatggaaaccaggcttcagggaggtcccatgttgaaatgaactcacatctttttgcctctggtgcttgagtgacagtctcaggctctgtaggaagcaacgagatggtttgcaaccagcagggactgtggcccctgagcggggacagtctgcagaggaggcacagtttggggaatgggagtcagagtgggtggggatatgggcagaatcagtgcacatcaacctttcgattatttgcctatataaatcctttcaactttccaaagcgtttcactccctgatctcattagagtctcaatcaaaccataggtgggacagataccattatctcccattggataggggaggaaataggtgggctagacagaggctatggagcttgaccaaactcacatttcaagttggtcctgaaataagtactagtctcctacagcaggttgaatggtgtcctctccaaattcttgtctaccaggaacctcagaatatgaccttatttgggaatagggtctttgcagtttagttaagcaattagtaattagttaaggctcttgagatgaggtcatactggattcagagtgagccttaaacccaatgactggtgtccttggaagaagagaagacagtctgctggatgtggaggctcatgtctgtaatcccagcactttgggaggctgaggtgggaggattgcttgagcctaggacttggcgaccagcctgggcaacataggaagatcctgtcactaccaaaaaaaaaaaaaaaaaagaaaaaaattaaaaaaaaattagccaggcatggtggcttgtgcctgtagtcccagctacttgggaggctaaggtgagaggatcacttgatcccggaaggttgaggctgcagtgagctgaggttgtgccactgtactccagccagggccacagagtgagaccctgcctcagaagaagaagaaaaagaaaaagaagaaggagaaggataaagagaaagtgaaagagaagaggaggaggaggagaagaggaggatgaggagaagacagagagaaacagagaaggccaggtgaaggtggaggcagagattggagggatgctgccacaagccaaggaatgccaggagctgccaggagctggaagaggcaaggaaggattttcccctggagcctttggaggggcacagccctgctgacaccttgattccagacttgttggcttctacagctgtgagataattgatttctgttgtgtcatgcaccgaattgtggtgctttgtaatggcagccctaggaagcaaacccatcttaactgctggcctcccaycttcccaggtcattgcttttctctactgggccacaatgtcattccgaagctagttccccattgtggctgctacctccttccctctcctgttcctctttgcagctacttccccatcactttggggcgcactaagtcaggtgcaccccggggagggtgtgctgagtgtgtgtgggggtgcacttccaggttgggattggggtctggtcagtatgcaaaggcttctgctactaggaggtactaggaaggaacctcactatgggtgcagtcctgtttcccccgactggagccagggagtagatgaacagaccactcctccctcaaaacctcccataaagtgacaatggcaatgtctctaattcttatgagggccccggaagacagcagcattatctttgattagccaaagagaaacctgtgttccaagtgagccgggaacttgctgggtggagctaggatttgcacttaagaatgggtgaaccctgagccacagcctctgctgcagccccgggggtgctggacggtgggtaccgtgctcttggcaggacagatgggaacagttagggccacagggagaaacctgtaagctcctagaaccccacattctgggtccttaattcagtgaggtttttctcaacttggggcaaacctcgtggcgtcaggagaacagggccagagcctctatatagaacagcacatcttgctggaggcaaagccggactgtgacattctagagagccaygcggtgcagctgcaggcctgggactcagggtgccagccacggccctgggcagaggggctggaggagagtgacgtggccagatgcagcaagccgggggcaggaccactgcagaggagtgaagttgaaccccaagccaaagcccgggcagggagggagcagcagctggcaccgctttaccaccctgccttgggctcttcagcagacctcatcgagtctataaatagccaagtgataataagaacaatttcctggatgaaactaagacttsgggtagggcgcgcaggggcggggaggtggtgaggagcaggttggtattcttcttctcttctttacatttccgttgtgctaacaagggacatttacataagcttgactctgccaggagcccttccaacggatgggctctgggcggtgggtgccagtggcaggggagggaggggacccagctctaattaggccctctgactgctccccctcctccctgcacccagcrtgctcctccgcctcggaatgatgattaatgacatatttactgggtccaggcgtgtgcttttctgggaaataaaaattctggttcaagttgtttgttccacctaattagagaaaaagggagatgtgttcattaaacaaaaggagggtgaggggaaggcacgtgccccagcaccaacaccctctctgtcccygtggaaggtcccagcacctcctgggcccctagctcgcgggggaccccaggccccgtgcagcgggtatcccagggaggaaggctgggtctgccagctctgctgcaggacgactgaggggaggaaggtgggacagagctggggggcccagggggaaggctggagggagccctgcacctgcaggacagggcgggatgtggaggggcacgggggatctgcacccccgggtttctcttcccccattcctttctgatctcgcctctcttgtttcttttgcttcactccttttcagaaatgaatctcccctaattgtcacttttctcatatgcaaatggagcctctggactttgcagccttgaaggtactgtccaggagaacattctatcatctgcaggttctagtcgcagctccactccgcccctcccttccctgcttcccttcactgagcttggctctggggacacaccatgggcattgaacctcccacctcctgcttcagaaagcttcatgccttgcaggtgagctccagaaggaagtgagttattcatggtgggccactcactgtgggagccaccgcctccaaggcctccctccagtgtggtgagcactaacgtgctgccagcccccggctcgcccaggttgcccatgtgactgccatggtggctcccaagagtccccgaggacccagctcctgtgtgtgcagatatgggccaggggcaggcatatagatggcgtgtgtgcagcatgtgtccgggaacgagcgtgccagggcatacacccccgtgggtatgtgcgcgtacctgtttttgtctttgggtgttcatgggcctctgtccactgactgccgtgactctgcggggccccaggttctctctggacgctgcctgctcaggtgccgcctcagggctgtgcacccacccccactgcccctccctaagggcagggatttggcactcacttctctagttccccagcaccggcctgggaggccggtcttcccaggtatggttgtacacagtgtaccccaccccatggttttcctgcttgggtggcagtggctggccacyctgctctttccaaagcccccagggcctcctctgggcagtggagagccaggctgagctctcggaaatgggtgggctggagggcagacaaggggtgggggcccaagcactggtgctaaatatggggtgcccgatgacaggcaaaccrtctggaaaggccgagagtagcctgattgcctggcagcaaggccgcctcgcttctccccgctactcaccttccccacctgctgggtccctttttktttttttwaaaaaaatcatggctctgcttccccttttgatagctgcttggggctccccatgggctggttgccacctggcttgaataagggtgtgtgggccaggtggaggatgcgcagtgctttttgccccagtccctgcatccagccttgaggccagaggccagaggggtgcccttcacagagaaggccaggatgagcctcggccacacccagtggagactctaggcccctaagctgggcagataggtgcagggtgatgggtgagtgaccagggagggggtgcccagtggagggtgagggccctatgcatgtgggcacttatccctttcctgagtggggtctccagagctcctcttagcaaaggtggtaaaaggcgaggccagtggtcctggtggtaggggtagagggcaaggggctccaagcagacacagacacgactgtgcgtgctaagaccttgcaaccctcctgcctggcaggaagctgcacttaggaagggttctttctgggctcagcctgtcctctcgcccctcctcttccgtaacccatccttcctcccctgctgtgtggacttgggggctttccagaagaaagaatgtggtctccactctggcgccaggccctcagaagtatgaggaacagggaaggaacccactgtccccagacagcccagggttgagtctccaggaagaagcttggaggggccttttcctgctctgtgcctctgcagccgacacccgctgggagcctgcagtgggcactgcccaaggccccatccggcagtgtggctcgccctgcaccctggaggctgtgacagtggcctgttaaggagaagcatggccagcctgtgctgggggagggactgggtgcttcctctcctgcccttcctcctggggaaggggcctggtgccctccagggytgaggctcatccctcccctactggtcccatggtggagtcacagagagaatggtcggtgagcaacccagaaactttgagaacaggcctggtgttttatgaaatagctgtatgacccctggggcagggaactggggttccccctgtgggacaggagccaataatagtagctcacatttatccagtccttactcctgcccttgacagggtgcttctgatgcataatttcttgtaagtcactctgcaaccctaacagacatccgtgatcattatcactgcattttgcagctggggaaactgaggcagagggtgacatcaccatgttatgttacggatcccaggtttgagctaggccttcagaaccatgtggccagcctaactatgacaccgatgtctgcatatgggaaacgcgaggtccatagtggggtggaccttgcagccgtgtggatccagtgagggggtgacaatcccaacagcagtgcttgttgcaagctcgctatgtgccaggcgtgtttctcattcaactcctcacaagcaccccttaaagtgggtgctgctgtcgttcccattgtatggcaaggacagggaggcacggcaaggtgaggtcacgcagctggaaggtggcagagcccggatccaaattcaggctgccagctcctgagcccacggggataatcatccaccatgtgacagccactgagggcgtcagacccgacagcagccagggctgccctgaggggtcttttctggggtccttggaggctgcctgattttgtgtgtgctcccagcttctcttcctctctgcggctgatgctctggcccctcctcatatgtagcctctctggggaagtcaggagtgctgttggcctatggcagggctccttgcagccctgggggaggagggggtgggctgggtccctgggaggggaagcagaggggttggctcggacagcccccagagcctgctccataggagccctggattgtgtaacctactgggtatactccacatcacaggcttgtagcttctccctgcccggcacacagccccgtgcctggggaagctccactgacgtgtgcgggctctgctggtcacccctttggtctccatgagaaccactggccgtggggtggacagttaggatggtggatgaccatggtttggaggagaggcccagagaaatgaagtgccttgccttgggacacagggcctcttcccatgctcatgtccagggacacattgagggtctcaggcctctgctgctccctggacaagccacagaggggcaggagaccatctgaggtgactgtcccctgaggaatctgtttctcttccggagcgtctgatccaacaccttcattttgcagacgaggaaacagatgcccagggagtgagttgcctgaggttatgcagtggaagctggaacccaggcctgcgactgcctggcgctgccgttcccgtcacaggcccaggagcatggatcgggtcccccgccctgctgtgcagtagtatggtaccaggctctccgaggggccttcacaatgtagacaaggatgacatgttgagctcaaggtgatcctgggacaggtccagcagagtgaccctgacctctctctccacctgatggcatgtgtcctctgcaggacattgactctgctagggtccaggctggcccaagttcagggagggacaggacaggtgctcagactggaaggaaagcccctatccttccttttcattctcctctggacaactctctctctgtgttatatccttgtattacataacaggacagggtggcttcagcccaggacataagggagaggcttgtcttccaagaggcagccatccctccctccccctggacttgtgtctgagggaaggagtttgccctgggttctggcaccaggtgctgggttctttgatcggcagccctggagtgacctcttggcaggtggtcagtttgggacaggaaagacacaccctcagagtggggacgggcctgcctcacatcctcggatgaccaaggccctgcttatctttccaggattgcttagaggactggtgggtagggggaaccaggccgtgtatttccccagtctctgaggacaaggaaaaccctcagacctgaggcgagcgggcgttctggaggctgggcccccagctgcggagcttgggggaccggcttgccctaggaggagcatgggcaagggcagaggccagggtgtcaggaattgtggttccaggcctggcactgcccactccaccactgagaaggacagtcacttccccaccaggcctcaattttctagctgcagacaaaagaggttggcccaggtatactgtaaggcctcattcatcttagaggctctgtgatacattaaccccatctgggactctatgcacagttttgttgagtggagtttggtgggggctgtttagaaatgtacccagatttttgtttttattcaggtagagggaggccaacagatcaggagacaactgccgttgaaaagacagtttgcggccgggcgcagtggctcaggcctgtaatcccagcactttgggaggctgaggcaggtggatcacctgaggtcgggagtttgagaccagcctgaccaacatggagtaaccccgtctcttttaaaaatacaaaaaaagaaaaaaaaattagctgggcatgatggcacacgcctgcaatcccagctattctggaggctgaggcaggagaatcacttgagcccaggaggtggaggttgcggtgagctgagatcacgccattgcactccagtctgggcaacaagagtgaaactctgtctcaaaataaataaataaataaataaataaaataaataaaaaataaaaaaagaaagaaaaaaagaaaagacagtttgctactcatagttcccagaggaaggggaggccccagggtcagttggggctggggtgggaggtgtggggagagtgtgggcacagcctctgttgtggcttgctttcataggaaggaatggtgaggtagggttggtggctcagcaggtttaggattggatagcttgaataatttccctgggccctgagctgtaggggtggtctgatgtgtggccctggggagatttagggtaggggtataatgtcctggactatggagcctgatgaaaaaaggctgtgggggcctgggctctggattggttggtctgctttgatataaagcctgcttgctatctccaggaattagcttaccctggtccttccctgggtctgcaaggccccagatgtcaaagcatcataaaatacacaacattttaaagacacaattaatacgggggccagttcagggtgcttccagcccttggtatcgtgtgtgaattagagaccagaacccctgttggtagacacagcagggcaagggctgttgggtaagggatcatgggctggatttcagccctccctggcccctgagccaggcaccttggagatggtggagcctaaacggcttcacctggcagccctggaaagtggccagatttagcaaataaaatacaggatactcagttaaatgtgaatttcagatatataatgactgtcttctttagtataagtatggcttgtgagtatgtccaatgcagtatttggaagatacttacattaaaaagttattatttttctgaaactcaaatttaactgggcatctgtcttagcccagctgggctgctataacaagatatataaactgggcggcttataaaccacagacatttatttctcactgttctggaggccgggaagtccaagatcaacgcagatttgttgtctgttgagggacagacacctggttcatagatgccctcttctcactgtgtcctcacaatgtggaagggacaaggggtctccctcaggcctcttttttgtaagggcactgatcccatttatgaagctccacccccatgacctgatcatctcctaaaggccccacctcctcatacttgggggttaggatcttgacatagaaatgttgggagccacaaacattcagaccgtgattgcatcctgcattttatctgcacccctagaacctggccactactgtccctgagtctcctcgtctgaccatggcctattgttagggtcttccccagcagttaccctaggacatagaggagagagagagagagagagagagagagagcacaagtcagataaaaggatggacacacatacaaatgagtaggagaaccacagcatgaatgagaaaaagtgacacagagtgagagagcaaaaaaagatacaaggagacaaagagtgagagaaaccaaaaggggcaggagagagggacagctgcagagagacagggcagctggttccctccccatccagcccccattatcccccctctacctaagcccagcccctccccagcagccccccaccatcctcctctctacctaacccccagcccctgccaaccagccccccactatcctcccctctacctaacccccccagcccctctccccagcccccaccatcctcttctctacctaaccccccagcccctctcctcttaggcccccatctagccccccgcctaaccccctctctacttaacctccacccctcctagtcccctcctaatccagcccccgctcctttagccccctccttacctagcctcctccccatcaactccctgtccacctagccccctccccacccactccccttgaagcccgtccacacccaccccctcccctccaggcctcaccttggagtaggtggccccattgatgacctctccctttcgcaaccagatgatggaggctgcaggcttggcattgtctgcgtggcaggtgaggttgagagggtcccccgcacgcaggctgatcacagggccccccaggatgacggggtcatcaggcggcactgcggggagagaagcagtgaggtcaggccgaggctcccacctcgggcaggayggcaggcaggctgggaggattttgtggagatggcracraacaataattatcacacattaataaaacgcatcgtccgcttgtatcgtaatgatgagagcagcacccacagtgatccctgacatgtgcactgcgtgcttacagtggaggatattcctgccagtcatcgcatccctgctcaggacctgccaggaggggacagggccagcagcctcagcctgcactcccagacccagaagcagrgctctgtggcccaggcgatgtctgtggctgctttttaacttcttttttcttttttcgagatgaagtctctgtcacccaggctggagtgcagtagcatgatctcggctcactgcaacctctgcctcccaggttcaagtgattctcctgccttagcctcccaagtagctgggactacaagcacgtggtaccatgcccggctaattttttttttttttgtattttaagtagagttggggtttcaacatgttggccaggctggtcttgaactcctgacctcaggtgatctgcttgccttgcctcccaaagtgctaggattacaggcctgagccaccatgcccggccaacacctggttaatttttgtatttttagtagagatggggtttcaccatgttggccaggctggtctcgaactcctgacctcaggtaatccacccgcctcaggctcccaaagtgctgggattacaggcgtgagccatggcacctggcttttcttttttctttaaatgaagcactgtcacacctgctgtctgagttagtcctcacaacagtctggtgaggtcaacattaccaccccaatgacacagatccggaagccgagttccagcaagattagtgactggctcaaggtcacatggtggcagagccagggctggaggccaggcccagggaacctgggagcaccaggccggccccttccctggcagggagcagggtacagggcagcccttcacagtggagccagcgcttcggagggctgtgtaagcgctggcatctcctgagctcctcactcctccagagcggctccagccccttcatccccagaggcagcctgattctctcctgtcccagccttccactgcattttgtagtagggtcagagacgggtggctcccatcaagggwtcctgagtgccaggaagagggccatccgcgtcggagcacggtctccgcagtgcccagcacagagccctgtgctggggaaactccactgacatttgctggccccactggggtcaccctttgattccgatgaggaccatgggctgaaggatggtggatgatcatggtttggaggagaggcccagaaatctgaagtaccttgcctaggacacagggcctttcccatgcttgtgcttggggacacgttgagagtctcaggcctctgctgctccctggacaagccacagaagggacaggaggtgaggcgactgtcctctgaggaatccctgtttcccttaccccaggaggagctgggcccaccagctctggaggctgagagaggcccagggcctctggacacatcaagacgtgagctgtctgtgtacacagcaaacacagaaggggtagttggataacgggggcgtgggaacctagcacaaagggtcctctctgcctggtggccagagaagcccgcccttctatgcaggctctgtgctcggggctctgggctggagaagttcagagctgaacagtcacagctccgggcccgtcctgactccactggctcagccttccagcctcagcctgcatgggaacttccctccccttctcaggggatcgccccgtcagcccttctcctagtccactccggcttctgtgaaagctccaggagggacaggaagccccagtgggggccggtaagaagccaagaagcaaaccttcagaacagctgccttgccctccctgcccggccttggaggcctgctcccacactaacagcacagcagtgccatttcctgaggaacaagcaacctcccagggcttccgagaagccatcactgaccccaggggcagcgagccccggactccaccgagatcctggctcaggaacagagtctgcctcaggcaaccctgcctggccctgggctcttgagccgggaggaagcaggcatgaatgggatggatggagaagacgaccccccagccgcccaccccacaccctttcattagtgcccatgggcctccttggggtgggcctggccacagggcaaaacggaggcggctcagggctttccacyragtgggggtgggtgcaaccacttgtggaggaggggaattgcatctccacgcggtgagtgggggacttgcagcaggaagagcagggctcagaggtggccagccttcacccttctttcttcaaggcagcctccccgaccaggatggaggagctcgggctccatgagctagctgagggcctggaaaaagagccacgtggagccctggggacagcctggatacctggggcctcagccttcccagtgactgtggaaagtgcctgagagcagagggtggagcaggaagccccttctctcagggtggcttcgggtgcaaacgtgagagctcggaggatctgggaactgaccgctctccagcacggacatttactgggccttggacaggggtttgaagccttgactgcatgctcctctgcagaggttttaaaacctcactgcgggccacaccctgagcagccaagtcccagtctctggaggggaccccaggcatcaggactttggggagctccccagggggtcccatggcaggaccagctttctgggctctggactctgggctgaggggcaggagcctctgcttgctctgagcacagtgcagccaccaaggccttcccgagaatccaagacccagaggacgggcccttcctccttgtggctggagtgttgtgttactgkaatatcggattagaggcagcgaggacgagggaggagggagtggggcgtgttgtgggagtgctcaggcacacgcacagccaygcacatacatccaccctcagaatggggcctgattacatcttcccaaataagtggttatcatgctgggtattcatgtagccaggcattattgattggtcttcgcttcactgcacaccagatgggggtgggggctggggggggtgggggttggtgaggatggaggatgtttgggggccagcaggctgaagagaaatcagcagtcgctcttggcagctgtgtctggcgtggaagggggctcctcattacctccccattcagactcggccaggctgggccaggcagtggygaggggaggaagtttcagagtggtccccgcttggagatgtattattcatcaccccctcgcaggattggttattatcctcaaccactatagagtttgggcttctaatttttaatcacaaggaaggtggargcgttagccttttcgtgattaatccrgagataaaaatagttgactgttttggtgttgtgcttgttgtcagtcaggaaaaaaatggcattaactgttggggcactgaagcctggggaggactgagcggatcccaggcagagtgggtccccagagctggaagccagcctaagaggccacagcgcggccttagccgggggtggctgagcgacactcctgcacccagctggctcctggggcattgattatgaaagaaacacatcatcgcgggatgctgagctctttacagtttactctcccattggccaggactggagcaggcagcttcagtctccctccctgctctgcccctacctgcccagctctgcagactttgccttgtttgggtgggcggtgggggtacccgtccctttccctgtgtgtgggagggagcccccaaaagctttccccaagttctgctgccaaagacaatggggtctcgggtggacaggtggcatggggagagggaaattgaggccagagagcacaagaggctgacccaaagttaccagtgacgagagcaaagaagggtgagggtgggcttgggacgcacatcctggctgtaactggagaggtaaagctttcatctatttcacgcactaaggttctctctaacctctatactcccctttttttagagacagtttgccaggttggccagcctcgtctgagcaggctggaaaaactctcttggtgccaggacaaggacagcactgagggaatttcctccagtgtccacttggtcacccaactgagacctggctgggcttccaggaattcctcgatgctccatcagcctgggatggttggtctctgagcatggctgatcggtggcagctggaggggtgggggaccagcagcaccaccctcctgcccccatactgcatggtggagaacctcatagacacccagccctttggagagcaagactggttctcatttgactcaatgagcagcgagttccccacaatgctggcagagtgggtctatcaccaacaccaaaccctccaggggcttcccgctgaaggagagtaggtgttgcctgcaagcaccagcacttacggccctcgctgcccctggggcctcggtctgttccaaccactccttacacagcagaccctggccccactgcgtctctgctgctcagcaaacccagctccttccggggccgggcttgccctgctcctctctgtctgtaacgctctttcctgttcctcactctgctggctcttcccgtcaatgaaggtgcagcttcaagagcccttcagtgactctccactacccacccctgcactttctggatcactgggttcatttattatctgtcaccgttctagaaaggacaacaaagaccttatctatcttggtcattgtgatattgctgtatcacacagtaggcgctaaagaaatatttgttgaatatattatttgttaaataaaagaatctcagaaggggagtggggatggggccggggggacggttatcatgggctttggcttctgaggtcagcgttttaaatcttgtgtgtgtgtatgtgtgtgtgtatatatgtgtgtacatgtgtgtatatgtgtgtatgtgtatatatgtgtgtacacgtgtgtatgtgtatatgtatatgcatgtatatgtgtgtatgygtgtatgcgtgtgtatgtgtgtatgtatgtgtatatgtatatatgtatgtgtatgtatgtgcatgtagatgtacatgtgtgtatacatgtgtatrggtgtgtgtatacatgtgtatgtaagtgtgtgtgtgtatatgtgtgtgtatatgtgtgtttgtgtgtgtgcatgcatgtgtgtgtgcattgggtacagttgggaacgggytgcgtgagtagtgggagggaggagggcaaagcaggagcccttctgaggccagctgggacagcgctgtaggaactctgcgctgctgtggcatcagggttggtgctccctgtctctcctcgagagagggaagcctggctgaggggggcttggtgctgggagctgattctcagcctgtttctccgtggctgctgtcctctgatttgtctggaacataggatgggagagggcggcaggccgagcatggtgacagatcagagacacttggctgagtggggagaaggacgtttgtgggttctttgattttgttctgccgcagacccaggggctctgggagagtcagtgctaggagttgcagcactgactacagtggagggaggatgccgaagcctyggggtgcatctcccacaccttcagcatcttctccatccccaggttccccgctgcagccctgcagtcagcctgccatgtgtcctgccctcctgcctccctccctcccaacctttctctcaccagcctcctccatgtcacaagctgaggctatgatagctgagtgaagccatacacggcctgccatcttagagctgatggggaggcccttgccactccaggccagtgcccaagacggacatgtgtgcagccttggcacctcctgggagcttgttagaaaagcagactcttgtgctccacctcagacctcctaagtcaaaatctgcctttgaaaagaccccagacaattcacatacattttcaagctggaggagcgctgctctaagggttccgaggtagaaatcatgacaaactgacaagtgctatgaagggaaggctcactggacaaagagcacgtgtggggacccttgatcccttcacaggctgcctgctcccttcgctccyccggggccggccagagaaaggggcagactgctccctgcttactagctttggagttacacgatcttgtttcagaacagcttcctttgtgtatgccgtttctttagcttggaatgctggcgttctcctggaccactggtcttctcctgggtcactcttacacaccctttgagacttagttcagagggcaccctctctgagcggcctttctagaatctgccagttgggccaagtgtatagggcttctgtctatgatcccacagcatcctgggcatcccctgactcactagctaccacatcctatggaaatctctctgtgtgtgtctcttccctgaaccatgatctccatccggatycccatctcccagcagagtgcctgcctgctgcacagggcacagggtggcatatgcatttgctgagctgaacttgacttgagtcgatcactttatgagccatatgattgtagacaagttatataatccgacaaccttaatcctcttatctgggaagtgagataataaaaataccyatcttgcagggttatcatgaggattaccttacaatatgaaagatacacagagaacattgtaaaaggctatacaaatgtaggttattatgtctaatttttaggaataatatttaggtttgtggctgtgtgaaaagtgctgagccaaggtcctctcattttattctcaatatcttttgaggcagggactattagggtcttcattttataggttaakaagctgagactcagagagggcaaattacttggcaaagaccacacagccataagtggtgaagttggaatttagactcgagattttgaccctacaacatgttctgttggagttagagcagctcccagactatccctgcagctgcagcagcccttccactaacccctgcctttgtcctggccctagagctctgcgaagcrggctctctgcctgtcccagggggcattcagacctggcaggtactctcctcccttccctccccgcagtctgaatttcagagggccccaggaagcatgagcctggctcgcagttggtgctttggcgatgtctgctaagggaacggacgaatgttgtttgtagtccgcccagctctttgctgccttttgtggttttgcccggttctctggttctgggccgcgtgtaatcccagcttccggtttcctcacgtatacagatgcgccacctaatggccacaatggagaactgcaggatgtagagacaagagggagctgacctggttttaagagtcagcttcccagtggtagccgaacaatgtttggagaaattcgtattgagcacctactatacgccaggccctttctaaacactagggacaagaagcttctgccctagtggagtttaccttctagtgggagagacagacaataaatgaatacacaaatacatacataatacaaggttaggtgttgataagtactagaaggaaagtaacactgggcagggaatagatacatcctaaattggcctccgggattccctcctggcttttctccttcctctctggttgttactttttgttttcttcccaccccttaaatgctggtcttccctagttagctcttgctggccatatctcatttgacacactatctaatggaaaaccttcacttttctgtgaactcaactcacatctttaagctgacgaattccaaagaagcatctcaggccagacctctctcttgagctccagagtcatgacccaactgtccacgggccttcgaagctcagcaggtgtgacaccacacccaccgcctctcccagacacccatccatccccatattctgtattttggagaatggccccactgtttggggaccaagtcagaaatctgggggtctttctggattccactctcagtcaccctgtcttgccaactagcctggttaaccctctgaagtatcgctcagatttgtctctttccattcccacaggcttcctggctcagccatcatccttttgtgcttggattacaatagtgcttctcccctccatctcctagtcctctgtgcttttccagagtgactgttacagaagtctgaatattcacctatccagtcaaccagtaattcacccaccatgtgctgaatgtctagcattcctctgtttcaaatcctctgaaagtccctcattgccatctaaatagtctgaacttcttggccactgctgactcttcggccttgcttttcatcacttcttacctcaattcctccttgtggataagagccacctgcatttgttggagtaaatcgcttttccccaattgcccctttccattttttatttatttatcttttttgagacagagtttcactcttgttgcccaggctggagtgcaatggcatgatctcggctcactgcaacctctgcctcctgggttcaagygattctcctgcctcagcctcctgagtagctgggattacaagtgcccaccatcatgccyggctaatttttgtatttttagtagagatggagtttcaccatgttggctaggctggtctcgaactcctgacctcaggtgatccacctgccttggtctcccaaaatgctgggattacaggcatgaaccaccgtgccgggcctgcccctttccttttgctttgctaacttgaaggtcgggcagcttgggtttgaatcctgggtgctatgtttactggcttgtggccatgggaaaactgcttagcttctctgtgcctcagtgtccttatttgtaaaatatgaawtaaaataacaaaaccagattcactgtatagttgccagggtcaaggaagatgtaacatgagaaaatgctttgtaaagggtctgatggatgatgtggcatgttattggttctctaagcagactgggctcattcctttgaaaggcgatagacgggcaggggagctgggacttagaagtcccagattgcccccttggtaaagcagaggtctatgtccttttccctgctttgccctgctgggagctgggtgaagaccctgctgctcccatgggtgattccacgctgccctgcctggcttggcatcccctccctctgggcccccccacattctgtgccaactgaggcacacactgcttatgggctgcaaaggcacatgtgagccccatgtggagcagagagatgagccatctcagctgagctcagcccagattgctgactcacagttttggagtggtttattatgcagtatctgcgttcagaacacaatactccaagatatcgcatcttagaagttgagaaaacagcagaagcaaaaagtttactctccaatcccctgccttcctgggcgagagctagctgtaaaaaattctttgacccatctcccctgaaactaggtcatgagatcctcattccagagggatcctgccctatactcagaggaaagaaacggtgtacaggaactcaaagaggaatgcaggcaaggccttgctaagttcttctggtttgttaccatgaggtcatacccccttttttgtccaatcacatttctgcacaactgcccattctttgttgaacataagcctacaaatacacaattttcccatggcatttgggccttcatttctgaaagctcacataaaactttggttaaatacatctgttgcacttttctcttcttaatctatcgtttgttacacgggtgtcagctgcaaaccttgtaatggatgaggaaaatatattactttttctcccctgcagcagcaaaagctaactgatgtaacccagtagtcccctgctrtttgattcagaactgggcccacggcatcaactgtctctccacttccctccgatccattctccctccactatggccaggtgactgttctggaagctyggtctgctgctcacaatgttcaatggttcccactgctccagcacaaaaatcaattcctcatcatgggggccttcccyggttctctccagtgaggtctcatctctgcagctttctcctgtgtgaccattaactcttctgtgaggatagcctgcccttttacaaatacacgctttggcttgtgaagttccctttgctgggaatctccttgcctgagtcttaactggctggaatcccagcctcttttcaatcagctcaaaggcctatcatgccttgttaactcttggttattctttaagactcaggctattgtcrcctcctccacaaagtcttctctcaatctcaacccctgactctcccacctgcagcctctgcactgccataagaccatgtgcccgcctcagcaggtacatgtggtgcctggcgccattaccacctgttgttcccctgaggctgtgagctccttgagggctggtccttgccaaattctctctctartacttagtacagtgcctggcatagtgagcacttaataaatacttgttgcctggtgccttgcctgatcccactgaattagaagccccctccccacctgagcacctcttacactggtcctcaccacatctctattgcattgacttgtggacctgtttcaggttccctacagttgcagggtaggagtcctggcgcctctttgcctrtctcccattgcctagtatgttaccttggatgcagtcataaaaaaacagcaccaataatatgaataatagctaacattgatatagggcttaccacacagcaagaactcttctgtgtactttacaaatatcctttaatcctcacagctctatataaggtagatacaatgacgatgcatattttggaggtgaggaaacagccacaaagtagtcaagttacttgcccaacatcacatagctagtaagcagcagagctgggatatgggtagggtttccagacttaacaaatcaaagaacagtaggccctgttaaatgtaaatttcagataaattaaaaaatggtagtgtaagtatgtttatctgaaattcacatttaacagggaatcctgtattttatctggcaatcctgtagatgtgttaattacatatatgtgatttaattaatgtaggtgtgctttccccctcttcagaccctccccgcctccacttaggtctatattaagaagatgtggggcaagatgcaaatgggatttttttttttttttttctgagacggagtctcgctcttgtcacccaggctggagtgcaatggcacaatgtaggctcactgcagcctccgcctcccaggttcaagcgattctcctgcctcagccttttaaatagctgggattacaggcacctgccaccacgcctggctgatattttttggtacttttggtggagacggggtttcgtcatgttggccaggctggtctcaaacgcctgacctcaggtgatccgcccaccttagcctccaaagtgctgggattacagctgtgagccactgcgcccggccacaagtgggattgttaaaggatgtggcatccgatatatttggcagcacaatcgcacagacgtgtctccaaggaggttggggacagagagaaaagaggaacaaggagcaagacgcaggtttaggatgatggcatgtagctcagaggaaggtgtgctggaggctgtttcagttctgctcctaacctgggggtggggggaaccctgaactagctgacttcagaggtcccctgcaaaggtttgggacactgggaagcccacttctcagctggagctcatattgtttaggggataagaagggaggccctgaagtcagagtgcctggctgggcttctggctccgtcattcactggccacgtgaccatgtgcaaattctctgtgctggatgatgttaatgtcatagatattatagtagctrttgtacagggctggtgtgctgtttaaatgagttcatgtaagagttatgcagtgtcttgtcccagagcttggcactgtagtaagaacccactaaattttagctcttagtattattgttgtttatttaataagtaactccacatgggggcagagtagcatattgcatgtgaaatgggcttgtttccacctcttgttctgctattaccttgttccatgcccagccctggactcctgagatggaatggtcagtaccttgcctcaaagcacctttaaaccactagagcgatgacaaggaggtcacagacccaaagatcccacagctgtacaggtytgatgggcagccctgctgcctttaggcaggagaccccaagggagggagggctagtccagtgggccagggaaagggagccaggtgctgtcagggtcaaagtcagcagtggcttggttcgctccttaaattaggaagggtgaatgtcctgtttatatttggttaaaccctgaaagagggtctgagcatctcagggcagagctacttgtgaggagacagacgtttcattaataatgagtagggatgtaagtctcaggctgtatgcagagtggaggaagggaggtgggtagagaagggagctgcagtgatttgcacgcaagcagaccagtgtgcctgtgccggctccagatgacagagggtgctacgtggccgccgtctgcacagcaagggtgagagggcttgggagaggccagcagagaagggacagtggggtgggggagtgcatcaaactggagagaggaaggggtgagtagggctggggcaggaaggccagtgtgtggtgctgggtggcttacactcaccctcccagtcctgcggagcgagagactttctcctttctccagcccagctcctatgctgatggctgcaggatgggtgagagcgcttcttargtgtgtttgcaggaataaccggcacatgcccccttgcagccgctcacaaagctctccagctggtttcgaccttaacctgatttggggtctcttttgctcaacacagctgggttggtgggaaaagcccatcatggtggctgccgtggacttgtataatccatgcttcatggtatggtgggcccttgcagtagccttatttcataggtgggtaaactgaggcataggctggccaaaacatttggggcaagtcacgcaactggcaaggactctggctcagatcctgctgccccaaccactcagtcctaactgcggtaccataggctgtgctagcaggaggatctgcattggttcacttcggtagctttaatagcatcaaggcagccatcctgacccagcaaagggccaggcagggacttggagtgtccccgctggtcccataaatagaagcagaactgatatagttggttttgctatgggctccccatccggtaaatccacctcctcaacgagcctcatggtttcagtaaggacgaaaatgaggccaggtagaaatcctgcctaccgataccctggagcctcagaagtcttagcagaaatggaggggcgcaggaagatggtcattacattaaggggtttaaaaaataagcacaagacattccagtagctttcttttgagatgacagattaggaatactgtgttttgcaggataaaagcatgcatttgttccatatcttggttggttacaggccagcagggcaggcaggaggagggaatagagaggtgaccatgagacagaagggcaaaaattaaaaagacaggcaaagaggcaaagacacagggcggggcgtggggtgcaagtcacctgctcaggaagaagatggatgtggggagacacacacagtcctttgggatggagcaccataaaaccaaatggcagtgttccaaggaaggaaacaagcaaaacactttctctaggcctcttgctacaaacactcatttcagggaatcccagaaaatcactaaaatatacctttcaactttatgcaaatttaccagatccactgtttgccagaatcctaagaggaaaaagtcaaaatccttttccgacctgagccttcttctttttttgttttttctcaaaaagtacaagcttctacatttgaaaaagggcaatatttttagaactcattagatgaaagtgttttaattctcatctacagtctggccttatagttattttttgaaatctcctctgttcctcatttttcacatttgccccattctggggagggaggcctggcctttttaccctgtggggacagtcactggaagtgagcttcctgtctttagccacagacaactccagagtggaactcagcagggagttggccgccccgcactccagcatgagtccttctgtcctgtccygaaaggggtaaagagaaacttggtagcaccgcagcttccactacggggtgccgctcacagaaggcggaggtggagggagggaatggcctcttcccccagggtgtcttctttcgctccatcactgttgaggtgggatggggctggttttggcactagagtgcttacgatcagaataagccccttattcagaataagaagagcttggttactgggtaaggaggggactgtgggcctcctatgttcatctgagacctattcaccggggcagggagggactcctcatctggctctgattatccctacaattaagtttgctggtgttggtggggatggctttggggccacccaggcccctgcatctccagcccttggtgggtgatgtcaggcaggtgaagaaagggcacagcctttgctctcagacagagctgggaatgatcccacagggtgaccctgaacaagtttatcaaccttcctgagcctcagtttcctcacctgtaaagtggagctaatatgtgcctcgagtaatgcaggattaaaggagaagatgtagtaggtccgcagtcgtggaggcagcctgctggtcagcatgaagacaaaggctgctgctgaagacccactgccttctcttgtgtgaagatgagctgctcccctggttaaggcagagtggcaaggaagctcagaccaaatgcatttgtgcagtggaagagaagcaacatggaaggagccgcggcttccagtgacctggcctgtggcccagggagctgcagatggaggctccgtgagctggagcccacaccctcccaccacccatgagccacacagggaaagcctgctaggtgactgctctcctctggcctctccctgctcctacctgttccccacaggggatccccccaaaatgacgatctaatcaagttgtccctctgcttatggtgtccaaagccccacagcacccaggcctggccacctttgcagccttaccccgtgcccgtctccagccaggaagacgggatccttgccgcaggccacagccacatagccacgggcctcggaccctggatctgtggctctctcctccgagactgcgcttcctttcctttcctgacttgtggacacctacacgatgttcagtctttgctcaaatgtgccctctgacctccactagactgcgcttaggcatctggagcgcagcagtcagtctcatcctggggtgcatcccagggctcagcctgggacctcagcatggggctgagcaggacggaagctgtagatggatgcgctgcgtttgcggtggagagccggctgcatgggaatcactgctggctggacccgggtgcctggctcgatgggagcttcctaagggaagcagccctgtcatgttcctctttgtctctctctcctgccccagctcagcctgcacggagcaggtgctcaacagatgagcaccccatcaatgatggaagggtaagaagagacgcctgcatcaggtgggagttaggtggggaaaacaaagcttccagaggggatactttgggaggcgcagatctaggacacattgataagcatggagtgtcaactatgttccaaaagcttcctgatggccctattgttactccatcttggattcctgggtcaattttgggagatgctgagatctgtagtccataagggcattgctggatgcagatgtgtgaatcaccataagtttggacccaggacagctggtgtcccctggctttcctgagaccttggacgtgccccttcccctctgcattccccactctccaccttccaccacccctttctcaggggcccatcagctaggcctagcagcccttggatccttaatcacctctgttcttttgctggctctctctgaggcttccctttcagctttgatgagcaactcacttgccatggaaagtgtgttgttcatggcggatcctctatcaaaaaacaggatggtgtcgagttgcagtgggtgcgctgggatcagtccgggttaaaataygtgggtctcagctcagatctccatccctggcactgtgcaggaatctgggcgtgttagtgctgcatacgttggggaaaatgagacgtgttgcttggaagcagcccatgagctgcttcgaggagtgaacggggtgaggtgtccagtgttgctttgaagtgaaatgttttggatgtgccttaaagtcacagttagctcccatgatgggcattcgtgtttgtggccagaggcatacataatccaaatctggtgtataattgagaatattatttgcatttggctttggaatgcattgtgtgtgtgtgtgtggcgggggcgggggaggcaaggcagctttactttctgtgtatgtttattttagactcccattagcattaatttgcattcactggacacagccgctagggagaggtgagcagagctttctccccatgaagtattcttcagcctggccctgtccgtgagccaggttattggaaatagaccatgtaggcctgtgttccacgggtgctcagaaaagaccatgtaggcctgtgttccacgggtgctcagaaatcctgggggctgagatacaacctcagtgaacragccactgggccagggatgcagagctgtgtttgtggtgagacctgggagcgactcctggactcccggttccaggctgcatggccttggatacgttaattagttatttgagcctgtgtcttcrtcataarataagagggataataattctgtgaaggttaggagaagttccatgggatggcatttgtgaygtccccagaacagggctcagtgaatgctcattccttttcttgtctctcctccctcctcgtctcccaaagaatgggtctgccttcttcatctcttgcgagtctgggactccaagggccgagcagagccggcagtagcatttggagtcaaataggaagacgccactgcttccttctggagtgcaaggtcaggcagggatgctcatttgctcttaagggtgcagggggtccacaaatgcctgaggatccacagcccacctgcacgaggagggggcgtttggagggtggaggagagcctgttgtctctttggagaatggggcagggctctgtctggattttgggtccatcccgtagtggaaaggggtcctatgtgaacagaagggagggcttcagataatcctgaaaccggaatcccaaagacaagccctgagtctccaggccaccactttctacctgcgtggactctggcgagttgcacctccccgggcgtcagcgtctgcatctgaaagtgggcatggcggtgaaaccacctgagggtcaggaaggctgagtgaaggccagaagcctgtgagcctgaaactctgctcaggtgtccgaatgtaatgtgagcccaaggagggcgggcgcgtgctggctctgagcgggtgctttattgtgtgatgggtggggacacttgctctcagggggaaagaaagcgccctctcttcctgcagggctggctgagaactaattcaaggccaygtgactctggctaaagcctgcatcctggttctctgctcccatctgggccagactgttggactccagtgttgtctgtcccccgagtcgaggtctggggcaggtaaggaggccatatcaggaacacctgcccatgtctgtccccagagagaagacccaggagttcaagcatggtgcagagaagttgagcaacatgcccaaagcagccaagattaccgtttctttgtgctccccacacacagatttggatgtttttctttttttcttttttctttttttttatatttatacggagtcttgctctgtcacccaagctggagttcagtggcatgatctcggctcactgcaacctccacctcccaggttcaagcgattctcctgcctcagctgcctgagtagctgggactacaggcgcgcaccaccatgcctggctaatttttgtatttttagtagagatggggtttcaccatgttggccaggctggtctcgaactccagacctcaagtgatcctcccgcatcagcttcccaaagtgctaggattacaggtgtgagccaccacgcctgggagatttggagtattgatagagggatttcagaatctggacttttattgtctcacttcccttcagtgagccaaagggccccatccttgcttacctcagtttcctccgggcttataaaatggacaaaaggataagttgcagagggccactgaggaactgggaggatgatctatagacagtctcctcttcactgaaaggggaagatgggctcaggctgcagcgtgagggagtgaggttagacatctggaagaactgttgttggagacacagctggggaagggaggtcaggcctctttttcccaagcctgttcccctacccccgatgagggatgaggtggatgtgacaaggtgacatgaccctaaggcagggggatggacctggtggctctgcaaagcccctctcagcccctgtccactcaagtacttcctcattagttttgctgaagttacttccctgctcccagttagcccctgtccgtccagttctgagaggtgtttctatctgtaggggccgaggggctaggggagcatggggctggagtgggaaggaggaggaggagggatgaggctgccaattgccaccgccacacagcaagcgtcacctcagctgttggaggggaacagccaccaggccatttttatgacttcctatcaaactttgataaattgactctgaaagggccttttcttccaagcagttcatgcctcagtgactgttaatggtgaaatatcaagatgctgagggggctctgagctggaccgtgcagggaggactggcttcttacctgccccgagacccagctctttcctcctcttggatgctctggagagggagggggcaggactagatagagacctccaggcagatggcaaggttggtctccagaaaagacagaccaggggatgagggtggaggaattaagttagacatgccgcagaacttcctggccgtgggctgagtgacccaaaaggccgtagaacagcctcggtgctgcggctaactgacagggggcaggaattggcactgcttgytgcacagcaatttccctgcagggattgacgtggagcgtsacaaagacagtgaggtaggcagtgaggtaggcagagtagcaacctgcctctatctcatggcctctcagggcaggcagcagccctcctggactcaggaggaaagggctcagtggggaccacaggcattgagcccaatgcctctcaggcatcatgcaatgagaattggagctgggctgggcgcggtggctcatgcctgtaatcctagcactttgggaggccgagacgggtggatcacgaggccaggagattgagaccatcctggctaacacggtgaaaccccatctctactaaagatacaaaaaattagccgggcacagtggctcacgcctgtaatcctagcactttgggaggctgaggcggatggatcacgaggtcaggagatcgagaccaccctggctaacacggtgaaaccccatctctactaaaaatacaaaaaactagccgggtgtggtggtgggtgcctgtagtcccagctacttgggaggctgaggcaggagaatggcgtgaacccaggaggcggagcttgcagtgagctgagatcgcgccaccgcactccagcctgggcgacagagcaagactctgtctcaaaaaaaaaaaaaaaaaaaaaagagagaattggagctgaacctgaacttcaagtccagagaggtttccctacagcccccctcacccacagcagcctgcatcttctactctgcccccagctggccccgcctgggcaaacacatggtgacagggcagtcgctggcccagagctgcttcattcctacttctcccttccttcaaggctggttctgggtcccggaaccatcctttcctggttcaggctgggtgcaggccgtccagcaccacctctctgactcaaggctggaattagtggggaggtgagtgaggctcttgtctcgggcacaaactttaagggtgtactcaaaaccccagtaatggaaataaataatatcttaatgcaaattaaacaaatcagaaygaatgtaaaaatatccacgatgaggaaaatatcacaattttaagtaaagacaggattagggagctgcagttaattaagaattgtttaagatggtcacttggtcaagagaaatggtcaaaatgccaattctctcagtcgaaaatgagataagcaaagaagtagatgattactattactggtgagttatyttccattacagccaggaaagtaaaatgaaatacattctgtttttgctgtaaataaaatatttaagtgtaacataatgttggggattttaatacacctgcttttaaatgtttcaatatttttccaactacttcaatgttctggaaaaaatttaccacttaaagaatactttaaaaatataaatgaggtgcacgttttccctcttgctgcagggtctattgtgacttggcttggtgctgttgctgatcctatctttgtctaatattttgatattttgcttatcatggattttttcacattcatttggatttttaaaaatattgctttaaaatrttatttgtctagattattgattctttgggtaccctttacattttgtgcctgagaatgatgcctcactctgaacttagttttattctgttcccagagagggaagctgcctctctatcctgtccttggtggggataaaatggaaaaggatccctcctcgggccctgggacccacctggggcatgttcaggcctgaaactgttttggggcggtgagcgctaggacaggcgcaggctgccaaggaaagatggatgggctcccgaggcccacagacagagacgggcagccactaccgagctcatccatcgggacccctgtgggatgacactcaccttaatcaggccacaagggccccgggcctgagggatgcgrgtggcgtgggacggggagaagcgggtgagcagacgctcctgtaggctctaagttggtgtctggagaggagtgagaggttcaaccagggtggctaggctgtgcactggccaattccagtgggcactgagcacttagctggcccctcttaggccctgacctccaggcaagtcccaaggtctgttgctcggaccctgggctgtgctgtgtgtggggaaggactagcaggaagggaggagacagatggaggaggacacttagggcagggcctgcaaactggctcttccttgcctttcaggaactcccagtggctttcccttgtttgcagagtgcagtgtgacccatcagcttgacttccgggccctctgtaccctggcccaagcctctcttgccctctgagccccagagatcctctacatgaacctccctctctgcgccctacctccagcaccctctgacctccctgcctgaccccaggtggttctgctttctccccaaagcctccctcgactgtctgtgttcctcgtctccgctcatccttgctggccgggtttctggttgtggctgttgtgtgtgtggacgtgttgctaggaatgagggcctgagttattgtttatacctggccttcctcctccgggtctagcgccaccccagcagcagatgcctcaggaaggaagcgaccctgttgtgtcctccctgctgtgacaccaggtataagcagaaacttatggtcacagtcaggaccatggaggaggaggggcactcagagattcacctgccctctctgagcccatgtgggcactccctgcccttctcaccgctctccttgtaaaaggcagtgctgtgcagcagcctgaggatcaggacactgggactctagtcctgacactcagcaaatggcaactgcatgctaccaggagctcaggccaaacaccttgggattgtccttgacttgccctttctctcgtatcctaattgctgtgggctccacctttgaaacatgcacagatcatcctttctcagtatctgcactgctactaccccagcgctccagcccctagctgtttgcatctgcatagcccaggcaacagacatgtgaccccagcccctcctatgtctgattgcagagatccagaaccattcagctaagccaggctcagtttcttgacctgcagaaactgtgagagctaagaaatgattcctgtaattttaagccactgagcttggaggtgatttgttatgcagaaattgacaaccagacagattttgcagaactagccagtcaactttcaaaggtactttgtgctcggaacattgagaggcactgtgctgtttgcaaaatgctttctatacacgttcatctttctctttaccagaaccctgaacactggtaaggcaggcattcttagtcctcactttatagatgaagaaactgagggtcagagaggctaagtgatttggacaagggtacacagctgaaaaatgaaagggccagtcttagggcctaggaattcccatgataagttcagtgccttccctgccaccccatggctgccatttcttctcactcccttcacaaatgagaacccaaggtgttggccaagtttggagggaggggtgggtgtgatggaggcaaagggaaggaagaccacatccacagggtcttgggaggtggggtggagggacattcctggagaaggaggctaagtctggggtaggtgtcaagagactgagggctactcttggcttcttgtatctgccaaaacccaaacagaagcgctcagaaatgttggagggcctgcgtgcgaactcaaggcctgagkctgtaggcagggagtcagggctggggaagctgggctcagccaggggactgagacataggtcacaaatctaggagacttctctctggggcctctggaagctggggccagttctccagtgcctcaatgtcccggaattgcttcttggaggccaatgagagtgggcggaactgagcaatggaggaggaggcccacccttgctgtagggaaatggccaaggaaatgcaccccagcctgggaatcctgtcagggagtggggtccagtgcttagccagagcagctgcatacaggaccacacgtgacacagaggcatgtgaggctctgcatgtgcctgggcttaaagcctgcttggctgtgtgtgtgtgtgtgtgtgtgtgacagagagagagcgagagagtgtgagagtgtgcatgtgtaagagagtgtgtgagagtgtgagtgtgtgtgagtgtgagtgtgtgtgagacagtgtgagtgtgtgtgtgacagtgtgagtgtctgtgtgacagggtgtgtgtgtgagagagagagagagcgagaaagagtaagacagagagagagagactcccttttccccaaaatgtcaccaaggggggtcattttctgtgtgcctgccatctctgttcccagtcaccagcatattgcaagtcaaagggaggcctttccggtaatttgagcatttccaacaaataactctggtctcccagtgcaccagcctacagtggccgcagggccacaacgcactcttcccagagctgctagagctcacctctgctcttcagctcagattctagttggcatctgttatcacagggaactctctctggatggagatgctcaagctcagagaagtgagcaaactctcttctggttgcacagcgggctctcagccttcccacttctggtaagctgcttgaactgagaagtcactgatttttctcaccagatgaagaagccacgccagtgcacatggatgcatgcctactaatgttcagccccacctccaggtgctctcttggggagggaggggcccctataccggtcctgggtgggagtttagtgtagctcctccttcagtcaccaagcactttctctgtgccaagcctgggcctgagcctggagattccaagaggattaagccatggtctctgatccccagagagtttgtgggcccccgtggaatacacacagccccttcctaaccttcctagaggccctgcagataagtgagtcaggcatctggctcagtaaaaagtgtcttctccattttatggacaaggaagcagaggctcagagagggtaaatgacttgccccaaatcacacagccagtaagcctgcttagtagctctactgcatcacactggtctggaccaagctgattgagtgaaagggggcagagttggggtggccatcaaacccctaaaacccgaggaggggaagagaggggtagcacaaaagaggatttactttcttcccccaaaatgatgtcatcagctaagacaaaaagaaaaagaaaacgcccattttctcactccaagtttccccctcattaattttaatctaatttgctcataacattcctcagtaaacagcagcctctctttaataagccaggctcttccccccgaccctgcgattgtgttcctaatcagccagtgtatcaggaaagacctgctgctaattgtcgctaggcatcacactatcctgtctgtcaggtaaggggtggcakcgagagataattataatcagatctaattagtaattataamagatcccgactagaaattgttttcagttaaatattcccagagaggtgctaatggtctccggggcatgccaagtgtcacagccaggaggggaaggggcccgtgacctggcaccctgtgacgacaagcagaggagactcagtgatgagaggaatggtgtgtccatggggacagagctggcctggcgtcccagtatcctgcttcctgggaggagcaccttcccttctgcacctaaggttgagtccccctcccacaggagcamctgcgtgggccctcagtaaatgccagttcttcacaggctcaggacctcgacgcacggaaacttctggatcattaaagaagctgtgtgggccaggtgcagtgggtccgcctgtaatcccagcactttgggaggtggaggcgggtggatcacctgaggtcatgagtttgagaccagcttgggcaacatggccagcatttaatgcaaaaattagccaggtgtggtggcacatgcctgtaatcccagctactcggaggyagaggcatgagaatcacctgaacctgggagayggaagttgcagtgagccgagattgtgccactgcaccccagcctggacaacagagcaagactccgtttcaaaaaaaaaaaaaaaaaagctgtgcgttgctcaggcagcatgggatatttctgctggaatcgtcattgcattgaatgggattaaaggctttacctaggagtcccctggctaacraaaatccatcgggtgactctccgccccactttagtgcctcctgcctcgggacttcccctttctttttcatcgttagtaagcatctgcaaactcccggttgccctacttactttctgttaacaggacctaactacccaacacttccctgccttcagattcaygccccataccctgcatggttctgttcctgggaccctcggatcaggcgatgagctctcttaaacacctaggacggctccacactgcccacagccaaattcagatgctccagcgtggctcaaagccctttccactgagccccaacctgttgactgggctgacatccgactacacttgctcaagcattgcacgccaaacatcccaaacgctcacrttagggagtgggggcagggtgggcgtctatctttctgtgcctttgattttgttgctatgattacgttttcattttccagctgctaaaatcctacccattctaccaagggagagttcggtagttactgaagtcttgttactgaagtcttgtgaagtcatcccagattttctgagttgaaatgaacacttcctcagtattgtgcttatatattcgagggcttcttttatcctgcctgggatggtagtgagttgtttatgtcttctccctcctttggcagtaaactccttgagggcacagagggcattttgctatttctgcatcttcccattgggtctgatacaatgcttttgcacatcgtaagcatttaataaagatgtgaaggataaacgagtgaatgtattaatgggaagcttctacccactgactgcactatgatttcaatgtaaatgcttctgggaagccgacctctagttccccaggtccagatccttgaacctgtctttattattagatgctgttgggttgtcggagtaygattaggtggaatttggccagtagttgcaggaatctcagcctccccaaagccacctgatgtgaggctagcgtgactgactgaggagctgtatttttagtcttatttaacttgaattaatttaaatttaaatagccactgtggctagtggcttggtgcatctcagctgagagaccttggagccaccactatgtagggcagcctggagagtccagactcaaagcctgcttggtgtctggtgagcctggctacaagcgactcacattaatttagttgaaaaacaggatgtggctggacacagtggctcatgcctgtaatcccagcacttcgggaggccgaggcgagtggatcacttgagatcaggaattygagaccagcctgaccaacatggtgaaaccccgtctctacaaaaagtacaaaaattagctgggcgtggtggcgggcacctgtaatcccagctacttgggaggctgaggtaagataattgcttgaacccaggaggcagaggttgcagtgagctgagatcgcaccactgcactatagcctgggcaacagagtgagactytaactcaaaaaaaaaaaaaaagaaaaagaaaagaaaaacagtatatattttcactgcattcttatttttttcagtgctgataccagatcagcatactcataactctgttaaccagaatgggagactaagtggggaaatgccacgctctgaccatgtgaggagttcaagtataatttacttcattcacagcttcttgaatggctgctgctggtctrttgcatttgtccacctgtttgcatctgcatgcggatcccaaatgtcagcctttccccttctgacgccctccaccygctgccgagacatctccgtgtagctttcctggctctgcctctcccagcctcctcctctgggtttcatttccttgctgtgagccttgtgcgaggcaggatatctccagtgcaaggacactactggtggacwgctggtccgtcccacacttttctctgcacgtctgaggagtccaggaggactggctgaggctgcaggcaggaagctcagttgggtgaacccaggcaaacccaggagtcagcctggctctggccctagcttgaacgcctcggttgtagttctaaagcctattcatttcctccatgttcacatctttaagaggggaagacggggctgcagagggagaggagccagcttggggcctggggtgcagtcttagagactaaggaggctcctctggggagcgagggtgcccaggtggggaaggcagagcgcaggtcgagcagattctaccgcagcccgtcctgggtcctgttgatgtgctacacattgcagggagcattttcatcccaggcggtgcgtgacaaagctaggatttgaacccaggctgttcaactccaagttctgggctctttaaaatagggcagttattagcagggaaggaacacactgcccactcatctatgacaaatcaattaatttgtccaaattccactcatgctttcaaactcacttaaaccctccttaaagcctacacttgccaactcgcctggccctgggcactgcttgcctctgcctgcctttgcctccttttcccgcttctgttcctagttcaacccccacccacattgtgagctccctgaaggcaggtccatgtctggggtgggccaggtgaggggtggaaaacatcgataccagtgacttacatgcacccaggtgccaaggtaagcacggacgagtggggactggtgggccacatcccgcccaagggagcagccattacataattgtttgcaagcaggcaaacaggcataarctgaccaggtctttgtaagagaagccagaaatcagaatttttttttaatataaaacyccccagaatcttaaacatggataatgaatgtaaaaaactctacagatactccggaagctaaccggatccatccatgtgcctgccctggcctccccttaattgtcagctgctgcatatgaatccaggttcagccattcaaaagttctctgcccacttgaaaagggtctcaccttgggcagatctcatgctgcctagcacaggggatgcatccactcaccgcactggaccagcacaccagctagggaagcacagtttgagagctcctgggacctgtcctggctgtgctgcccacagcccctcctccactcctcctggcaagaggaaacaggacagctcctcctgcccaggcacagtcagaagaagctgtcccttctgggcaggcacayctcagagggaaagcaattcaattaagccctggttcacagcgagtgctaaaaacctccctctggagaaccattttctgctatagatttttaagaccagcagctggagaatcactcttcctttttctcttttggtgctgtgtctctctagtcaataaataagtgggaaataaagtatttgcaagaaaatagaatgcagtcgaaaggtaaattgtgggcttaaaagcccctaagagactggcgcagacttggaaatgtttcctagtttgacacctcttgcttctctaagcccagcttctggctctccgatttgcatctccaaaaggtgatctttaaaactgatttccttcagttgcatttcattggtgtagaaactaagcaggctgttgcattacagtaataacatcaacatttcacctgccttcgccttaattatttttctctcttgcgatggaatccatttaataagatttacaggtggcaaggaggtggggtgagctggtgtgcggctcagataatcggccaagctgatttctccctcaytgggtgtcaccagtataaaaacatgaactaaaagctttgcagcgcttaagtaataataatgtcagcatttcacctgcctccccttgattatttttcctccctcgttcttgccacctgaacctgtttagataagattgccacacagatagaaaccaagggctctcattctcttagataagctgctgtttttctatggtttggtgtgaaaagggagtgttgctggcagaaaggctctgtctcagatcttcctggtggggggcgtccgagcctgtggatcctgggtggaccaaaggcagcaatggagtagggggcaggtggctgttaaggtggatgtgggcactcgggtaggtaccctggcctgggagcagaggaggaaccatctctaaacatctgctctctcccctagatgcccctaggggatccaggcagggacgaatgggtttcatttgttgagggggaggggttctgattatgcagcactaggcaagtctccagtgtggtataaaaaacatttgggtagccctagctttacaactagttagctgggtggccatggggaaggaacccaacccttctgagccatagtttcctaaaaacaaagaggtggtttgctgtggactgaatgtttgtgatggcctccggctgcagttaatatattgcaactctaacctccattgtgatgatgtgggaggtaattagggttagatactgggaggtaattaagctcatcagggtggaaccctcctgatggaattagtgcccttgaaagaggaagagagagaatctccctctccctctttccctccctctccttctctctctgtctctctctctccttccttccttccctctctctctttctccctttatctccctcttcctctttctccctctccctctttctcccatgctggaacccttaactcaaacttccaggctccagacacagtctggagaaataaatgcttgttgtttaagccacccagtctatagtatttgttatagcagcctgagctaagacattggtctggattatcttaaattttaaactttaaacttttggggacttactgaatgactcctttgagaatgtgaaaccactccccagaaatgtgcacatatattctgaatattgcgtccaagctttgtagggataaaaggccccacaccaaaaaccttggcatcatctgtgacccctctctttctctcatagtaactgtccactatctctgctgctgctattccagcctgagtccctcatctcttctctgtattactgcaagagcctcttaacagaggctcttgtcttcccttgtcctcttatggtctcttctcaacctagcagccagggtgagtcttttaaaatatcactcagatcccatcgatcctctattgaraacccttccatgagtgattttctcttcaaatagaaatttggctctaagatccacagctgacttcgtcacttctatgagtctttgtttacacaaagtcagcttctagaggaaaaatatgaattgacctatatcaagtaaagagattggactaataaaaatcttcccataaagaaagccctagacccagatggcatcattggtgaattctatcaaataatatcaatcctttgtgaaatcttctagaaaatagaggaggaataaacacttccctactcatcctacaaaaccagtgttacctgatactaaagccagacagacataataagaaaagagaactatagactattgtccatcatgaatttagataaaaaccctttaagatattagcaaactgaatccagcaacatataaaaaaagattatatgccatgaccacatgggatttttatcccaggaattcaaggttggcttaacatctgaaaatcaattactgtaatacactatattaatagagtaataaataaaactatattatcatctcaatagatgcagaaaaaaacatttcacaaaacccaacacgatgtgtagtaaaaactctcaacaaagtaggaacagatgaaaacttcctcaacctgatataggtcaccagtgaaacattttctgctaacattatactttaaaatagtgaaagattggatgctttcccctaagattggaaacaaagccagaatgtctgctctcaccatttctattcagcattgtactgtaagttctagccagtgcaataagacaaaaatgcattaggttggaaaagacaaagtaaaactatctttcttcacagacaaaatgctcctgtatgcagaaaatcttaaatttacaaataactattaggtttaaaaaatgtgtttatcagccaggcacagtggctcacrcttgtaattccagcactctgggaggctgaggccggtggatcacttgaggccaggagttcgagaccagcctggccaacatggtgaaaccccatttctactaaaaatatgaaaaattagccaggcgtggtggtggatgcctgtaatcccagctactcaggaggctgaggcagaagaattgcttgaacccaggaggcagaagttgcagtgagctgagattgtgccattgcacttcagcctgggcaacaagagtgtaactccatctctttaaaaaaaaatgagtttagcaagatccaacagtcatacacaaaaattaattgtgtgtatatatagatacaccatctatatataatcttagcaatgaacaatccaaaaatgaaattaagaaaatttcattcacagtagcatcaaaaataataaaatgcttagggataaatttatcaaaggaagtacaagatgtacactgagaactagaaaacactgctgagaaaaattgaagacgtaaaaaaataaagaggcattccatgttcatggatgggaatactcaatattgttaaggtggcaattaattctaaattgatctatagctttcacrcaattcctatcaaaattccagcaaccatttttttgcagatgttgacagactagtcctaaaattcatatgaaaatgcaaaggacctaaaatagctggaaccattttgaaattcactgtgggaaaggatagtctttttaaacaaatgatgtcggaacaattggatatctgtatgcaaaaatgaatttagggccttcacaaatcactaaaacttaaaatgcaccaagattaaatataaaaactaaacttgtaaaacttatgggagaaaatacagtagtaaatctttgtgacctttgattaggcagagttcttagagacaatatcaaaaacacaatctataagaaaaaattatcaaactgaacttgattaaaattaaaagtttttgtgcttcataagacaccattaartaaasgaaaaggcaaactacaaactgagagaaaatatttgcaagtcgtatatctggtaaaggacttgtatccwggctataaagaactcctataacatagtaagacaaatgattctatttaaaaataggcaaaatatttgaatagacattttaccaaagaagatacacaaatggataattatcacatcaaaacatgctcaacatccttattcattaggggaatgcaaattaaaaccataatggataccacttgaaacctgtaacagtgttggcaaggatgtagagaaactggaatgctcatttattgctggtgggaatggatacagccactttggaaaacagcatggcagtttcttaacaagttgagcataaactttccatattatgtagccattccactactaggaatctactcatgaaaagtgaaaacatatagccacacacagacttgtttgtgaatgttcatagcaacaattttttttttttgtttttggtatttttagtagagattggattttgccatgttggccaaactggtcttgaactcctggcctcaagtgatccacgtgtctcagcctcccagagtgctgggattacaggtgtaaaccaccacacctggccagcagcattctttataatagccccaaactggaaacaatccgactgtctgccgactggcgaatggataaacagaatgtggtatatccatataatggaatactattcagcaataaaaagaagtgaactacagatacatgctacaatacagacaaatctcaaacacatttttccaagagaaaggggctagacacacaaggccacatatgatatgattctactcataccatatatccagaaaagccaaatccaagaagcactgcattggttgcctgagactgggtgggagtgaggattgacaagggatcgttttagggtgatgaaaatgttctaatactggattgtgggggtggttgcacaactctataaatttattaaaaataattgagttgtacacttaaaatggatgaatttaatgataatgtagagtttacccaaataaagctgttaaaaaataaggggaaagaaaaaggccacttccccatgaggtctattccaacctctcaacacctcctttccctaggaaacccaacccctcacactctgctctactttttttgaatagcattgatcaccttctaatacactataaagttttcttgttatgtttttcgtctaactccctccgctacaatatgkttcgcggaggtaggagtttcaagtctgttttcatcgctaatgtatattctcagggtctagaacagtacctggcatgtggaaggcacatatacagatgctgaaagatgaaatgaatgaagaattctggattaaagggctccttcatctctaaaattatctaatcaaaggtttttgagggtctttctggcatcttcttgtgtttcttagcagacctgttgcccaggccatgttggcattttgggctgaacctggacgtgagacggggaagtcccgggggaccctggctagggctcagcgttgtctggaagagtaagaggaccagctctcccttgcccatgcctcgtgctgcctctagctatttcctttgttgaccttagttgacgcatctttaaaatgagttctctccagcagcctagtgacttcgtttgtgtgcgacaaaggggaagggagcagtgggattgggggtagggcagagatagtccttcctggggggtggctgtgtggccatcagccttctcctccctttcttgcctgcaccactgaagctgctgggtgatctctcagctgctaacattgtttctgacatattttcacatgaaaacctcttcctttatataaacatttataaacacctggatcgacttgtgaaagtgtgacacattttttggaagccagttttttcgggttgtgggactcagctatttatttttgtgagatggaggcttctgggtgcctatgaacctcccccttggaaaaacctccttcacacggacagaacaatttagaggctcagagtgatggagaaagacgyggcaggtggccgcccagaggatgatactgaatgggatggcaaatgaatgctgcgggtctcggggctccccaggtccatctgaggaggaggggctgccaggaagggtttttggaagccttgggtttgctcttcgagccgactccccgattccatgagccctgggatggtggaagggttcaagcagggctcctggagttcccaggggctaggaagaaacctgtwtcatagtgatgattttagggggagtcaggcagcagagagagtggagtttggaaaagaggaggggcataattgagcataaagggccagggtttcagagccagaagcgactgcattcagattctcgttctttacctttcttgtgtgtgaccttgggcaaggtaatgagcctctatgtctcagcttcctcgtccgtaaaaggggacacgggacctgcctggcagagctggtcagagggcagatgaaggcatgcgagtgggttcctcagcacagtgcctgtcatagagtggcagctcaccagcgtcaccctygcccttctctcttctctccactcgagcaactcacaagctgccctttctgtgcatagaaggtgtggctgaacttagatctcctcatccctgcctagtggggcacatgcagggtgcagctcccggagtctgggaccatcaggacctctgaatgggggctttgaagctgygtccagtccctgtctttcctagtacctatcagaasttctcatgagtgaaagccagtctcctaggcatgakcatcttatctctgatgaaccccccagctttttgctctgacatcatgccaccgtttctcatcatttcatgggatataccttctgctcctgctggggaccctcactcacaagccctgttctgcctggactgattctcaccttgctctttcacccaggtgaactctcagtcttggaatgccctcacccctccttcatactcaatcacgtctctgccaccctccaagcttggcttcaggtggagttcctccaggaaggtagctgtgttgaacactcactgcctgaccttttcacgttctgtccaaactctgagacattattttagctggtatgtaggtcatgaggttgacattaggaagaacatatcaggttctccatcctcttttttcctttttttccccagccattctgtgtgtgttcataaatgtgacattcccatgatggacccagattttgccagcagtttgcagaatggtaaagttttgaattaaagtcaacagcttccaactatctgtcactttcctgccttgtggcatcctgccaccacagaggcaccaacatatctcagcactcaaattgggcccagcgtggtagctcacacttgtaatcccagcactttgggaggccaaggcgggggaatcacctgaggtcaggagttcaagaccagcctggccagcatggtgaaaccctgtctctactaaaaatacagaaaattagctgggcgtggtggtgcacatctgtaatcccaggagattcgcaggagaatcacttgaacctgggaggcagaggttgcagtgagccgagattgtgccactgcactccagcctggactggacaacagagcaagactccgtctcaaaaaaaaaaaaaaaaaaaaaaaaaaaggaaaaaagaaaaaaagaaaaaaaagaaaacacacactgctcaaattgagaactttggatctgggctaatatttcacctggggctgaaattgtctgggcagagcctgcaacaaactgctctggggacagctggataggaaaggaacatccttaaatggttctggctctcttctctctgaatcttcccctctcttgggccagcccatgacttcactcagctccagaactggcagatttgctgccatcatctcatctctggagatgaatctatttcctycctatagaaacagcatgcaagaaaactcagcttctgcttgaatactcccagagacaggaagcttactacttaactgaactctgttagttttaattgttgagataagaaatgtcctccctgacgttgtttccttccttccttccttccttccttccttccttccttccttttttttgagataggggtctcactgttgaccagacactgcaccctttgcctcttgggtttaggcaatccacctgcctcagcctctcaaagtgctgggattacaggtgtgagccactgtgcccagctaccctggctctgtttccatcctccggagctccagagtaaatctattgtgcttctttagatatttgggagggaccctattcccctacatcttctctctagtgagctgaacctcctcatttttaaaaattgtgtacacagtatctctcttatgtcttttacaggcactgcgtccctgttagacttcagggactttgcactggccatggtgctgaccaatcacaggctgcccaggccaaggattgggtctggtgctgctggagatactgactgctcaactctctctctgctgttgctcctcttcatctactcccatctcccatggcctgagttaaatcatgacagttgtcctggtgcctccagggctagtgcacatagggaagtaaatggctgaaattgggaggagaggaacacacaagggccagtggctgggctccctggagatctgcagtgctgtgtgtgtgtgtgtgtgtgtgtgtgtgtgtgtgtgtgttggagcagaacagagagttgttggttgtgcctccatctctagagtctgcagggatgtcaccaggtatgccatgatgaggagtggtttcaagagctacacaggccaggcgcagtggctcacgcctgtagtcccagctacttgggaggctgaggcaagataattgcttgaacctgggaggcagaggttgcagtgagctgagatcacgccactgcactccaggttgggcgacagagggagactscatctcaaagaaaaaaaaaaaagagctatacaaagagtggaccccccaggctgcctggagaggcagtcggtcatgggtccccaaacacctctctccactggacctacaacacaggtcccctcacagcagcaagataacaaagctgtggccattcccactccaaaggcagcaatgcatctttcctctgcaggacactgaccatagctgttagtcttggctcccggctcatgggcattgcgtcttctgcttctgtggtgtcctatcctgccccgaaacagtgggggctcccttaggctctggcccctgccaatcttccaggacctctctttctctccaggcttggcctccgcgagtctgccttgggttgtgtgactttgtccctaaactccctctgaggatgacacccctccgtcaccccactggctgccggggggaaggcttccatttagtggcattttcctttctcatttcatgctgtaatggagattcattgccagttttaaatccataatttsctgtgaaacccttgttttgggcctgggctgaggtcrgaacggagaagcggcgggttatttttagccctcagagggctccctgtgcagctgcagctcccctgggcttcccccagggcgggcctcagacagcgtcctgggtttgacacccaggatgcccaggaagctggagcygggacaggggtaaacacacacgtgggactggctggcctgcccctccctcagttggctctggctctgttcctcctccatttcatgagatgagggggaatcagtagagaaacagggcctcatgccgatgagtctgtgcttccattacccccctctttcctgggcctgacaaggagtgagggtcagtacttcaggcctccaagaatgtgtccatttcctaacagtgactgatcccctgaccggatgttcttgtgtctttctatcagggcgacactgatgatttggctctgaggtgtgtgtgttaagtacctgcgtgcaccagcgcatttgtccttgaggtgaagctgtccatgtgtgtatccttatgattggcacataaatggggaatcctgtcaatggccagtggccagcggggcttccagactgaggatcccagtagggcaccaggacagaggtgggctcttgctgtgcttttgcaggcttgtggggatgctgaaagagatacccaggcctgaggagcagccgtatgaggggtaagtgggtgaggggcctcctccaggcagctgccccccgcatgttataggaaggggcttagatttcacttgcagccctggagctgatgattccatgtcaaatggcagacacccgaggatcgaggtcctgacttttgcaaatctccacagtctgagctcactttttgctgagcagttgagcctgctcagcatctcccagggtcacgcttggttccagcagctgaagggtatattatccttgctctcaggaggaagggaagaggaactcagggaacaatgcctctcatgccccaaccccaaaccatgagcaaakgagagagaatcacagtcaacccgtgaagtgggtttaacacttcatctctcctgctactggctccaccatggagagggcgggccctgagagattaagcatcatcagcccctgtctcacagctggatggtggcaggactggggcaggagtgaatgcgtcccagctccccagtgagggccgtttgtcctgcttgggtctggagagtttccaatgccctggggatggtggtgacacactccagaacttcccagggctgccctgaagagcctgtctcttggtgatgggggtgcagscactggggccaggcaacagcaggaggctgaacccctaccataagcagtagaccatgagtgggctcctaagaacctccccagcttcccttgtcytggtgttgggagcaaaagatgctggggggtatgggggctggccctgggcatggtcatttgggawgctacccccagatttcagtggcgagtgggcacttggataggcagtgtygagcttctgggcccctccagaaatcgctcatggtggcactggctggggtagggtggggctgtgcrttccttgcatcaggtcttctccttcttggagaggctcctgcctgcccttctccacactcaggcagggaagggaaaagatgcgctgagtttgcctccatccctgagggatcctctcttcctccgggccttggaagtcgtttaatgcttgagtgtcctgcccccacctcatttcccaacatgagggacgaccccaggctgggggagagttttgacatccagccaggctgtgatgaggatgggagatggagtgggtaaagagacagaggccatgcctgcccatggtaacatgcagattatgggggcagggagattgtggggggcgaccttggagtgcagcaggagggcagggctggggcgacccgcacacctcaactcaatggctgcaagacctccagggagaccttctatctcatctggcccccaacagcaactactcagcgtggcattatggcattgaacccacagggtggacctcagggagctataatataacttagaggtgagagactatatgtcagcctcagatacccttcatggcccccagctctgctcactttatcacctgcccagcaggtgagctccgagttagatgggaggctaaggtggtgtcagtggccaaagggagaaagaggaggggaatctgcttctggcccaggggacatgggggtagtctgggctaccaggaagggagctgggagcgagctggtggcaggggtggggtgtgtgtagggggagcgagatgtacaatagctccgacacagctcccatgtggaacctcaggagataaggatgttttctgctcctgtcttccgtctctggctcgtttgctaccgctatttgggggtgattgcagggtaatgaatgttgcaggaaacagccacatagcacaaatgagatacggcactaagaccaggccagggcccaggcaaaacacgcttaataagcagataaggaaatcaattctgcctttcttcccaggtgtgcagcctgctgggaggggcctgcaggaatcatatcttcctgccttgcttgatacatgggaaagcttctctaggaagcaaagtctgatcccccgggatgcaggggttgcttgttggtgtctcataacattgtgcaataatagcaatgatgaaaacagttataatactagcagccaatgctgctatgccttgctgcataacaggcgctattctgagacrtgttttacatatattatttcattaaatcctctcttcaaccccatgaargcagttatgattatttccctcattttacacagaaagaaacaggcacagagtggttaaataacttgctcacggtcacaccagtggcaaaatgatacagctaggtttcaagtgcgggcaatctggcttccagaggccaggcgcttagccacattgcctctccaacacaacacaacacaacacaacacaacacaacacaacacaacacaacaaaacacaattgtcatccgtgtttggggcttactatctgccagactctgttctctgtcgtcagattcagtgtaaactccccctaaattttccctaagccttgttatttcaattgccatgaggaacatttactgaacacccagtatgtgattctaggctgtgctaggcatgaaggatgaaagatgctcccaggagacccggtgggggaaacagacatgaaaacagttactctcaacatagcgtgtcgagacctgtaatcaaggtgcataaggaggctgggcgcgatggctcacgcctgtaatctcagcattttaggaggctgagttgggtggatcccttgagcccagaagttcaagacaagcattagcaacatggcaaaacccggtctctacaaaaacaaaacagaacaaaacaaaaaaacaaacaaacaaaaattagctgggtgaggtggtgcatgcctgtggtctcagctactcgggaggckgaggtgggaggatcgcttgagccagggaggtcgaggctgcagtgagccataatagtgccactgcacttcagtctggatgacagagcaagaccctgactcaaaaaaaagatgcctaaggaagtgaaaaggaccacagggggacagtcaggccatgtgggctccagagaaggcttcctggaggaggagttgtctraggtgaatcttgacagctgaacacaagttagccaagggaagaaaggtaggaagggcactccaggaagaaacacagtgtgaatgagggcccagaggcttggtgagcggaaggagatgccagctgcttgttagtgcgggagcaggttggcggtgggtctgaggctggggacacagctgggggctggcctcggggggccttgtgtggcctggcagggagcttgggttttgttctgtggggacactttctcgcccctgaagaacccctcagactgtcacctactgatttgcctttttatgtcagggtgactatggatgggtttcttgcaaccagtttctggaagaatggtttagaagccagcaccctcgaggtctgttccagctctgccttcctttgctggcagactctgagttattcaccactgttctctggacccatctccccagaagattcatggatgggagattgggggaggctgccaacgcggtgggctgaggaggccctgcagctctgctggtagagctgtggcaaagggagcttgtggttttgaaaaacaaactagttaaggacacgtcacagattggaccttatctgttttcctctctcagtatttggggcttgacatcatttaaaaagatgccctctttatttgaattgacttagtctccctcttaaataattcatgttgatttaggaagctttatttctaacgggagccacaagacagcagagttaatattagaacgggccaggaagaagagggaaatgaggagggagactgggaaaaatgcccctcttaataattaatctgatgccaacatcccctcctcccacttctgatccccccatcctgctctactttttcctttccgtagcatttattaccacctcacatcctgtacagcaatgcaatttatggtttaatccgtgcatcacttatcgaccgccttctctctgccagaatgcaagctccaccagggcaaggatggttttctctttcgtttcctgatgaatcccacgtgtctagactagtgcttggcatataacaggtgctcagtaaacatttgttgatcaaatccttggtaccatttcctccctgccctggatgtcccaacaccttgcttcccaagtttccaggaagttgaagagatcaagtgtaatgccacccttacaactctgaccctgggacagtttcaatatttttcaaccctgggattcctgtaggtggaagaaggagcagtctgcatgtatatgtgtacacaactttaaaatacaggcggggtggctcacgcttgtaatcccagcactttgggaggccaagatgggtggatcacttgaggtcaagtgttcgagaccagcctgggcagcatggctaaaaatacaaaaattagccaggcgtggtggcacgtgcctgtaatcccagctactcaggaggctggagcaggaggacccagaaggcggaggttgcggtgagctgagatcgtgcctctgctctccagcctgggcgacagagccaggctccatctcaaaaaacaaaaaacaaaccaaaaaagtgtatgacacttcactgttagagattgagagagagagagagaaagagagagagagagagagagagagagagagagacagagtgtttaatgtttacaacaattctatgacattggtatttttaaccctctattttatagatgaagaaccagaaacgtcattcattcattcattcacgctggttatagaggcttgagccaaagaggcccagttccagccttaaggaccttgcccaaggtcacccagttagtgagcagcaagagcatattctacttcctggcccagggctcttcctaccccatgacagctctctctgcacatgtgcatgggggtcctctgaagcccaaccaaactgagtcttcggagagggctaggtctatgtggaagctggctacagaggggyggttgggggggatcctttgcagggaggaccagggtttgaggtccacagccaaggccaggaccccagggctgaacaggacttggagaggtcctatctcccagcctcaaagtgggatgctgtttaagccaccctaatcagttttcttctaagcctcggtcactgcgccaatcttggttccagggagggatggcccaatttcctaaaatagttggtacagcatgttggactccttacagtggaagtcatggccttttgggagcgagacarttctcagcgatcatcttatttatcaccacctctcattttacagatgaggaaactgagacccaggttgagaaacagggccactgtcacacagctggacactggtaaaaccaagaccactgcctctaagtctaatgctgtttccgtgacgctgtgattctccagatgttctgcaggtgaaaagacgcctgtcttgaccctgggctgagtcaagccatagtccttggcagctggctgggccacagagggcacgcagcctgaccactgattgacctgacctaaaatccccagtctttgcctctctcagctttgcaaactcaggccttcccccgtctttccctcctcatttcctggctccctccttctgcctcccgaggtacaaatgctcagctccgaagttgctccttgcctgattgcatctgagagctggaaacacaacgctaattaatgtgtctgtgactctaggcttggctgccaggccgagtccccatgccttccctagggcccagcggctctgcgagctggccctctggcttcatctgagcacgctgccggcagatgcatattttaacaatgcacatctgttggctatataatctctcgtatttgccctcctcacttggtacttcgatggaagacccccgggggcctccctctgttctagccaaagtgtttgctttgcaattttgccggaataccatctgattctgctttcgcgtcttccgcaggttctaatcaggctcttactttatttaattaaaaatctatctcaggcaaatacagactaaattaggaagctctctcattcctggaacacagggaaggcagccccccttggggaactggctgggacattttcccgggctgagatgtcacagcaaagcagatggggtcttggtagggaaggcggctgggccaaggagcagaaatacctctctcccatctgtgggaacagccactctctccattccccttccccagaccaggggtccccttccagctggctgggtcagctgctgcactgggggcctccttgcagagcagtaggtggggtgctataccccaggacactcagccaggcggagccctgcaagaccagctgggttggggacctgggagtgtcccagggagtcagcgaggactgcaggcagagtgctgggaagcactgtcttgcctggggttttagtttgctcaggatgaatggttttggtggagctgcctgaaaggctgatggacaagatgctggctgaggctccctttctggctctcaggaatttcacggaggggaccctgctggggatcatggaaacttcctctgccctccttccgctgatctccagacttgaataaaacatctcccccatacaaacccagctctgtgcccagagggcggtgtcaggccatgccaccggagaggaagggggagcgaatgccttttagacatgacctaagacaaaatcgggtctgttcaggttggatcctgaggccctgctctgagaagcctggcccctcaccagccagacagatgagatgctgctggcatctgggaacaggagactaggcaaagagcttggagctgaaaaatctggagttgattttgaakgttaattaagctgtgtcacctcctgtgagtgcctttgcctctytgagtttccattctctcatctgtaaaacattcgaaataatctggacttttaatacgttggacttttttacgtaacgtagagttgagaggaaaggaagtgtaatgatcatgtcaggactggggaagtcaatacagccttaaggatgagatgtggctccacctatttttggttcctgtgaagtcagaggagtggacaatgctcaggttcctgtggttccagcatcctctggcccctctagaaggtgtatgagtcggtagaggcagattcttctgaggatggaggggctgagccatctctgaagatgaggagcctacaacttagcaaatctgttctggcattttgcaatcctcaaaatcagaaacaatatgaggccctaattcctcctcctctcctcccacaacccccacaccacatggcagactcattctcattttagtcaccgtcttgggagaaatgagaacggcgctgctgcctttaataccccaattactcctcggaaggcccgcttcccggccatggaatcccaacttatttacccccgctggaacaggtttattttctcattcctttcatcgcaggcctggggagactcaaaggttgcagraggtttctgaggctggccccaagtccctcccccgcatctcaagaagtcaagctccgagcttggtaagtggtcctccggggcctgtctgctgcactgcttggaataatctgccctggtgtctttggccatgtagatctgaagataacctgacatgcttttaaatatttcatctctgagcagctgtgtgctttagctgccaggagaggaggcagcaccccagctgctgaccctgttgtcgaaccttcacaacagctgctaaggggtgggcctgggctttcccacttccctcctgcacgcgtgcctggcacagactcacrtgtaagggggcagcgaggtggggcaggkagccctggagccctggccaggagcccatgggccaagctctttgcatctgtgggccttagtatctcatctggggtaacagtccctgtcccaccgagcagcgtcaggaacagcggaggtcatgtgcctgaaagagcctagagagctacggtgaactgcttggcaaatgtgagctctcatgacttatgtgcaaggcctggttctcagcagccttgatcctcggtaacatttggccagaggagggagactcccgggactgaactctaaatcagaactaggcggtttaagaggtcaccgagcccattcccctgtcttcaggcaagatgatccaggaacgctgggctcctgggaacataagatgaagaaagaycaaggggaaaagtatgatttggaakaaggacctgaaatgaattttcctaggagggacctgtcagccaggattcccagggagcaatgaggggtggagaagtcacgggggtcactggtgtccacatggatactagaatcatggggagaatcgggctgattctacagagaaggtggaaagatagggctttgttagcaccggagtgggggtcagttcagaaagaagggacccacagcctgtgccacattcttcctggcacggagcctagcctagataacgtgtgcagagcatgctttctgatggaataaataagcatgtaggagccctcattagctgcctaaggcaccatcaaacacgccggggttggactgagtccgctggcattggctgtctggtttactagggaaagagccttcgcttgtcccgtttgggtgggaaggtgggcatggatattgtggaagcagcagtgtctggagccctgtgggatgatccccagagggragtctccccatgtctgaccaaaaaaataccctcttggagctgagcccttggtgcttcacgcagtgtcccagccccrtgtgcagatggttcttacccaggactgtgaggcgtgcggggcgggagcggatggcrgcctggatggcctggcactcgtacaccgcatcgtcttgcagctctgccckcaggatcttcaggtggtgctcccctgacaggtggttccctaccaccaggtactgtgggtaacctgtggagacaacaggcaggtcagggagctggggtggggtggaggggacrcccatgacaaagaggcacagaatggaggacccaagcaggggccattctacaaggctggcagagcgggtgattgctcagggctctgatctcagtgcaaggagcacaaatgcaagagctttcccaaggcattgaaggtgttggttctctctctctctctctgtvtgtrtgtgtgtgtgtgtgtgtgtgtgtgtgtgtgtgtgtataagggcatttggtctgtttgttagtttttgagacagggtcttgctctgtcactcagattggagtgtagtggcaggatcatagctcactgcaggctccacttcccagactcaaacgatcctcccacctcagcctcccaagtagctgggactacagacatgcaccaccacgtcggctaatttttttatcttttgtagagatgggatctcactatgtcaccctgactggtcttgaactcctggacttaggcggttctccctcctcaacctcccaaagttctgggattataggcatgagccaccatgcccggccatgtaagggtcttgttggtttcaagtttaggaaaatcggaggagccactgttagaaaggaaagagggagaagagatggaaatgctaagcgtggacagacaccgctggcttattattctggaaagyggtgtgctcagcactgtggtctaccaagcagacatgcattttgataagatagagaggagagagagagagacagacagacagagagacccaggctgagaattacagagagaagacagtcagagagagaaggaaggaaaaagagaaatgtttggaaaaggatcaagagtgactttgcaaaaattttgtttcaggatggacaggaagtagaaatctaggcccgcccttccagtgtctaggaaccttgggtcactttgagtcacagtggaccctgtctagtcattcctcctgtcccgccagaagccccaggtcctggtgacgcacttatgaagtgctcaggacgcttaagaattgggggccccttgtaccatgggcaatgaataatagataaataaaagtttgagaatataaatcattaatcagcgttcctgctgctgtgtagggttgaatataaatgccaactgaagttgtggctggccaccttaggcagatcctctctttcctgggtctcgggccctacacctccctatttctctttccatccatctcctcactgaggtctgccctcccccgagtccctcagtgtgtggatttacaactggactccaatccccgctgtctttcatctctgtcccggttcccttctctcctcagaggctgccctcggcttccactcccctctggcagccccaggctgctcctccttttgaaggaccctcaccacacagggagygttctcagaygggtgctgtaggaggatgagacgggacacattcagccttttaaagagaagatgagggcttaagcaagtgagagagacagaacaaagacaggcagggagacctgcaagagctcgcctcaagtatttcaaagaatctctcagtgtgggttgggcatgttcctgagctcccaagggcagcaccagcaccaacaggcagaattcacatggggaggttctttagaatattctcaactgtttgaggtatccaacaaggatctgggatgccagagagkgtagtgaggtccccatcactggctgtattcaagcagaggttggatgatcgcctctcagggatgttgcagaggtgatttctacaccgggtgaaagatcagactagaggagcttgaaggcccctctcaccaccataagtgaaggttcttctggaggtggggcaggcctccctgggggtgggctgtacaacgggccaccagcacttgttcctggtcaggcgaggtagctgtgatgatcctctgccagccttcctggcatgctctggagtgcttcctgtgcagctgggcccttcagactcatgtcttcatggctaccatcctcatcatgcaataaaatggccctgtcctccccagctgtgcaggcctggccagaaaagctcacaaggccatcagctgcacccctgagagcactgcctctcctcctgcccacacttcccgccttctgctgggctttgggaatgagcccaggtaagttaagctgtctccccccagggccaggagaggggctggaaatgggttctagcccaatcctctccctgctgccgctgccttccttgtagctggctggctacccccagcccctccagcccagcctctggatcccactatcctgtgattagtccctggtctcctgcaggcatcttggctggagcttctgtttctgttgtcttgcaagctatcagcagcaggattttgctctcacgagctgctgaaaacatcagtgatgggtttgtttgtatttgcctaattaggcagtgagctgtgatgctatcccaaggactggcagcatctttgaaaatcagactcagaagcatggattctgagaaagttctagctccttccacattatcattactctctcttgctactcccaaaggaggcaaaattacttagagtctgggttctatagtcgaattgcctgggttccaatgccagctggatcacttcctagctctgctgtcttgggtgagttactttaacttctttgtgcctcatagactacttactatgtgccagtccccattttatggggacaataccagtacctcataaggttatggtgaaggttaaataggataatctatgtaaagtgcctgkcacattgtaagtagtctataaatgccaatttaaatgaagagaaaggtawgtcataaggtcaggtggccaaagaggtctttatctttagaagggagagaagacagagtatctggaccctttggggttaacaggcaggtctcatgtgctgggattggttatatagttgagtcaatttctttctsagttgtgactttgtttacctgtcaaacaaaggggaaaatccttcttttctccctccggatcgctgtagatttatgagataatgtctgcgaagtacctgagcttcttagaagaaaaatgtgctatcaatatgaagaagtgcatttataaatcattttctttgactggttattccagctttggtgactagaaaaacatttaggtcttcaaggagcgtatcatttctgggagattcgggggggccacatgggtacagtaggagaggacagagatgtagcaggctgaaatcccacaaccctgggcctcagtttccctgtaggagagctttcgcggtgttaagggctctacaagtacttgctgaattgagttgagggctgtcctgcctgtttccacatcaggcaagcgagcagagttaattgagcatgtaagtatctatcatgattgccatgatgctatttttgggacaagtgacaaaatacagggcaagtattttatcaggagtttgaggtcattggctctgtatggagaggcaaaccgagtcaagctggagaggacacaggccccagtttgtcagaggccattgttctgcagccctaagcaggtaccagtcctggatcccagaaagccattcatggcactggatgctagagggtcagttatccatgctgagatgaccaccgtatgcactatccctgctgacctgagcctccttttggccactgacccagcaagaccccagtccctgacggaagttggaaacccactgaccgggaccccagacagcctccttaactagcggcagcgctcatcccagctcggagccattcagtgcatgaactattctagtttgggaaggttgtatcattcctggagtttctctagggtaaaggcgttcggagtctctgaaattggctggttcccataacagttaaactttatggcagcacagtatattttggagatgtttttgtgtattttttccatgctcagctgggctgcagcgttcaaacctcgtgcctgctattgaccattgctataatgtttcaatatacatttttggcaagacataactcacatttaaaaatattaatttcccaaccatcatgttcctgagtgcacttcgatttttattttcctgcagctgtacaccatgcgagaggcaaagttacttctcagctgaataatatttttctctcctcctccacccttagctattcccaaatcacaggggaatgacacccagaggtccctgcttgtgaattttactgtgtacgccaagcctagcaaacaaccactgcctacctgtaggacagaataatgatagctgaagggtgtgtgaccagggggatgagccattctttttttttctccagggaagaggatggattggaaaagcgtctgtatggtcttatgggatcactattcacaatagttaacaaatgatctgttgtcagcactggccagtgagttcacgtgtcagccatcaacaaccatgggaactctcactgcctgtcccagggtagctttgctgaataccagcctgcccaagccgaacatagttggaaatttatttttaatacttcctgtcttttcttcccatctcatgatggctyctaagatcaactaggtgtctttgtgagttttcagtttacttggttccctttaatgggtgagaagcctggaagaaccaggttgtgacttgtatttccttaataattgtgccttaataaatgggggatacatcttgggccaagacacaggaacacttgatttctggaaactggaatttacatgaatcatgtttgactttggagtaggtgcttgagggcaatgtcgagttaggttaggacccaccgctagaaggagggtttgcttatggttcattatgcacatcaggggccctcagagtctagggatgctgggtgcagtgcttgcctagcctgactctgcctgaggagttgcagtgaaagctagagattcgatactcagacacctgtgaagatgggtgctccctaggaaggtggatgggtgagtaaggaagtgatggccccaggcccaccccaggaggtctggaggtactcacttgagaggtccctgcccacacccagagccaagccgtccttgatccacagaacgaagccatcgtattcggggatggcgcaaagtagcgtcactggctgtcccgacaccaccacctggtcctggggctgctggctgaaggaatagacttggcctgggaaggagacaaacacaatggtcagttatctgccggctacaggggcgagaaggctcccctccagctatggaagcagagcagggctggcrcaggagactgagcctcctgaagcacctggctttcctgctgagggtctggtagagcttcctaactggtctcagccccagctctattccctcctatgggggcctggctcccagctccagcccctctgcccatcagtccctaacacatggactggtctagccacaccccagctccctatgggccatctccctccacctttgggacgtgccacttcccatgcattggtgagctcctacttaatgccatgtgctgggcatgcagtcccacaccagggcagaaacaggagagagagagagagacctctagctagaaacattctgtggtggctgtgtgttaagaagggggtcgatggagagtggtgcggctttggttaaacctgagaattcaggaaatcattttgttgtttcagtggctcctggggtgggctgagggccaagttcagaggggtgggtggtggtgcagtatggcaggaggtgtgctgaggaggcgtgccatcctaccgtgtcctccctgtccctttcttttctgcagcagaccttactccagcctcacaatcacttgggaaaaaatcattatggacaccatgcctcctcaaaacgagatggccagaatcatcgaagagagtcagttgacattattttattaaacaaacccatccacaatgcttacaagatgccatgctctgttttgaggctttaaaatattagttcattaatattttcatcgtcataacaacctaaaaatagtaggcactatttttatccccattttccagatgggaaaatgaggcacagggaggtgaaaaatagtaatgggagctgtgcttgtgaattgctcaccaagtacggcgcatgccctgactctagttatcaccgtggcaacactcgaatggggcattgtcaaccccatttgacaggactttgggaaacggaggctcagggttaactgaattgcccagggaactgtctagtgggagttggggtgggtggtgcggtgaatccaagtctttctggctcygaagaccatgctctcccctactgagctatgctgtgtgcagatccccaagcctggccttggagggagttgctgatgaagaggtgtgatgtgatctgtgtctcctgggagtccacagttgagtggacaatggracattgacattcgctgagcatctggcccacagtacaaccagtacttcatacaacccctcctgtaatccacttaattatacttcagggcagaaaaagccccactttacaacaaagaaaccaggatcagagaggcacagtaacctgcccaaggtcacgcagctaatgagtgttagagcaggggtttgagcaggggcccatctgcattccaagccctccctttttcctacctcctkctctacagacccagacctaaccgaggcaaaactggacctggcgctccagctgctgatgctgtggcctctcctccccaacccgggagagtcaggggcagccacagacgtcctggacactggctgctgcccatcttggggacaaaaagccccaggcttgggccacacctaggactgagctctcagcaacagatgaccccaagagggagacacttggtgtgtatcaacccaggggagcttggatggcagcagagcttggggtggaggctccccagaaggaggggtgcagattcacagtggagagctggggacaggcaggaaggtggccgagttcacaacctgacaagatcttggcagggtctccgaggagtctcattaaaaatcaaattggccttgaattgtgggagtaacactttttattctgatttgagctttacaaattagatttcataggacattttaatcagctatgtatggtaggttttttttttcctctctgtctcttcaagttctctgttgtaattagactgtttctggcaccaaaacagggtagaaaaggagggaagagatgagagaggagaaggggagaggagggagggactggagagagagcaaaggagtgaagtgaggacgtgggagagaagaggagagggagaggaagaggaggaagcaggggaggagggtgaggggcagcatggagagggagggggtgggtggaaaggactccttctctggctccttttactctaatgatgatttcacagctcatccttttatctcaaaatctttcttacaagaaggacagagtcaaggcagctgcagtaactgccaaagattgtgctatcagagagaattatcaggttgtcaggtggacgtggagggggttataatgagagccccttaaatgaagcagtgcccgagccctctgagatgtcyattattaggaakcacccacagtgggtaaccgtcccggtctctccccrtcctgtgtcctcttggaggaaggcgcgggaggtactgggtgagggccccyggggaagtggggtgcaagaagcatccgagggccaagggtaagttgtggaccggctggagcccccagggagaggagggggctatcaccatggaaaccaggctctggaggaaggcaacgctgggaagggggatcagttgaagcaggccatggaggtggactctgagtggccacagacccttttggtgggtgtctcagagccaggggtggcagcaggcacaagatgcctggaataagacctggggtctgtaggaaaggagcctgatgggatggggctgagcgggagagggccttttgagggggagcatctcccgatgccatctgagcaggcttggaggtgtaggatcccacaggttgcagtgagccaagatcgccccactgcactacagactaggtgacagagtgagactcggtctcaaaaaaaaaaaaaaaagaccttcctagagcctctcgcattctgtctgcttggatccacttggcttttctatggaaagactgtttctggggaagatgagtacacaggaaaaatccacccaaaggacatgatttacaaattattatttttggggatgggagacagtactctaattgacaatgtcccttttcagtccaattttaatttttgcacattacatttgagtcactataattacttttctcttttaaaccaatgagttttttttttttttttcaaatgaatcttaaactgttactgagtatctagagtggataaaagttgaggtgctttggatgaaggtggagatggagggatggaacccacttttttttttcatccatctgacagaccttagggcctctcctttgggctcaagagcccctcagagcacagcttttgagccatggatgtaagttattgccagaagaatgctcctcacccacccactctttcttttcttttgagactgagtctcactctgtcgcccaggctggagttcagtggggcaatcttggctcactgcaacctttgcctcccggttcaagtgattctcctgcctcagcctcctgagcagctgggattacaggtatgcaccagcatgtccggctgattttcatatttttaatagagacagggtttcaccatgttggccaggctggtcttgaactcttgacctcaagtgatcctcccacctcagcctcctgaagtgctgggattacaggcatgagccaccatgcctggcctctacttgctttattttccccattttcttttctactccaaagaagtgaaatgcaagtgagcccaaggtcattttctgcagcctcctggatagtgccttaagtagacagtgagctcctgagaacctgtttcttccacacacacactgaccggaccctgctgtgaggcaggcactgtgctgtctggtgaggagcaggggaacaggcctggccacccctccaggagctcgcagctgtgccccctccccatcacacctgggcgtctcagatggagcacagagtaggtgcctcacaggctcaggtcctgctctcagtggagatgtgacacacccagcaccttccaccggcccagggtttccatcttctccgcttcgcattttccctgatgatgttcccctggtgtgaagccttggcggccggtgcaatctccccttcccatactttatttttatttttmttttttttttgagacggagtctgactttgttgcccaggctggagtgcagtggtgcgatctccgctcaytgcaacctttgcctcccgggttcaagcgattcttctgcctcagcctcttgagtagctgggattacaggcactcaccaccatgtctggtaatttttgtatttttagtagagacagggtttcaccatattggccaggctggtctcgaactcctgacctcatgatccacctgcctcgacctcccaaagtgttgggattacgagcgtgagccaccatgcccggccccatgctttgttttgagtctgtcaccatcactgagcctagcccagcaggctgtacatctctcagacttcccctttcctctctattcccactgctascacccaagttcaagctctcgttgcctcaacctgggctcttgccacagactctgaatgttctctttgcctgatccattaatgtgctgaacctggattttccgtcttaattcaccacttgcttcagggttcccctcttttaaggggtgggacctctcatggctctccactctctgcgggacaacgcccaacttcccatgctggattctaatctccaaaatccagctccttttcttcctgggagctccacagcacccccgtgctggctagtcactaaggtcacctgcctcgagttctcctcgaygtttcattgtcctgggatgcactgcatccccccacccaaggctcccccacccaaggccccccctaagcaaccccacctatcattgaaggcccagttctctccccaggcagctcctgtgacccagatggaatcttcttttttctcgtcttctctctatattctcatcttgcctctttttcatcaatttctccaaacctttattgagcacctactatatgtcagatgctgatgaaacagaaataaggaagaaacagtgtacacttcttgagggcaggggccacagctatcttttctgtcttgtgttcccagctgtgggtgagcaccggttacacgyctgtcacatgtgcctttgtacttagagtttgcctgctctggttggtctgctgagatcggtggtcactacaggaaaattgcttttgcattatraactactaacccggcagatactgttcagagcacaccacacaggagaaaggtgagaaatcacagggtgggctggagtctctaggaatcaggcttgacaggagaaaaaaataactgctgttcatggaagatttacttgatgccacatctttggctgtatacgttgtttctggcatgcagattagctgtaattaaccacattttatagatgaaccaaggctcacagaaatgcagggacttgyacaagttcacttgattagctcaggtgtcactcaaaccccaatggtctgggtacagccctattttctcaccactatccgatgtaggttgttgaatcaagggtctcaagcccagattttgattcttaagcaagtactcactccaccaacaaggcagcctactcagattatttatctatttttatatttatttatttatttattttgagacggagtcttgcttttgtcgcccaggatggagtgcaatggtgtgttctcggctcactgcaacctccccctcctgggttcaagggattctcctgcctctgcctcctgagtagctgagattacaggcacctgccaccatgcctggctaatttttgtatttttagtagagacggggtttcaccatgttggccagactggtgtcgaactcctgacctcaagtgatctgcccacctcggcttcccaaagtgctaggattataagcgtaagccactacgcctggcccagatctaaagggaggtagaagatctttagaatgaaaagtgatttcttggtttttccctcagtttctgtgtgtaggctcctcttcacctattggtcagtaacactgaaacggttgagggtaaagtttagtactggccaccataggaagattaaaagaaaggaggtgtactagttaccattacttataattattacttaaaatggytatttaatataattatattataatatagcttataattatgtatcataaatatttttattgctataaaattagtaattgctaacttttctattttttaactttttgtagggacagggtcttgctatgttgcccaggctggtctcaaactcctggcctgaagcaatcctcgtgcctcagccttccaaagtgctgagattacaggtgtgagctaccatgcccagctagtaataggtaacttttacagaatgtcaagcatataataaaagctttacctggattattttattgactcactaaagagtcctatgagataggtaccgtatcacacctacgtgaagatgaggttgtctggggcccacagcactggcagtgagaagggatatgagcccagcagtctggttccagagcagcctctttgcgtccttatttggacttcgcccactgtgcctctagtcctcgcccccaggaactcatagaacccaccttagacctccctctcccactgcccttggccagtactgaaaagtctcaaggaaactcaggaagaataatgtacactagctcacttcatcagttctgtgtataatgtcctcatgaacacagttctctgggtggatcagagttgaccagctatccaagagtgactgaagcctatgttcaccttctttagctccctgagaaggtgagcgcagacctgcaggtcctccagtcacccttgaccctcacaaccacatcactcactccaaagaacccctctctcccttcaccatttggactggacaagccccttgggatgaaggcagatagtgcagtggtaatgaatggggctcaggaatcagactgacctgggtttgaatcctggcacttccatgaacttgctgagcctccattttcctmtctgtgaaatggggacaataataccaccaccttgtggagatagagaggatgcatctgggccacttgactccggggctggctcacaacaaatgctcaggggaaaccgaccttcttctctcaaagccaccctctgtcctgaacaccaggccrcaggctgagctccatagggctgggcgacgggaagcgtgacctggaatggcaggtggctstctattggtgtgaaagggggaggcaagggtggacttttawttactatccaatgacttattgaagagacagttttcactaaagacaaggatgtactctctttgcaggaggacctcagtgtagcatccatgggttctcaggtgggtctcaaggctggtgtttgtggtaggtgagctcaggtgttggaagccttggccagctgctgtgagccatgccctgtgggggagaagaggtgggagaatgttcccccagggctgcaagggggctactggggtggaaggggtagggggcgtctcccgggccaatgagggctggcttggctccgcatctgactggcgctgaactagcttccgttagtagaaaaaggctgcgtgtgcrtgaacctgcctgggcatggcagaggagcaggcctgggaaacacagcggtctctctcccacattcgcttggttaggtggctgcagaagcaccttcctgctcgccgcctggaaggtaggtcatgttcctgaaagsgggaggctctgcggsgcagggtcccagggttctgagacaaagccctttgtctctgagtgagagtccctgtctgggatgcttgcccccagcctgtgcgtctcccctgcacacccaggctgttgtgacctgcaggggccgagagagcactgcgccrtctgtcccgggggccctttagaccactgggtaaggcagctgcttttccctttgaggagagtggcagaatcagaggagagcctgggtctgccwccccctcgtgccaagttctctgccctacctgagaaggtagaagcttcaggagtgggagcaggaggtcgaggtgctgagcaggcagggccttttgcagccttgtctccaaattgcaggaagcagtggctgtttctggctgggaacaataaaggggaggggggcttggatgaaccctgtcctgatgggccacgtggcgtccctgagtcaggacagctggcactgttgccagtgctggtgagtggctggtgggaggaagtgtggaggtggcagcagcagtgacaggtgtggcctggcctagggaggtgggcaggaggtggagcatttggtggccttttgggggctctggttatggggcagagctgggagcaggcagatggcatcctcagatcagtggtggggctggatgtcttccccagttgtttccccaccctcctccatcgggactcctcctgactgctcttcccaaaagccccctctagatttccctcctgcgcttactcctgcctcctgtcagcccacccggcttccaacctggatgcagcgccctcatcttaatctcttttctgggactcgcagcacacattatcacggaatgaaccatcamcatctggctcccaaagtccccaccaacttccagtgaaacattgaaatgcagaagaccccatgtttctctatgacttgcacacctgtggccccattctgaggttgcccctcaatccctaattatttcctgagggggaagagtcattttgccatggaaggcgcagattacaagggccacgtcactcggtgtgatggtcttagggcagcactgcagggtgctgggtcgggtgtgtgtgtgtgtgtgtgtgtgcacgtgggtgtgtttgtcagattaactgaattggcctcaaccccaccttttctccagccagacatttgctgcttctattccttatcaagcacttaagattttggttgagggctgggcccggtggctcacgcctgtaatcccagcactttgggaagctgaggcgggtggatcacctgaggtcaggggttcgagaccagcctgaccaacatggtgaaaccccttctctactaaaaatacaaaaattagcgggacatggtggtgcgtgcctgtaatcccagctactcaggaggctgagccaggagaatccatagaacctgggaggcggaggttgcagtgagccaagatcgcaccattgcactccagcctaggggacagagtgagactccatcacacaaaaaaagattttggttgaatgaatttttctaggagaatccatagaacctgggaggcggaggttgcagtgagccgagatcgcaccattgcactccagcctaggggacagagtgagactccatctcaaaaaaaaagatcttggttgaatgaatttttcttagttttacagaatgttggaaagcataggccctggcagggccatcttggggaactttggaaggaacagtgatctggttcgtctttggrgtccaaaggccttggtactatggtgtgtgtgtctgtgtgtgtgtgtgtgtgtatcggataggaaggtggcccagtatcctggtgcccatagaggctgggatctgactcagaggagccgttgcttactcctccctgccacccacaastgccaaccctaaatcttctagggatgcattctggaactccactgtcccaagtctattgctaccccataggcacatgtctctgcactgtggttccacagtggtggtgagaggcacagatctacagggcagcatggactagtacaaagagtgtgggatttgggatggttgtgtaacaggggagataaagctttgatgcagactctgccctggagcctgatgtgggatcgggggtgctgagtatcccctcatggccctgggcaatgcttttttttttttttttttttgagtctcgttctgtcgcccaggctaaagtgcagtggtgcgatctcggcttcagcgcaacctccgcctcttggattcaagtgattttcctgctttagcctccaaagtagccgagactacaggcrtgtgccactatgcctggctaatttttgtatttttagtagagacagggtttcaccaagttgaccaggccagtctcgaactcctgacctcaagtgatcttcccactctcagcatcccaaaaggttgggattacaggcatgagccattgcacccaacccctgtgcagttctctttccatccatgcttggaggyggctcagaggcaggcaggaggtggctcaagggtgggctcaatccctgcctcccctttctccactggttatttggcctggcctttgttccagcagcagattgaggggacatgaccactccccttaggattaaacccagtcagacctggacaggaagtgagggtcactaatataaggatggaaatgcttgtccttgcttctaaggagcctggtgctgacacatgcacacacccgcctgcatgcctgtgagtgtgggcagcccagctgaaaccctgcctgcacccctcaactctcaggacattctgtgaaactcgctgagagtcttggatggtcacatttgaccacaggttactggattacaagggataaagtggtctcatagagaagtcatataaagcttttcaggggtttaagagaatcttgcttcaagcaagggagttgtggggaggaagcagagaaggcatcctggaggaggaatcataatatggggaaagtaatggaggagaaatgtcattctggggtaggaaaaaaaatataagcaaaaacatgagtgatgggtcaccctcygtcacctgcctggagtacctaaccgatgggtcacctgtcggagcctgggtcctggacagtaggaagaacacagggtcagtcagccctaggaaggaactctggccctgtacctagcagtgtgatctgaggccagtgactcaccctttctgagcttcagtttccctatctgaaaaatggggatgacacgcctccctggcaaagctgctgtgagcatgagaggttttatatgtaaatgatcttggtagacaggtgtttcacaaagggtcattcttactttcgtcactatccacaagtctttcctgagcttgggactgttaaaacaggagccagaggagcacctgtcttgcggagtcccagagctgagaacggaggctttgcaaatctgaagttgcacccattagaawgctgcatgggtggtgcaggagacagtgggtgagccctcccattggctctgcctctttcttgagcttgggactgttaaaacaggggccagagcagcacctgtcttgcagagtcccaaggctgagaatggaggctttgcaaatttgaagttgcacccattagaaacctgcatgggtggtgcgggagacagtgggtgagccctcccattggctttgcctcttctgctcatccgggttggcttcacagcctcctggagtgttgtgtcagccatgcaaaaagggctcaaatgtcaccatctgccttttattagtgaccaattggagaaggcttaagaatacttatactggggttatttattgccggctttctcccagcctggagcttgtaaattgcctcttatgagattaagggaagctgcccctccagagaagcaagcaaataggaagaagggaaggagagaagaagtcagctcagtggctcctggtgacatcagaacaatatcgggtagggtgggaaagacaagggcagcgtgactcagwtcatacctcgaaaccwaagtcttgaattctgctgtgttcctgctgctcagcacagggccagcatctaacacaggaggatcagctttgagaaatttccagaatgcccagttggtgacctgctcggggaacaggattgggggtgatagagtatgttctgacccactgactgackgataaaaatggatttttatggaggttctagggggtttcagtcactgtttcmgctctcaggatgccatggtgcctcaggcatgagcaggagccacctcagcaatctccaagtccccaggttgggtgtggggtgtgcaggaggggctgatatgtcttccgctgagtaggctctggagctgcggggaggcaaatatgtgcagaagaaactagaataaaaagctctacaccataagcgtcagagtgaggcacaaagtcccaaagaaggagtcacagaagggttggcttctgaaatggccaggatgaagacaaggtgggaatgttccctggaatggggaacagcttacgtcaagtgtggagaacagatgtgttcatggaataaaagcagcagtgccacatggtctaggcttgatctctgaccctgccattatggctgtgggtccctgggcaaattgcttagtccctctgagcctcagtttccccattggtttagcaatcaatacttgttgagttgtttgtgagaatgaaataggtcattctctgtgatgtgcacagagccctgcctgccttccataatggcagctggcagtatcattacaagcctagcaggctgggtgcacggagcatgtgtgtgcagactctcttagtacagcgcaaatctagaaagtcctggtgggtcagaccrtgtgggcccttgaacgtgtgccaagaagtttgtacttcatgagaagtcatcaaaggtttttgacccacatgctcagatctgagttttagaaakatcacggtgatgacagggaggaggatgaatgaaggaggataatctgaagacagggagactgatcagcaaggtkttgctgtcatgaggactcaggctaacgctgcatcaatggaaagaagaaatggatttaggagccatttgggggtagaactgatagtacttgaccagggatgaggaagatgaaagtgtgaatggatgatggaggagccatttgctgctcaggaggagaagcgsgcttgaggtgaggcagtgagttcagttttaaatgtgttgatggasaggggtccagaatcccccaggtgatgctgtcccagatgtagttgggtcaatggttctggagctgggaaggaggtgtgaagaactcacactgactgagcactmcctatgggtcaggcagtaggagaagtattttcaggtgtcctctcacttggtgttgacctgataattcaactccaaatatggaaagttatagatgttgttgtgactatctaagagggacaaggttactccagtctgggagtgttgggagtagctgccttgggtgaaacatctaamtcttgttgaggtttgcacaggttttgaaccmtatcgggatggcaagagatcatctaacctaatcttctccctttagactgggattggaaatataaacagagaagccagaagaaccaggcaggggtagaagacagggccttttctctattgtctgtttctccttgatttctactgggagagagacaaagaaacactttccatcccagcatcgccacctgcagccattggtagcttgattctgatacacacgtaaggagaagcttgccagtctcatgaacattacagaaattgcactagaattttacttggacttacaaaaaagaggctgactgctcttcccagggctggatgagggggtggaaagtctgagggcacattcccctatgcttgttcctcacccgggctgagccagtgtgggcagcctgtgattctcccagcctcgcacttctctcccaggacacaaaatccaccaaggttgtcctggacagtgtggrtctttaacgaagagcaatcgggctggccgaggcagggtgagtccaaagtcactataaatcctttgcctactgatgatcaggmtcgcggcccctgccaaagcctgcactgtactcattagtggcagggagagggattcttccatcgatccagccaaggcctggatgccacgaagacactgataagtgctgctggaaatatgggctcttcagtgcccatggcagagcccatccatccctgcccgaggtcacctggaggtctaaatgagacaggacgggcatagcagagtgggtttatggtgggggagtggagatgggagatgctcgacagcgcatgaagcagagaccctggctgtggtctcaggcctgttgctggccagccatgggaccctggctaagccccctttcttctctgagtctcaggctcttgtgtcttctgactggaatgtgccctcactgagccggcaccttgggatgtgttggagcagcatggaaggaagagagtggcactaaggggcagggatggaactatgccattagctcaagagggagctgcaggctcggctatgggcaggctcggctacagcagacagagwgcccatcaacccctctcagagggcgtcagcgtgggcaccaccaggagaggctggaggctaggtcatggattggctgactccaagatgcccagcacctcttgctcccatgtctaaggggtactgtatggacacatgaagctttgtccttgtcctgggcccagaaggtaccagttgatgctgcctctgccacctcttagctgtgtgcccttgggcctgactctttaactaagactcagatgccttatctgtaaaatgcaaggtttaagcgccttcctcccaaccctaatgcttgatgttctaacttatccaaaatcctatttcgggggtggggggtggtcctaaggttgaaaataataaaatcaaggtgcaaagaagtgaaagcaagtctctcaagsacacttggccttttgggggctcagatctatatcctaaacattaaaaaaagtaaacaaaataatcatttatgctgctatagccttgtcagtcagasacggttctaaaacttccatgtgcatgaggatcacctgggggactggctaaaaataacagtttcctgggctccaactcagagattctgggatagtggctctgagctgggtcaaggaatctgcattttaatagcttctgggtcatccttctgcaggcggtttctgggccacatcctaagggcactgttgtgtgcccacagcacgggcttgtgggcctgggttatttctagttcaggctctgtcactgggtggccttgattaagtggctgtctctctctcggggtgcgcattgatgttcccactgcacagtgaaggcattttcacaccttttgaaagttcatgcaaccctttttgtcagtgaagtctcacagggaatcccagtgtataaaacggtggaggcagagctgaggcagcgcgggaaggaccgagtcctgccctcggcagccctgcagcgggccctcaggaccctctgtgcaatgctcaaggattccaaaggccctgtgcagttttgatgctcttcaggtgtcctgtgaaggrccacgtggctayatcccactgacggtgtgaaagcaggcccaccyggcgtgcacygagtgactcaggcaggctggtctgaagcacgaggtgccttggtcttgctctctgagcctgcatggagaatcacagctcagacctggtgcttatagaggagtcttctcatggttcctggagttgttcccaactggacacagaccatcttggggcaacgtcctgggtttctcccctcttggagaccaaatacratcaactcttaattatctttgttagtggagaagagcagggtgtgtataatctagaatgatggacaatccaaaacagtgaataatcctaagtaacattcattttygactttggaatgcattttgatattcacatttgaatatggatatgtttgatgttctaggaatttttcatacttaaaaaaaacactcaacccaagggtggggctccctctctgcctcctactcagctgaggggagaacatcacctctgggactggcccaaagctacagtcaggtgcaccccaccttccccatctcctgtctttatggctcacaccttatctaggaagggagggggatattaacagattttgcctttaaaggacttttattccctttggaccttatgcaaataagagtaaaataagaagctgtgaaatgttaacagaggacttcattaagcaaacttggtgatagcatttgccaggaatggggacaatttgccaacagatacttgagtgctgactatatatgtgtcctaattaaaaaagtgatacttctcactgccctgggattgtgggccgtcttctggtgggtttgggatattaaccacaactaactccgatacaaagcacttcacatacattatcttacctaatccaccttcatagcaccccgtggagcaggtcccatcatcagcccccrtgtagagacttgaatatcacagctccaagccagatgtcccccgtgaatataccctcccaattctgccctattctactccactctgcctctcctgtcaccccccaaacagaggccctgcaaagcctcagctggtctgcatcaatcaaagagaacgaagcaaaactaacttgccattactgccctagtctctctgattgttggaagtagagatgtttcaaggagaggttttgtgctggaagccccttgaaaggatggagagggagtgtgaggactgccggagacgcccagcctaggaggggaagctttctgcttttccagcaggacagaactccttagaagcaggtgtagccctggctcatatccaccatcctgagaaatagaaaatctttcccattttacggacaaggaaactcagagaggttaactaacacatccagggtcacagggtgtggtagaggtagggtttgagccatttgactccaggcctggctttttttcccccaacagtagccggtcagcagagggtgtttgatctgtgtggtttcctcttcagaaagcagagactcactactgtgccccctacctgcccccagctgagctccaaaaacagctataaagctgatgggaagccgataggacagcccctgcccttcctgaagaccacggaaacctctcccayggtgcccttggggctgagatcagctctgtcaccaatacttcagggcaaaagtcgttggcaccacttttaatcctaatcctgtgtggccttattcagaagccctttgcaaaggccgatccctrgccatagctctctctgctcggccttgggctgggtgaataatgacttccatttcctgccctgctggagccttgggtctttgccactgccaccgtggtgctgagccacttatttgttgtgagatgacccaaggaggaccagccggtacctgctaggcccttctgctggggcacggggtcagggggcagcacatgggcatgtggccccactcctgtctgctccccaggacaactctattttccagcatggagtgcccctggaggtggcgacagctcctctaataagagagttactcatggcttcactggagagaagagagcagctttcaacccccctctcctaaacgcaacgatatttggtaacatgcggcatcttggggagagcattcatgtctgtaattagttactgtatatcacggttagtactctgctcagaatttacggggcaaataccatttaactgcacaataactgcaggtccttgctgcttattgggtaatttactaaggctggaagaacggggcaggagggattctgaatgggaggtattgtaaccccttgaatcaaactttatgagtttgggtttggcagggaggcagctgcttgcagccagttctcttctctttgttttgcagagttggctggcagactgcttccttcccttgatttattgcaggatgataggtctgggactgggggtgggactgcccggggctacctggggctatggaagggactttccatagagggtctttggctgagagtctgcagcaggaacccagagtcggtgtcctgggggctccatgcaggacagcaaatgggccctgtcatttatttactccctccacggggctgctttttgtatctgggccagtgggtggrgagtgcagggagctgtccttggttggcagcatcaagataatcgcctaagccctttcttctcttgcaagtccgttgctgcctgggaagcagccattcctggacacttggccgacattcctggccttaatctgcttgagcaaagtctgtctttgtttggccatgcactgtctaaactcctctaacctatttaggccacagagaggggagaagacacaataatgaaaaactcaacgtgcaacattgccttacgcaatctaataaattacttggtacccggctgccagctcagactaagcccaatattgcctgcagtaattatttggatcaaatgcagtttatctgcttcatatttgtgcttctgtgctcagtgataacttataaatgtcattgtggtgtttatttgttataatgaaacttaatggcattggaagccaagagcagaactggtggggcggcaggtttaaaacaatctcttcatctcgggagaaggaatgagccaagataacatgaaactgccctatagggaagagatttgcagagatagtggtgtcctcgtgctgtgtggtggacgggagtgagccaggagctttgagctggcaccaaggggagccgtctttgcctccagagatatctatctggatcggggagacatggctgagcttcaccctgcactgccccatctgtccttgctgctttcaggggtgggaggtgttcagtctttataccacctgatgcctgcctgggataagagatgaatagggatggaaattagagtccctgggccaggcacggtggcccacgcctgtaatcccagcactttgggaggccattgagggaggattgcttgagcccaggagttcgagaccagcctgacaacatgtgagaccctgtctcaatttttaaaaataaaataaaataaaataaaataaaataaataaaataaagaactcctggatgactgcattatggagaacaggccttcagggagaaggaagggagcagggttggagaataaaggaggatatcatgagggcccagacagaaggtggcaaggctttctcttctggttctggagggcattggtggtaggaagcacagagcatgagcagaacagggaagagctttcaagggttgcagggcagggcccccactggcgctgcagaagtacctgaggcaagggccatttaatgtagaactcagggttttggcttcatacagtcctgggctctgctatttcctagctgtgtggctttgggcaagttatttgtctttcctaagtttcattttctttatgtggaaaatgkgagtgataatagatacctctcaagattctggtgatgattaaatgaagtgatgtgtgtaaagtaatgactgtggtgtttggcacacaggatatatgataaataaggggctgtggcagtgattggcacatagtagatgttcaataaatgttgartgtatccatgaataataacacttcccacttgtgtgcattacaaaaccctcctccaaacagctgagcttggatttagacctcacaattgttcagggttgatcttctcattttacagtgggaaatggaggcccagtgaggttatggtaacttgcccaaggcttcccagctggtagatggaatggggtcttagttctcctacctcccagggcaaggttgctgccaccagtccaccctggacagctcccaatctgtgctgggagactgacctcatccttcctgatgagctgcccctgctccttggagaccaggcacagagcctgtgctgacctccccagcacaacctgggggcagaagcaagcgggccgctttctgtccatttcatcttaatacaacattcagcattcactcataaaatattcattttctctcctcggtgacatgctcatgcaagtctcctaacatcataaatatggatgaagactattagtcatttttatttatctcactagccccttccctccccagcacaccttttgtcttgatctcagcacaaatgggactgaattggggctattaacccggatctctgataataaagccttgcatcctgtggtgctttatactttttttcaaagcatcacgcaatcgtgatgcatattttctccttacaacaaatgcgtggaggaaagagggctagcatcatgagtatacccatttcgcagatgagaacatagaggtcaagagagatcaaggtcaaagtcatatactgagacaggaacagaactaatttttaaaaaacattattattgttatttgtttgtttgacctccaaggaaaggttctctgggacactgagtgtgtttgcttcacacaaataaataatctgtatagtattttacaagtttataaagagtgttcacccatgttacttggtgggtccccacaaggcaggtatgatttactcttgtttgacaaagctcacacaaccagttagtggcagatctgggctctaaaacattatttcccaaagtggatttcagggaccactagtcctgacacatgctgcaggaaaaatgttttgtggtcaaatgagtttgggaactctgtgagtcatatcccctttgggtggcttaccatggcctttggtgtattagtgtctctgagaagttctgcaggaaagactctcattttgttaggtctcatgtagcttctccccaccgtgtctaatcacgaaggctgcatctgacggaaaacctattaacatgctacagaaatgctgcctgtgtgtacgcgtgatccctcctcccccgtgtgtttggaggcagtgaggattagagcgtggctgggagaggagcgtgcaggggtaaggacggggtaggggacccactgctggggactactagagctgaagctcccctcctcaggctgtgtcctctctttccctctgggcagtgcagaaaattcactcaatattaggcacagtcagcccagcccatatctggggcaggatcagaggggccgcctgagtggcggagtggggggtctgtggtcagtgaatggtgggagatttggggacggcagtccttggccatggggaaaaatcaacagggacccacaataggggcttagtcaagtctgccctggacgatggtggggaagtcaccctatcctcgtcgcccagacacaaagctcccgaggcagggtggaagtaagaaggccaggctttggcgttcagctggcttactctaacatctgtgtgcctttaggtgatgatctaatctgtctgagcctctgtttcttcctcctcagaatgyggataacactacccactttgtgacgtggtgaggattagatggtgcaagtgtgcaaaagtaccctccttggccctcgtctttgtgtgtcagctccatctctcttcccctgcttttttggagcccctcagtcagaacaaatagcttcccacctccagtcctccacgagcctgtcatctgtacctctctttagttctcccatcgccctgccttctgccattttattatatgcccatctccccaatggacctgaagttctctgcaggctgctgctgactctctcagtgcccacttgtatctgcaggcccgaccatcccgcgtcttcaggccaacctcccattgccggtgtctggaccccttctcttgagggctttctctttagttgcggaggccactgtgccctcacacagagcaggccagacctgctgggagacaacaccctcacccagcagcactccacccatgccctacaggagctggtgcagaaataccccaccgcttgggtgccctagctgtgaggtggtgttcaatagcacttctcagagtttcttactgggactgggctctggctgcccatagtggtagcaggtttggggtccccccatgccgatgcctcctttcccatgtcaatttccaaccctcccgctggcacctctgcaccttcatgaggaatgactacactagcgctcttgcttagggcctgcttccaggggaacctgaggtaagataagggcatcctccaggtgtcattcatctctgcgtacacagtgggtgctgatgaatctctgaatccagcagaaatgagccataggaacagcgcaggggtgactgtcaatcaaggcaatgacgtcagtgggctcaccacgtgggtgggtcctgggagcaacgagatagaatacctgctcccttccacatctggaagcatccacagccacactcacacctctgtaccttccccacctaatgtttagtcaaaccttggcaggcacagaggagctgaggtccagggtcctttctctatgagctgagarcaggttagtgttgtgttttgagatccttttatgaataatggttgagaagtgctgctctttagtactaagaatagtggttattcctagtgcatttgactcggagatggggactattccattgctctatttgtcccacactcggtacacagttactgaaactgtcaccgtgtcctatattccataggccattatgtgtatttcaaaccgttatataaatggacttgatttggcacttctgaatgtcattaaactcctcccataccagtaacaacacagtttccatagaaacgaatacatttcagaaaggaaggcacagggaagaaagcagatggagttagggggaaaacgcggccccctggttcctacttccagagcacagggcccggcactgtgacatgagcactctgtggaggtggggcaagctccttcaggtttttattgactccctttgataaaagccctggataattcatctcagcctgaacctgctcattccagcgcacggctctaaaaactttatggcaccgcaagccattaagcgccttcgtttattccaacttctctggggctttcttcagaccctggggagagggctgggggagggtctcagcactcaaagaattctgtgatgaagcctttgaggctggctggggatggaaggaagaagcagagagaagaaaggaggcctccccggtgcagttgacatagtggagaccccaggatcttgccagtggctgctgtccaagtcactgggtcccctcgtcatcagtaaagctagaatgcgaaaactgcagcctcctggggtggaagcggtgtggcgtttggagagcctggctgaggagctgcccaccgcctcggcaggctgcaagtttcttgtctttggagggattcaagcataggttgcaacagcctcttagaataaaacatctcacagggcttatttctccagaagccatgctggacactcctctcctggcctacagtgtgattggattctccttctctgtttccaatagctacttattcatacccggttaccgcaactgcgacattgtattgtagttgctgacgtgtttgtctctccccgcaagacagtggtatccttgggggcagggactgtgtttttacatgcacagcgccaggcacagagcgggtactggacacatggttggtgaataaatgagcattccgccgtgttcacagtctttacacacactggtacttggcagggatatggaaccagatgacctttggtcccttctggcctggagaatctgtaatgataggggtctaagcctgccctgactacacccgggatttgaatctagatttctcctactcctaagccacagggttacgttaagaatattagtcgcacgcctgtaatcccagcactttgggaggctgaggcgggtggatcacccgaggtcaggagtttgagaccagcctgcccaacatggcgaaaccctgtttctactaaacatacaaaaaatcagccaagtgaggtggtgggtgcctgtaatcccagctactcaggaggctgaggcaggagaatcgcttgaacgcgggaggcggagcttgcagtgagctgagatcatgccattgcattccagcctgggcaacaagagcgaaactccgtctctgtctcgagagaaaaaaaaaaaaagaatattagtcgcaatgataaaaggaaaaccagaaccaaaacagccacaaaaacagctgggtgtgaaatgttggagaaaactctccccaactgcatttttcctctacactcaccacaacagtccacacaggagacctctgtggccaaacaggtgggagcagcggacaccagctgggtgtcctccaattcaattctgacactgtctacctggagatagtgtcagatcccacaggctgggggctcagtccccaagacttcccccacaccctggcacctgtcacaagttcaggcttccagaacttctggcagacccgctgcaagttgggggttcccaagaccttctgtttgggtttgattaatttgctagagtggcacgaagacctcagggaaacacttacctatgtttacagtttattctaaaggatattacaaagaatacagatgaagagattggggggaaggggcaggagcttccacgccctccctgagtgcgccaccctccaggaagctttacatgctcagctgcccagaagctcccgaaactcagtccttttgggttttyatggaagcattccttcccctagggtgtgaggcgggactctctcagggaagggtcttaagacccacaatcagaaagtggtgaaaggttagagtcctgcgatggggcaggggaaaggagggccggagagagatcctgtttcccgaggcctgcccctgaggcctaacacacccaacatatggcaaaagactgtagcaagggctatgggagttatgagccgggaaccgtggatgaaatccccccaccccatgcgcctctatatagaaacatgtctagatacatcatcacgcctcaggccatgccctgactttcaaccactgatcccttacagcaaaagaatatatatgatcatttaacaattagtccagtgcactgtattgcatgaatgtctcccagggtgaggccactcaggtttgcaggcttttttttttttttttgagacagagtctcgctctgtttctcaggctgagtgcaatggtgtgacctcggctcactgcaacctctcctgggttcaagcgattctcctgcctcagcctcctgagtagctgggattacaggcatgcgccaccatgcccgactaatttttgtatttttagtagagatggggtttcaccatgttagtcaggctggtcttgaactcctgacctcaggtgatccacccgccttggcctcccaaagtgctgggattacaggcgtgagccactgtgcccagcctgcaggctttctttagatttgaagaaaagattccaaaaccaggagtggtcccagcaaacacagcttcccccttccaggcatctggggataccaagcaaagagacaatgtcctcttttggttcgagactctttccagttgttaatgtagtattggatttccttcattttataacccatttttcrtttctttactctcaggtattattcctcattttctccactagtcgtttattttttacctgcacttttccacctttggaagggacattgggttcggccactgtgtggtccagatggctgctggcagcactagtccagccrgtgcctcccctcagtccattaccattcatacccgggaaggttacgtaagttccaaacgagtggactattcttaccaccaggccccctagttggatttactcttagccctaattttgctagacagggtgaaggcacctcccacccccatcagggccctaggaattctgacataaggtttaaaaacacagtgacagttttttgcttagaarttatctctgtttccagcacttgtagttgcagccctggtcccgggatcactgcatcacacaggggagagagaaaagttttttttttttttttttttttttttttttgagacagagttttgctgttgctccggctgaagtgcaatggcacaatctcggctcactgaacctctgcctcccrggttcaagtgattctcctgcctcagcctcctgagtagctgggattacaggcacctgccaccatgcccagctaatttttttgtatttttagtagagacggggtttcgccatgttggccaggctggtctcaaactcctgacctcaggtgatccacccgcctcagcctcccaaaatgctgggattacaggcgtgagccaccgtgccaggccaagaaaagcttttttttttagctgagttgggaaagaaagaaaaaaatagtcattatascagtgtactccttccttagcaagaattgcatagttatctagcatccttcccacatcctcttccccagatcagccagaaaaacagaggaaaaagtctagtggggacactagtaccactcatggtgtgtgtgagcacactcgtgaaggcgtgcaagccagcccttcatgcttttatgtccccattttagacaaccaatatttcaatagcctgttgtatttctctatcaaattcttactctaaggagatctctctgaccattgctggrcattatgggcttacagtgtgtcccttggtctgaagaaatgatggtcagctgtccaaatgcatacaatatcttctgttccatttttttttaaatgacactctgagcacttctatcttctactgagtaaggaaagcccactccagagtcagtgtctattctaggcaagacccatttgtagacccgcagcaccagtctcacttgctagctgtgtttagagccttcccactagggaatcttccacatagccactggcagtctctgtctctcttgctggcagacagaatagctcttactggcattatgtgcctgagagggtgcaaagggaacatgtccagattcagcccatctctacactgctgcggtgcctccatatctacccatttcatgagcccaggtggccacctcaagggagcagctggggctatctgcgtgtcgattcccgtcaccttctgaaccttgaagggagttcttctgatgggaactgacttgttctgctttaatgcacccctcaaatttccatagggctgtgctccacatgggcatcccattaaaaggccaggtttccattgcccttctgcctggccactcggccaggccattggtcactgcccatgattcagtaaaacctaaacacagaggcctctaccattgttcatttttttccatcactattaggaaaacagcatgcaattcagctcatatgcagacctgtatttaccttgtctgatcaaagtagtaaccttcgaaacaggttggtgtccattcacattggaactgctgtctgtcaaccaaacagctcctgagtcaatcaagagctgttcataatgcactgtccacgtgttgatcgaatccagcagcacctcacacagttccagagtcagttctagggggagaagaagctccctgcctgagagtgtcttgtccttgaattccacaggcagcatgatcctctagaaaccatttccattttatgtactcttctgggcactgctgtccccattagaatgtttctctgacatcaccgaagacaggatgagtatttcaggtgggtcctgcgcacccaccttccaagacagctaaggtttcatagcaaggcagtaaatgccctcaagtggaaattctctagtccgaagtcctagcagttgctgctgggaggtgctcagaggtgtttgccataagccccaggaattgctccatagaagtatatggagtcttcccaagaggaggtaaactttctggggaccaagacaagtgcccgctgcctgtgttactctggatgaatcacatccctttcctgagtcttggtttcctcctctccaggtgactgccaatgtttcttttaaaagtctatgattgtcaaattatccagtcccagcatcttggagctactgactaggggcagagaaggtcactgtcctcactttgctgacaacatctatgcaaacactgtgttgggctcctgggatctaatggagaccaaacagagccaactgactggtaggggagacaggtgttattaacacaaaataactgggctcccagctaaaccccacccttaagcctggaactgcagcccttagtgaaaacaggtgactcaatttttctcccaattgttgcttttttggcctgccacatccctatcctgtgcccatgaaaagacttcagctggcagagtaacacaagcggctgagcgtcagggatacaagtggctgagtggtgagcagggcagcaactgggcatcggagactatggatagacgaggctaacttcagacagtgcagcttcagggaatgattgccttcttcctgcaccatcccctttccaactcctcattccgccaagagccccttccatctcccaataaaatcctccgcatacactacccttcaatctgttcatgtgacctgattcttcctgacactggacaagaagctgggtgccgagagggcaggagcttggacactgctgtggggccgcacagagcctgcttctgccagagatgagtgactggccggttccagcgttcattccctctggttcctgcacttgcttgctcacacactccctctctcaagcagtggccagaggtaggctgagtgaaacaagccactccagttcccacccacaaagagggtcaaggttaagggaattatcccatctcattagtaaataattgcaatatgaatgtatatgtacaaactgaactcagagctctgaaaggaaggatctggttctacgggagcatgtgacacaggaactggatcttgactgaggagggatgggtcagtggaggcatcactggagcagagacttgagctgtgatttgaaggatgagcgggaattaccaggtgaagggtttggggatggggtgagcgtggcaagcagggtagacacagggagcagggtagacacaggccctatgacaggggccctgcttgaggagcagcaggaaggcccatgtgactggagcgcagggtgtttaagggggtaggatgargtcagaggtaggtaggaaccagatcacgtggcaccttgtagaacatgctaacaatgtgagcatttttttttttttttgagacggagtctccctctatcactcaggctggagtgcagtggcacgatctcggctcactgcaacctccgcctcccaggttcaagtgactctcctgcctcagcctcccaagtagttgggattacaggtgtgtgccaccacgcctggctaattttttgtgtttttggtagaggtggggtttcactattttggccaggctggtctcaaactcctgacctcaggtgatccacctgccttggcctttcaaagtgctgggattataggcgtgagccaccgtgcccggccttcagtatttttttcttaaagccattgaaatattttcaaaaggaacatgacatggtcaaatttgcatttcgaaacactgctctggctaaagtgtggaaaacgacctgggcatggggattgggcatgatagatgcaaggagccagttaggagagccctgatgcagtccaggggagagaggctggggacagggtctagggtggtggcatgagatggagagaggagggtgggtacaggaggcactcaggagataacatccctaggacttgctgaggactggatatgagtgtgagggaaagggaagttataaaggaactttggctgggtgcagaggctcctgtctgtaatcctagcactttgggaggcccaggtgggaggattgcttgaggccaggggtttgagaccagtctgggcaacatagtgaggcactgtctctacgaaaatttaaaaaattagctgggcatggtggtgcatgcttgttcttctggctacttgggaggctggggtaggattgcttgagcttaggaattggaggctatagtgagccacgatggtaccactgcactctagcagaatgaaaccttgttttggtgaaaaaaagaaaaaaggaacttggcagggtctgcagcttaggggtccacagtctaagagaggcaggactcctggtaggaggtaggaaaggtggctggaggaatgggctgagaaaaagctttggaatgttccctcagatcctggctggagagtggaaacggcaggtctcttgttccaagacactgagcgaaataaataacaatcataaagtgccctgtaaatctgactcttgccataaataataaacagggatattatacaaataacgggctttgcagccccagtggaagaaaacacatcagtaagaaaaatgaatttagaaaaaatgcaccccaaagccccaactaacaaaatgacggtattagccaacatcccgggggctcggcaggcagtggaggaatgggctcaggaaaatgactgtggcccttagcgcgagccagactgtacggctgcaacagagtgagaagtgctgccggtagcagggaggcctgctcatccctgggtcaggtccccaggccaaggaccctggcctgctgcttcccctctgccctgagaaaagcacagctcatcccacaggcctgcccgactctttccctgccacccagcatatagctgatatggcctgagttcacccttaatgacagatgggagaaagaaacacggatccaccttcagaggctgccaaggaaagccagtctattgacttttttgtactggttcctttggtgaccaagacatttaaaattatgggatgggctgtgagaacagggtgtgggctgggtgttgagatccaagatagatttttgaatcatcacattttagagacatacaggtcatcttatgaaacatgattccattttgcacatgagaaggttgagatcttagtgtctagggacttgcccaagctcacacagccggctcctcactcttaagtgctcctcccactacacatcccagctgtggggcacctctctttctatacgaggaaacagtagaagctttagactcatttttttattagtgtacgagggtgcataaagaacaggctctcacgccatcataaagaactttagagctgtcgaagaaatgagattctcaacctcccagggctctgactcccctgtaaggctgggaagtgaggacaggtgctgtgggggaggggcatttgcacacagagcctggactgggaccacagtgctgttcgggagctgtgggccatgcaagaggctgctagttatttatggaaccagctttccccttcctgggtgctccagctcttcccacacagggtagaggtctccagtcagcaaaagctgcctttgctaatcactcacaagtatttcgtcctgaaagatgaaagggacagcacccagaggcatttctgctctcccttggtctcttgaagcagacatcattgcaatgctgaaagtccacggaaaccgacacccaccctgatgggcagcccaagaaggcaccagtgtgagggaggagtaccctccygtgcaggcccccctctgccccaaggggatggctgaaggggaggtcaaaacttcggtgcctctgcttcttccctcctttaaatatcctcttcctcatttccccttctcaagagtcctgtggcctgccagcttttctggtcccccaggaatggtcttctctggtctgtgtccctcactccaggtctcccctgattttctgcaaatcaactcaagttttccctgtgttctgccctttcttctccctgccttgccacttcctctctttccagccaccctgaaaaatgaaaccaagctgaagtgttagaggctttccctctgctcatggtctcagcctcctcttccagaagtctaagagccctgggtgtctggagccctgggctgtggtcctggctcttccagccacttcatatgggccccgggcaagttgctgcatgctcttgggccatgctgtgttattgggttgcactgtaatctctagagttgttgacaggtctaacatagaggaggcctgagctctctgaggcaggcacagcccctcccctgatacatgtgacagccttctactctgcctgggaataggatcaggtctggggaagccatgtgctttgagaaggtgagtggtctggatctccaggagagagaggtcataaagggggagggccaggaaggggaggtgaaggttgtgtgcgtgtgtgcacacatgtgggtgtatgtgtgcatgtgtatacatgtgtgcaggtgtgtgcatgcatgtgtgcatgtatacatatgcatgcaggtgtgtgcattgtgtgtgtatgtgtgtgtgcatgctcatgtgtgtgttggagatgtggctgaggaaccagtgagagtaaactggatctacttaaagatgtcctgagagcatgggctggcagtaggtggggtgaggaaggagagctggtacagaaagaagggaaactacccctggggaaggcctcctcacccagccctgcttccacgacttgcctggaycctactcccaggaaggggctgtagcactggaactggaagaaagcctgagagtgagcaccaaggtagactctaggaatcacccaaaacagggagaccattttgtggactgttccacatctgtgtgctctatctgaggcgctccttttcaatacctacctgacacctgtggggactttgtacattcctccattgtcactcagggccctagttaattacctaaatgaaakttgagcgactactccctatgtgcaagacactgggcgaaggcccagggagaggagaggaaggaacaggagtctttgccctcctccagctgattctctacatgggactgacagcacatgaggaagcagaccaataaataatcacacatcatgataggtgccactcgatacacacaccagctgctgtgatgagcacagggtgcagggagaggggtgtctgtgtaatttaggtagatggaaggcaggatctctttgtggaggtgacacatacactgagatgtatttttactgtgagctccttgagggcagaaaatgtgtcttactctacttttttttttttagatggagtctcactctgtcactcaggctggggtgcagtggcaggatcttggctcactgcagcctctgcctcctgtgttcaagcgattctcctgcctcagcttcctgagtagctggggctacaggtgcgcaccaccaaccctggctgattattattatttttttttgtatttttagtagagacagggtttcaccatgttggccaggctggtcttgaactcctgacctcaagtgatctgcctgccttggcctctcagagtgctgggattacaggcatgagccatcgtgcctggcttgtgtcttatttttatagctccagtgcttagaacaattctggcacttgtaagaaattggtattatttttatggtattcaatgactgtttgatgaataactgaatgatcactcatcagcagttcctatataaagcacatgtgcttaatcacatgaagacaatgatctcaaacaaatgtgatattgttatggctagtctgtctttacttcctcctttcttgcctgccctttgttgatttctgtttgtatctccttttgatggctcaattgtgttgggtccacacagtagaggacacacacgcacacacacacatacactctccatatattaccaaccacctccattcctgcaaagactgcagattctatccacgaagctattaagcactcccaaatagagcaaacctctcattgactatcacgtgcctccttaaatgatctttgaatagcattttctttttattgctttgtgtagtttaacggcaccaattgcaattactctaacttatgataaaccccagatctataaagctcctgttcattcattattttcctcttgctccttctcaagctgttattttttggaatgtagtgaggagggaggagtggagagagaagaaaataaaaggacaccaaattaacaggaaaacaaataaaatagggaagcacttctccctgggtgacaggcaccttattagatactgttaaacagaacaaatatgctttaatacagcacaagtaggtcttttatatttattctaaatgggaaatacaatgatcaycaacttatctttaagggaagaagaagctaattgttctaatatctcactaatcctagcaactgggagaaaaataattgtttttccctattttaccaattgttcaatttataccaaggtgtgttgtgtagcatggacagagatttctatttcttgatgtatgtcatggctgctattccattttaattattaatatgtggaaattataattattttgagtattggtatgagataattataaatataaaacagctccgcrtgctttctgatgcctttcttatctgcagacatgttggagtttgggcgtatgagctttagagagagagaaatgtataatgtggtacttagggcagcaaggctggctggagtggaagaagaggagcytcctccctccagagccctccctctccttcacctctgccttccagctctccagagccaaagctgacccacctgtgtctctcctctgccccactgcctcaccctcctcttaccctgtctctgagttgttagttgagatttctaactcatcacacatgttggctcagcttgcatcccatcccctcatctcctcagccacccagaagctgaggtcagatatctggagctatgggtttcaattccagcccagctcctgactttttggcttccccaatccctacaaacctctttcgagcttctctaatgagcatcgccagcaagagaacatgtctattcagcaccacggacagaggcacgctgtcagttcccacaaattagaagttactgcctagcagtcttgtcaaggcagtggtgttggggagggaaggggaggctgagaaagagaaaagtcagtaaaggcaactgactagcaggacacagaaaatgcggcccccaactctggttgtactcagccatggggttcctacaaatgggaagtagctttttgatgctgttggcttcaggcaggcagcaaatgggggaggtgatcacttcctgtgcttaattgtgctggcctaactcttgtcagattgtcaccatgatgggtgctggaaacaggtccacagctggcaaagtctcaggcatggggagcgcatggggatgtggttgtcgtggtcggggttgggaggagagacagctgaggagcttggaaagagggcactgagaccatgctatggggatagagatggtagaaagaagcttcctccttcttgctggaatgggaatgaggagacatgggccctgggccctggaaggggaggggtccagcycatggcaagcatggctggtgggagccaaggcttcatttgtctgactttaatgaataaatggcatccccagccattgtttatctacttttgaatcctgacaaatagtctgtggcatctgatggagagggttattagctgcatggagacagatggctagggatggagaggattggttctttattacagcagacccgtaagtgacagcactcctcctcccagcctctatgccaatgtcaacacgtttctcaagccttcagtgacccaatgaagccagtgcaagaggaagacagaatggcctctgagtaagagggaggggtagggtcagtggagttgggaaagggggcaggtttcctagggtaagttctttgggaataaagacattgccatattcttctttggtattctcctaagtgcctgtatagtgctgtttattcaacaggcattcaagaaacatgagtgatggaggaggcargtagagaggtctggattagaaatgaaaataggagcagatttaattgggctggctgtggggtggggtgcggaagaaatggtagggaagagagaggaagagaagtaggagacacaaagggagaagggaagattgcataaagaaaatgcycctgaatcagcatcctgtgtttcaggcattcactatgcttccccatgtgattgtacaaatggcttcatggaaaccaaactggtcttcccactgtccccttctgagaggtcccaggttcttattcctggttcctctgtcctgtggctgtaggggagagcttcctccctccagattactcycgagacaatggggaggttctcactgaccttcattcattctccgaaacttgtccttggccatgtagcccagcaccagacagcatcctctcttctggaggcccagctctggaagagaagcataggtgggtgagttgggaatgggaacaggtcaggcattgttggggggccctctgcagggggctgtggagcttgttgctcttataaacagaggtgcttttgtttagccaacatttatatggaaattgttatgttccaggcataagtttaagccagcaactcttcattttgattctcataacaaccctgtgaaggatgtttccccattttctatcatccccatttatagatatatgaagttagtggcactggatgaaagagctagcaggtggtaaagccagagctttgaacctaggcagtctggctctgagtccatgctcataaacataactctgggttattgaggccctttgtatctcaggcttggggactatgctcagatcaacttgggactgtggccagacctgccagggatgatgcagaatctatccagtcgtgtctaggatggaacagtgcaaccagacatggtgggtgactcaggaggatgaagtgattgcgtgagtttagggcagcggggcgacacagaggttaaggtataggcagaagagctctctctaccttttggagagggtgcgtttctggtgctagagattcctgtgccttcctatatcaaggcccaatttagcaccatcatcaagcacttatgaaatgtagacttagagcacaggggtcgagatagctgagagacacggactccacagggctttgacccagttggaaaaacaagatggaataacaattccaggtagcaaatgcaagagataacttttttatttgcacagtattttgtaaatcagtgtccattgtgtgtgtgagcattaaattggagtccatctgcctcacaagaaggcaagctttcctctctggtatttgtgctttatcctgattcatcttaatcactttatggatcctgaagcaatagcacactaatttttttgacccccctctacccccaaacaactcactgaggtgggcatatgggccactgcaactgacattatgcagatgggaaaattgaggttcaaccatgttaaatgacttcccacgattgtcttagacccccaccccaccttgtagcatagaagtcttacaaatgtgtcagctgccacaaacttggtaaatagataaggaatttgatttctggaagagggaatatgactgcagctcttcctggcccttgccagggtttctgggctcctccctgctccttcctttgatttctcagagaaagagggtcccaatgagtgatgcatcacagcaccttctcccacgacaccgactgcctccctgaacccagccagtcagtgtctaggctcaagaggatagacggagcgggtcattcctctttctcctcttccatccaccgtctgcagcccaggtccacccaccaagcatagcaggatgaaagagagtgcagggcccatgagacacagataagtcaagctcaggggctcttgccctagagaaaaacaaaacatggcaggaggtggcagaacgccacggcccagggaggtccctggctttgatctcctgattctttaaaggggtttattgactatcagtaaagagcagagaagcagatctgagggcactgtttccaaaggcactcacttctcttccttcccctccacactggcgtctgaaggcttagccaaaccgccctcacttcaaacggtcttacatctcaggcacccaaattgacgatgttaagttccctcattcaaggccttggccctttcttcaggggctcctgctctgtcgcaggcctcatggatcaaagcccctttgatgtttacttactgtatttgtggattctttctaacaaccaccttcaagaggcaggaatgcagccttccaggagggggccagtggaagtacaagctgcgaggaggtgctgagctccctggaacaatagcctctcgagggagactgtattgaaacctcaacacgctgacgacaggcagagttaaccagcccattgtaattgcacacgcattgttcatcattagaatgatacaattgctgacaattcctattatatttttgccattgacttcgtatgcccatctaaagcacatcagcaatggctcctaatgagaaagggagtttgggctcctggactaagcccaaactcaatccaggagcttgggagggaggcaggggagcactgagtagggagggcagaagatactggatggatttaggccaatgttccagctggtcttctggactgtgactgaacgctcaggcaaatggaagggcgaacaattctcttacagatttagagagtgtgagcaatctgttgactctggattgtcttagttggatagagaactcaacctctcctatgccacatactaggacaccccccagggcaactgcttgaggagaggctgtgtggacaagtggttatgatataataactaagagtctcactgattatgtttgatttttgcaaatgagcaggaaaagaagttttaaaaaacctgattaataaaagaaattgagaatgaggcaatttctcaatgtatttggctcatttaatttgacacgcgtgggttagtcttaattatttaggcggctacgttacaaggcgctaataagcacactgcagaaatttattaagtgcgagggctctctgactgagactttgtagagaagtggggagaagctactgggatctttgcaagaacgagcaggttggaggatgagtgaagtgagaattagttaattgtccatatatgaaaatttgggatgtcctttggagagatttgcaaagctaaattaaaggtcattgggttcacatgagtgtgccagcagggagtgaagtgggggaagggaggggatgctggaaacccaagtggggaggtgaatattgtccaagctactaaccacagagagaaccaggaggaagcaggaggcaattgctttggcttggggagactctaccaagccaaactaactaggttattaggagagagatgatagaacatgacagaaagaacaggaatctctctctttgtgaggtagatcagccaccaccagactgtcaccttccttgtcccatagcatggagatgaatgggagagtcagatcacagatgcacattttggaacagtaagatgatgggatcttctccaagtaggctttgggggtgctgtctttggctttatcagtagcagaaacacccagatactctaaagctggctatggaaaaataattaccatgaaaggagtcagccctggcttaaaaggaaagttcatagcaaggaagtccagggtcacctgcagatggggcagtggagggcactgtcccaggaacaaggaaggtttaggaataccgcctgtgcaaggaaaaatggattggagtagggtatgtttcttagggagaagataagtttgcacccttgggaactcctggcctctggactctgagcaactgaagtgtcaggactgtgccttctcctgctctgagcccgtaggaccaagcacagtgcctgacacatggtaagtgctcaggaacagtctgctgacttaatgaaagggctggctacaaaatatgggactgtgaagggttccttctgactcgggtcagaatgaaaataagtgggcttcactgtagcacaatgggtttaggttagcagaggttggttgtagagtgaatgaaacttgtagctcattggaagagaagcctagataacatagtgggatttcctcctgggagaaataaaaggggatggctttttaaatgggatgggttttcttccatttcagagggtgcagatgggatgttttctagccttagaattccttcattcttactagtaatgtagtgatacggtggtattatttcatatttgtgggatacttattttttaatgacgctgtcatattccctttctctttagatgctcacagtaagtagctctgtgacacaggcaagtcagaaattatctatttcattttggtttcacaaactgaggctcagaagtaaagtgacaatttaaggccaacacactagctggtgatagtgcccatgctggaacccatggctgatttttggcttggttcttagggtaaagtacggggtcgcagagctgcagatgctgcaaatcaagacagaccagagactagagcacagatcagcggtgtgggctgggacagtgctataggtcgaattcctcaccaattctgtgttcccctcctgcaccaaattcgtacattgaagtcctaatcccagtccctcagagtgtgaccttgtttggagataggaaatttgtagaggtgatcatgttataatgaggtcattaggacggacctttatcctgtgactggtgtccttatgaagaggaaaatctagtgatagacacatatacagggagacgctgtaaaaacttgaagacagccatctgcaatccaaagagggtgcctgggacagatccttccctcccagccctcagaaggaaccaactctactgactttggacctccagtctccagaactgtgggacaatacatttctgttgtttaagccccacagctggtggtactttgtaacagcagccctagcaaatgaatatagacaggacagggaggagtgggtcttctctgaggcctggcaatttccactggccatggttctctggaacccagcccccagagcacaaagctgcctgcagggagcagcatcacactctgctaaggagaccccagggtggctaagatctgttgggagtggcggccacaagtgacaggaaagagggaaggtggggagagaaggctggttacgtgtctgcatgcctggcacccagcggcaagctgggatgccattagcattcctgcttccagggtgaggaccgtattggccaggacagcacttgctggttgcctggttgccctgttcagacattaatgtgccctcaagtaactgcagatggagccggtgacaacggataggcaccagcctctgctacctcaccatttctgaggccatcaagtgcatctggatggctgcttgtagaaggccttcctgtcctgtccccaagttgcccagtcacaacagttcaggtgtgcttgctgaagactaaccccttcccacctgaagctagtagactcgagcacatctctggaagcctatcaaacaagaaacagaaattaatggcaggcagtttggtgtggctgtagcagaagaaaaaagatgagacaggagatctagccagggaccagatcctggagtagccaatgagcctcacccaggagtctgggctctctcttaaaggaggtgggagccacgcagaatgctaggcaggggaaagacaggtgagacttgcatttcataaaggatcccttcagcactggtgcagatgatggatgggagatgagctcagagaagggaggctggctgggagaccgctgccatactccaggtgggagatggtgggcttgcatctgctgcttcttcctgctctctgaagatggccagagatcagaaagcaagggaaggaccctcagttttatcctgacattcatccctgccacgttgacatagagagcaggggaggggctgaaaaaatagctcccattccccagacagtgcctgagatcatctggaggagacaccagctgggtttggttggactcacagggaggccacatggggcaggggaggtttcagaactaacagagctggctggagccatgctccagcacttaccagtgagcaactcttaggcttctctgagctttggtttcctcatttataaaacgttgattctaacggtaagaccctcctcacatgattcatatgaaaagcaaatgagccaacacatgggcaaaagtgcccagaatgaagtacctaataagggtgagttcaataaatagaaacaaaataccaaattctacccccctcgtttttttctttttcagatatgaaagtggagatgcagagaggtggagtgagctctccagggtgatataatgagctattaggttgcatacttcccaggttagcacgtagccaacagtgacatggactggaaatgtgaggccagtcaggaagaccagccaggtggctgtcatgggagaggccaaggaaccagagagcttgggaatggagaggaaatgatgaatcagagacattccaagaagagacagtggtgctaagtgacagagtgggtcaagcagaggaagagggcaaggatgaccccagtgtcttttgtgggatataatggacaaagagacatgtctgtatcagagtagggtgatgacaaaggaagcctattaagtcacaggtgataatggtacatttctggacttactgtgttcgaggtgacaaggttctaaagtgaagaggacttggatgatcatgtgagaaggagttctaggctgaagaaatatttttaaccagttgcgttgacctcagagggtaaacattttgttgggggaaacagcagttggatcctgtgggtagactctgctacaagcattaatcctacccctctggaaccaggacacattaataaatgtgactggtgtaaagtccaaggcacagacactcgcaaagaggccactaagtgctgggcactatgtgcaagagaaaaaaatagtaggcaaacttcctagcccaaagatactataatccagttggctatacaagacatatacttaagaaaaggtaactaaaagtcagagacaggtaatagttcggtaaagaaagtcttgaggcagcacgcaagttatttctgcatgaatggcaattcttactgcaggagtccccaggaggaaaagacagcttcaggctgtgggatggtgagggaggtccttgcaaaaggccttgaaagctggagattgtccctagttttgtcttagttttggatgtctaccaatggccctctcattggtttttgtctatcaatagccatcagtagccattctgcccagcgatgccattctgattgcagaatgatggggtcttctgtttggaaagttttcactttgattctgctaaactgctttctgcatcggttctgcctactcctattttcagcataattactcatatcccaggcaataataatgcccatacatcatgcaaagatcataattttctgatcaacctctatcataaagaggactgaagagtggagtagcaaaggtatattaatcctgactagtgcctggccctggacctccaggacgagtgataaatgtttaattagcccaataatacctgttttataatttttggatctcattgcttgctaattctaagtttactaaataactataaactttacgttgttgtaaagacataattgcttcttcattgcttatttcatatgagttaattatactagaactaagtttttccccattcatattatcaattagttgttttaaactattgatttgtatttaattaactatgctattacataccaattaaattcatataagaggaatctgaaacagctgtggtcttaaattacgtttttgaaataatgagttctataacatttcatgtcaagttattgtcagttaggaagagttgacaatcatttgtgataattccaaaaacttgttgtgacccgccagcccatctcaccagctccagcaggcagcaagcctccctcacacacctgctgatcacgtgccgatcagcaccttacagcttggtaagcagtggcagtgcctaacactgggataaccctttgccagccctgccttctccagcctgctccagccatgccattatttggctggcatagctctatcccccatgcggccaaggcaggcattatcagcaactcctcaccaccagctgtggggtctagaattatctgtgctgctatgtctcagatcctgtgtgcctgcaggaaatctacatgcccatgtggtcatctatccttcggcttctccaaatctctgctcactggcttaagtctgtacatctcaggtgggaaaaaagacagcagtcatttgctgagctgcaagggacatttaacttttctcatctcgtttcaccctcacaacacctttatgatcacaggtgttattctccttgttgttatttagcgagagattgacactttagaggagtgaggagtttgtcctgagtcccacagctggcaaatggtgaggcttgccgtacacctccatgttggtgcttgttggtgcgtcgtgccatgctctgtctccattctctgtgagattcgactcccaaccaattcggagtctcagccctttgggctggctttttgataccttgcctagctcttatcatctttctctccttggagggctgggttcctcccctaccctcagacactgcctgggatctttctcccaactgatgaattgcctggaattctgacacagccatcagctttctctggggcacttggccatcaacatgggacccaaggttggcagagctcaccccactcctctgtacactgaaagtgggacactggttactatctttgggggctgggtgcagcccagccttgcccctctcccttggccagcatcaccaagtgtctgccacctgggaccaggctcatgtagttcaccatcacaatgaaagctgccatgtgctgattgcttatgcttcattagtctctgggctgagcactttgcatgccttaccttctttattcctcatcaaaactctataaggtaagtgctgttattattcctatttgacagaagggaaaccgaggatccaaaaggttacaaaacttccccaaggtcacattgctagtaagtgctgaggttagtaaagctaatcatgaatgagattctttggacttccagtataatccgtttgtgagaggggtggggcggggggatgttaaataatgttggttaaagaattttacgggaaacagttttatcccatgtgcaaggatgcctcagcccgtctctgatttaacgtatctaattccaatgagttacttgctaggtgggggaacagagaaataggatcatgaaggccattcctgtcctccagtctgtcttccacacaccctgtgaggaacaggggctgccaaaagccatatgcctgagggctgttagacttttcctaacagaaagttggaagtcgtgactagtgtttgaatggggccagatgctcgacagctatgtgtcctacccctggggaggctcagcctggtccattcagtccatcatggctgggaggccaggcaggaaaaggcatttctgctttccttatttctagaaggaccaagagttcccaaaagactaagactgaaggcaataaggaggcaggcaaagtcccagcctgcctccaagtattcccttccccagcccctacagttctcttgaggccaagatctttgcaaagccagaggcccaataacaggttatacatacaagactgatttgtgaaattagtctttgcccagattagtgaatgtgtggattattagctttgctgtacaggtgaggctcagggaagccaagcaattttcctaaagtcacacaactgggaaatggacgacccaggattagaacccaggcccatttggttccagagcccaggcttgctgtgcccttcttccaggatgtggtcccaatgtcatgcacacagcccagctgaccagcagagaccccagtgggaagaggggacccccccccgccaagcaggtgctgctgatggagtcacaggcatcactgtcaggtggtcaggagcactgagaagcccttgtgggagtgaggctcctggagagcccctttctcagggactggagaggcagggaggtggggtgaggtggggaagcgtggagaatgcctgcctactcagggtgtgcaggcagcaggggcggggctgctatttagtgatgggcttacaaaccttcttgtcacctatttatggcccacataaaactctgatcactgaggattaactgaagagggtcctagcagggccacacgctgactttaaagaattgatcactggagtcaggcagtcatgtccagcccctgccctcaagcccctcacatgctgccgaatgagtaggggtagggggagatgtctgctctcacttggcacaagggaagggggcagagagaagaacaaaatgtcctgcgagtggggagtgcagggtttttaggggtggagatgggtgggctaaggtccagtgggctgggaatgccccctccacattctgggtggaaaagcggcacaggagggaggccaggggacagcacgtccttgcccccagccaagtcacagtcacagctgcctggttcacagtccagtgggcatgcgttgcctcgcggggtgggtcctgttcacccaggaatgctgcgcaccttcactggggtggaaggagggagggctctccagctctccttgctgtctctcctccctcacacgtttccgcagagaggactgtcctctagggcattgtaacttgggccaccttgggagctgaggctggtgaggagcagaggatgaggaactggtgagatctccccaacagcagagccaagcccaggcagctacccgcttcccccacccaccccagcccacacagcaaggagggaaagtaggcggtggggttaggagaggacccagcggaaaaggcagggaaccccgctgtcctcccattactgaaatcctccttgagccttacataccccattacgacgctgtatcctataattaaattgaatctgccagttacctctcagcacggcagcaattcaaactcattggaggctttgtttattttcatttatttatttatttagtaattatttatctagctatccagagagctagatggaggccctagcccaatgtttcttttgtcttcaaaaacaagaaagctcaaatgcagtctctcccacttcaggtcaagagaggaaaggaataacagagaccacagggtggcagcagatccgcggggggacctcttgctggggggatatcgctgggacagggttaaggtcaagattgcaggggaagttttgtctgcctgccagtcatggtctggaccctgctcctgattctacccattctattcttgtcagagatactttatggaaagtccacacattccagaaagctccatggaagccccttacaggccccagacaaggggcttcattctgagggactagaacatcggttgcggaatgtggaaaccaggttaactgagtattattggcaactaacacacctgcagagctttgcagttgaagaagtaaatacatgttcttctttaaccctaaacatttatggaggacactgaggatgagagaggttccacaacctcccttgctcaaaatcaccctgctgctaatggcagggctaggatttgaccacaacgcttggggtaaaaccaaactcccccacctccttcagagccccatatccaagctggtggcccagcaacaaaaatcaaagctcttttcttctctttaatgataacctttcagcagtgagtgggcaaaggagagcatgatggctttgagtatggaatcaacctcaaacaggtccaggggagcgattctgagccaccagccatcactcaataagaacatgaaagtttatttaccacgaggccagcccagtgggaggcagattgctactattagcatgccaaggactgcacagaccctgcacgtcaatagctgagccccagagaagtgaccccttttggggttatccaatctagcagccccaccagagcaaaggacgagggtggctgggatagtgtgtgcttacatgtgtgcacgcatttggagaaagggaaggaattccagacttgagatggctccttagacttaaatctcccttgaaaagaaaatgctgcttatgaaccacttccacccttgcctacctactcctgccaacccattcatttgtttattgatgagctgcttaatacttcttggaataggaatgaatagtacgagaaaatacctgggtccacactggcaattcctgggtctattctggaacaatcatgcttacaaggttttcggtgcacatgggaggtggggatcagtgtgtctctgggacctatttacccctatgaaccactggggttcttgactcaggctctgtcagtccacagagggtggttatggcaatgtggaggaggccggtggcccagggcctgaactgcaggagaatttatacttcttgttcatctggagaaagttctctggccagaggacacagtgagggagcctggtttaaaaaaaagaggcttaagctaagaagcccggggagtaggaagttctatgctaccctggcttgaagctttggacagtcggggcaggttctctcttggctcctgaggccaagagaagccagcctaggaaggttggaccattgatcccacagccctggggccttctcacagtagtgtgggtgtcacaaccacctcttagctcttgatcagagatatccaccttcagtctcctcaatgtgtacaatggagaggtcttgggctgcaataaggactggagataatgtatgtacaatactgggagggaagggtaaagagagttgtgttcctaaaccctgtctaaatgtatggaaccaaggccggacacattgtaagcccctataaatggtacttacttataaatataatatagtattagaaagtacaggggtatgctaaaagtcaggaaaataataagatactctaagattagcctgaggaatccagttctgtagcttgaatagagactgctatgttgttggagttaatacccacagcagctcaaggaacagctttgttcagctctcagaggaaggggctgcctggtggctgtcctggggccgctgttccttctatcagggattctcacacccctctcaagcatcacatttcattcatagttcaagagcccccaagaatctcctctgtgtgtggccttctccacccctacccttgcagatgggcatcccctcctctggacaccaccccccgccaactgccttattcatacctcttcattcattcatacctttgctatgagactcccttatagatgcgaccacggttttgaatttttgctccaaccctcccagactgtgaggtgggaaccatctctattaatctctagaacctggctcagagccaggcacatagtaggcactcagtgcacatgtgtatgtgacgagtaactccacagacagggatgatctactctaatgttcaacagattaatatttgatttagcactgtgtgtcccttcaaaattctgggggccaagatgagggctgaggtctgagatctctgctggtttgagaatgggacttcctcctaccttcatttgtccttccttttacagaactataagtcagcctcaggtatgggtcagctttatgtagttaaccttccagtcattcaggtttttatctttgagtttattctaatttcattcattcattctcattcattcattcattcattcaaggagagctcactctgtgtcagttctggctgttatggatattgtgatgaacaagacagagaagaatttttgccttcccgagcttccattttagacagcttctatgtagttcctttcccttacacgtaatttagaggtaggaagtttcatgtgggtttgggcaaattattaaacatccctggacctcagcatctccatcttcaaaatgctgtcaccaaaccctctctcaggctggcagtgtgccacccaccacagcttggccttgcatggctggtgcttggtaccaccagttggtttgaatgtgggtgcacgtgcatgtatgagttcattaatttgcttcctttcttctcaggcacttagatttttgatgcacactgagagggtcctttttaatcagctgaggagcaagggattcctgagccacaaatgaggctctccctactggaatgcagaaggaaggacaagagatgagcctttactgagatgctgctatctgctgggcactttacacacacacagttatgccatttagtccacactgtaactggggagggagttgttgcttcctgtgcttctcatatgagaaaactgaggctgagagaggctcaagggctcccataactgaagacccgtgccttcgctgctgccactcaacctctgggtgggggatggggtgctcagtccacgtggaaggaagagagaaatagaatgtcacagagctctctttcaataaagggctcagcaaaatgtttgtcttagccgcgtttcctatcgacccggtgtgtggcacatggattaagtatgcagtttggtggtctttaaaggatgaacattttctctaggatcaataagctgagtgagtttgggtctgaattcatcaaaatgtcacctgaaacaaattcagtatcaggacttctgcgctcaggtcaggtcgatgggtgggggcagagacaaaacccagggaataccaggtctctgggaaaaaggtccagggcatctgttggacaaatttgggtctgataactcagagtggggagggggtcctagctggcaaccagcatcctagaaactaaccgctggcctggtacagtggcttatgcttgtaatcccagcactttgggaggccgaggcaggtggatcacctgaggtcaggagatcgagaccagcctggccaatgtggcgaaaccctgtctctactaaaaatacaaaaaaaaaaaaaaaaaaagattagcggggcgtggtggcaggtgcctgtaaccccagctattcgggaggctgaggcagaagaatggcttgaacccgggaagcggaggttgcagtgagctgagattgtgccactgcactccagcctaggcaacagagtaagactctgtctcaattaaaaaaaaaaaagacactaaccgtcctttctctggtctagacgtcatccttaccttcagagagaatagctgagtgagaagctgtgtgaaactgcccagttctagattcttcgaacaaaaagtgtctttgaggttaatcagtgccattctcacacccagtgctaaaggattctccctttagcaccttggagaagtagtcacactggtttcccttggatcgttctaaagacagggagctcattactttggaagctgtggttttcatttttggagagtttaaataattttagagttcttctatgttgagcttaaatattccctacagccttgcaactttgcctcattagtcccaaatttgcactgtgaggcaacacagaatgagactaatccctcttccacccaactactgagaagtttaacagacaatcttttcttttccaaaataaacaacccttaggatgtttcggtcctgggatgcttgcagcccaggaaatgctccctccctctcccctccagcttctctgcaaatgcaagactctggcttcattccctggtccttcctcagtatctcacaaagaaagaggagggcaaaatgggaattcattggaagagatccttggttcacacgctaggaaagaaaagggatgatcttggtcttggcgtgaacttccacatgaacgtgactccgtgcctacctgctaataagagcgggagtgtggattgtgcacataggtggggacggggtgagaacttggggtgtggcgtgtccctgtgggtggacacattgtgaacagtaagtatcatgaatgtgtgacagcatgtggggcacgtgggtgagcgtgtatgcatgtacacaggctgtctgctcaggtcctgggggagggactcagaatccgcctcacacccatggagagttctcgcaatgggtatggcaaacttcctgaccaacaggcttctggacttctgactcagcaccagtcctgctccttctgtctcaatgactgtcccctgtccctggagatgtaaaagttccaggctctcctaccacacctaggctggacttactgattccaaggtgaaaataagccatcacgtattgaccatctgtcagcaagtatctaccctgcaaaatacttttcacacactctctcacttatcctcaccatgcctagagatgggactttgtctccatgtgacttatgaagacactgaggaccagcaaggcgagacaactgtttgaggccacacagcaacagaaccagacctggatcaaacccaaagcctgtgctctgtccgtgtgctgcctccgagaagccatggccaagaaaggtctttgcaccagagctcaccaatgtctcggagaggtcctcccttcctgccagccattgatgatcctggaggatgaacgggtcgtctaaaacagatgacgctggtgcgggccccagggagttccaccaagagccttaggatttatcatgtgggagggtagttagttcccaaacgcaggtgagtataaaatccaatttcttaaattgcatccagggccaaggggtgcaagctgctctgtcagttatgacttcctcgggtacctgagactgtagctcctcatttcctaaatcctcctgcttgttgtctgagcttttagccctctgatttacttattagatttctactgtgccttttctctgcagagtgctcagtgtccccaggaaccactctctaatttaacgaataacttctctcatgagcaaatggggtccgggttcatgcaagaagccagtggaagaggagaactggggagacagagagtgagaaaaggggcagaaaaaacagggcagggtacaaaggaggcaaatgcacctgtggccctagagtggggagcattgaggttggatggcatttgtatctagagttgcacctggatctggacaatgcttccaggttaccactgctggtaagcaatgtgcccaaccaccctctctgctctcatgaccccctgcctctctccacctctgcgtgatgtttttctgttcgcctgtctgtctccttgaattgtgaggtccttaaaagagggagccaagtcatttttttttttttgaggcagagtcttgctctgtcacccaggctggagtgcagtggcacaatcttggctcactggaagctccacctcctggattcacgccattctcctgcctcagcctcccgagtagctgggactataggcgcccgccaccatgccaagctaattttttgtatttttagtagagacggggtttcaccgtgttagccaggatggtctcgatctcctgacctcgtgatccacccacctctgcctcccaaagtgctgggattacaggcgtgagccaccacacctggcccccagtcatcttttaacacctggcacttgtcactgtgtctggtccacagtaggaatttaacacatacttgctggagaggccagttacggggcacagctgaaagcataaagatgcactgtataacatttcagcccccagaggacccacagttggggagacaaaggatagccaaagacaccatggctgggctggccagggaggtcttcgtggaggaggctggactatactgggccacctagaatgctggggactggtgaaccggacagcaggaggacattctaggaggaggaatggcttgagccaagggttcaggttgcgatgggcaagggggtccctgagtggaaggcaggacctgtgcagggaagtctagaaaggtcagtggaggcataccgtggagggctttgagcacagagggtggagcctggaatttcttctcctgtgatggagcctctagttcgccctggcccagccccatgtgctgtctggcacatttgtgcactgccctcctgcaggagggggcctggcacagtttctgtgcaccctggacaagcagggccacgtgtgggccaggactgctctgccctgtcttctcctctgattcaggaaggaagaacttgccctggactctgtctgtctaaaataacctcccctccccatccccacatggccctacctgttcccggaatttcctgttttttttttttttttcttccttgactttacagtctccgggttgcacttgaatctcaatggcatcatcccctttcagtctttgcatgtgcttcataaagaaatgactcttttgtgcagatccactgcctatggtgaagtaggtgctcatgtaaatgccaggtcctagctctggaaagggttagacagcccttctcaaaccatgcctgcaatgccagtttaaagaacatggaggcaggacagcagccatgggaatgaagggtggcagataaaatcagcgccccagaagctctggggcctcctctcattgattaaattttcaaatataattttgctatagttagtggggggtttagagctggtcacattatattgaatttttttttgagacagagtctcactctgttgcccaggctggagtgcagtggtgcaatctcagctcactgcaacctctacctcctgggttcaagtgattttcccacctcagcctcctgagtaggtggggttacaggcacccgccatcatgcctggctaatttttgtatttttgtagagacagggtttcaccttgttgaccaggctggtcataaactcctgacctcaggtgatctgccctcctcagcctcccaaagtgctgggattataggcgtgagacaccgcgcctggcctatattcaattttaaaactttcatttatttttaaaattgaaactaaaagttgtagatctatttatggtatacaagacattttgataaaagcacacattgtggaatgaatacatcaatgaattaacatatccattacctcacatatgtatcatttttttttgtgcatggtgagaacatttaaaacctattctctgagcaatttccaattataggatacactgttattaactgtaatcaccatgtcctgtaatagacaggagtctcctcttgaaccagggttatgtctcagaaccagagtaggaggagaagcacctcacacacgagaggctctgctgtcctgacgtggcacggaagggaatggaagggacaaggggaaggtgctggaaaggggccagctatgaactgagcacaggtaacagaccacacctgacctcctggatccctagttacacaagggcatgtattcattgttccattccacagatgggaaaacagagactcctggggcttaagcagcctgcccagggtcacacggctatgtgacagaagggctggaacctagatcctcccaccccaaagccaggctcctccctgtgatctggccctggttttgcctgtgtgattcctctggccttactgggtgatactgagccaatcgtggagcctctctgggcttttgtcttctcatctctcaagcgaggggcatactctcaactgagcattctttgcatggcctgtcctctcagtcaggccagaccaggaccagctcctgccattgtgcattgcaaggatgcactgcttgctagtgggcctgagattcaccagtggcaacacagaggtgccttcaccagccttgctaagctctggtttgtgtttctgcctctggtgtttggtatcagaacgcattcccctgatgctgccggaagcaataatccagacacggttcgggggtttagtggaaatcctctgctatagcggaagaaaatgaaacccagtgaagcaaggatttcggcagatgcaaaaatctgcccatttacctccccagtctgaattccacggcagggacagctgagaagcaggcggatggatgaccttagctgcaggtcaggtggggaaggggtgagaactgagttcagaagactggggcttctgcaggtctaaagccccatgaggatgggaggggaaggtcaccgagtatttgcaaacatgttgtaagatcaggattgaccttaattgagtgctgactgttaaaggccagtgcttcgtgcagcaacatattttccttttaagcccttgcaacactgacgtattgaagaagtactaaagaagtattatccttaattatctgatgcactgaagaagtattatccttaattatctgatgcactgaagaagtattatcttaattatctgaggtactgaagaagtattatccttaatattggtatgagggcttagatagcctaagtgacttgcccaaagctacacagtcagtaaatggcagagcacagcagaaatgctcactgctaacagatggacactgctatctgttcttgatactcagaccctcccatctctcccatccacaccagttacccaccatcatggaaacatgtggttccggatgtggacagctggctccccgggccccatacctcctgtgtgctcctggagccttctccatctgacacaccatgtcagatgtggtcctggaccttcctgctatcctcagctcactgtggactgtttctgagccaagggtattgtgtggttaccagggaaaatatgcccccgctctaggcctgccagcagctctagggcaataagccatctttctaaaatgagatttcctatttcagggactctgaaatctccagttctgccaaacagcaggtcttctcctcagcttaggatagctgggatcatggctgaggttgagctggtcacagaccatcccccactgaaccaatgataacaccctgccaagggcctcagcacgagcaccaggagcttctctgttcacatatttacatatcaagatagaaaatgaatatacgaaggagtctagcatgaggaggacgggatgcgctgtggagttagacacacttaggttcaaatcccagcgttgtcacttattaattgtgggaccccgggcaagacatttaactcctctgtgagcctgcttccttctttgtaaaatgcaaagaatgatcccatctacctcgaggagctgctatggggataaaggagagcaagccctcagtacggtgcctggcacgcagcgaggactccctaaatggaggctcctgctgtcacgaccctcgcccggggaaatgcctgtcttctccatttagaaagtgacagctgacggcaggcccgaggcagccaggtagggaggctgcctgtgtgcaacccgctgtggaggctgctggtggctgcaggctttcagaaggcattacaggccattgttttaatcaatactatattatttcctccgcggcaactatccccatgtttattatgtgtaaatagggtttttcaatgatgtgaatgtgttagcttaacgtagctgacattcagcgtgcacaatctggtggctgcccctcaggacttccaggaaaatgagatgatgtatccgtcacaaagccatcctcgtgagtaaaatttgagcagtggcagcagccagggcacccgatgaattctgcaggcgtgggctgcgtgcttgagaaggaaaacagacatcaacatagcctgggagcacagtctgcaggcagtgtggacagttggtgccccggaattagggcgttggcgttcccatctctttgctgccatatctagatcctatacagcttattccaacacctctccattgcctggcgagcgcctgtggatgcactcttctgcctactcctggaacttgtcaaggtttgccctctctgactgtagctcctcactctcctggactctaggatgggcccctttcttccccatacaaagcccccagtagtctgaaaactcatttttgtctatgctcctcagttcagcccaggcatgtgggtatgaccgagcctggctgcaaaggcaggcagaggggagcaaaggtggtctttctcaatgtcccatgtgggcttaactttcctcctcctgtaccagggcactcagagtaacaccaccaatgacactaccagcttctctctggtgtctaactggactgaaggtgaagcaggtggggtgtcatttagatctggggcagagcttccccactgtgacacccttgaagttgcaggccagatgccactaccacacatgggtcactgtcaacgggccacaaccccaatgatgggcacttaactcaataataccagatatcagacaactgtggcttcatctgtagagctctctggagtgcatcataaaggaagtaacctttttcttttttctttgcttttctttttttttttattttgagacagagtctcactctgtcgcccaggctggagtgcagtggcgcaatctcggctcactgcaagctccgcctcccgggtttacgccattctcctgcctcagcctccggagcagctgggactaacaggcgcccgccaccacgcccggctaattttttgtatttttagtagggacggggtttcatcttgttagccaggatggtctcgatctcctgacctcgcgatccgtcagccttggccttccaaagtgctgggattacaggcgtgagccaccgcgcccggcctctttttttttttttttttttttttttttgagatagagtctctgttagccaggctggggtgcaatggtgcaatggcgagatctcggctcactgcaacctctgcctccctgattcaagtgattcttttgccacagcctccccagtagctgggattactggcactcaccaccacgcccggctacattttgtattttcagtagagatgggttttcaacctgcgggccaggctgctctcgaattcctgacctcgtgtgatccgcccgcctcagcctcccaaagtgttggaatcacaggcatgagccaccgcgcccggccaggaattaaccttcaccaggatagtttgtggaattttatcaagaggcttcgctcccatctcctgctttcttaacagagtttggaagcagcggaccggataggaaaactgcttagggttccaccctcatgccaagtggcagaggccccgggggaagcctcctgcggaacgtgggaacaaagggatgcggggcctagcactctacgccggtgtctgttcgtctgtccagaaggcttgtcacactctgggggggcatctagctaaaaggtactccatcaatgtaaacgaccgtcgctctcgttaagttccatctgtgtgtcttaaagctcccgcacggaacgtgattggagttgggcttcagcttccctgtgctgcctgagacagaggagggagatgtttttcttggcaaataaatatgatatcataagccctggcaggattccagcctgagtaatggccgtctgccttcctaattccctcagcagcttggaacaggaacattactctttacttcctctctttaaaaacaaactctctattggagcgcattactcagccacaggatccctccccggacgtggcggcattcagatgatgggaggtgaggaatgagctcagattacagcgcacattagggaaaacacagcaaggcatttggcccagaaaaggcacctgaggaccttgaattagagcggccactcctcatgtgtccttgttcatgaggaacatagagctaaaatcaataaaaatcacattgtttagcgctgccgtttccctggtttaaatcatgaaggagtaagtaggtaattaggtaatccagctcggactggatagttaccttcaagtacgaagcggtcttgctgagaccctctcactgaacgcgagctgggggaagggtctcgtggcctctctactcacaggagcactgctgcctctaagcacataccccgccctctttctgcttgtcattagttcttcctaacaacagttagaggcatcggtgttgttactttccattttataaacccgaggctcagtgagactaattaggtaactcgttcagggccataaattatacatagcagaagtcagagttgaactcgggtcttttggcttcagattcaatgtttacaacgccacatcaagcctcatcactttctctggcctgtgaggacttgggtgctgccacttgtcccttttgaagtagcggatacaaggtggcaccgtgaaggcactgggtcaggagctgggacacagctttgcatcacttgggcactgttctgctggggcctccttggtaaccaaccatccaggtgaggataaaaactgacccagcttgtagagagatcttgaggcaggcatgcagcaagggccctaaaattactgggagaagggcaagtcactgttcgaaggcttgggatggtgaattcagccaataaacgtcctttgaacacttactatggctaagcatgggggcacaactgtaaaccagagagagtccctgcctcagggagctgggagtcagtgggagagatgaataaacaggcaacgacgatgcagtgtgatggatgctccagtggaagagtccagagcaccgggatgatgtgtagggagagccactcaccagacatggcagttcttggaaaatgtccactggggacatgacatccaagctgaaacccgaaggacaaataggggacagggagatgaagacgggggctgcagagcgttccaggctgtggaggcagcgtgtgcaaaggctgggaggtcagaaagaacacactctgctccggtgatggcatgtttggtctggcctggagcagagctgcaggggaagctgtgaggcatgaggcagagaggtaagccaggagtagtttgcagacccctggctgggcagctttccaatctggaacagtgggtcatggagccatcacattcccaaacccacagcgcttccctctcaccaaccctgtagcctgcagtcttcactgtgctctcgactcccccagcctttcattgtatgtggaagaggagccagaaatgcacccaaactgaaagaggagcacgcagcaccaatccctgaatcaaaataaaaatccggctgcactttatctcgctgaaggactgtaatctgggagatattcatttaacatatttctgtctctgaatggcttttacttttcactaaattgaaaccgcagtacaatatatgtgaatgattaggttgtgtaatacattccagcaaatttagattaggaatgattatgacttaagtaaaatagttgaacacaattcttattgccatctatcttttcacttctttttagttttcatgagagtgagtgaatgcaaggaatgaatgactctaaggagagctgggccctggtacagggaggggcagaggtctgtctttggaaggctttaggaagaagggagaggtggactggaagactcagatctagggctcgggggaaagcactgggccatgaggtagattggggacaagtcctatatctgccgtttgctagctgtgtgacctcaggcaagttacttaaactctctagtcttagtttcccatcagcaaaatgggctttattgttccccggctcatggaatcattgtgggacacaatgagatcagggacatgagagtaacactggccaagagctcagatggggagtcaaagtcctgatcaaagtctggctctatcacttattagagctgtgtggccttgccctttgatactcagcttctctgagccccagtttcctaatccacaaaatgggaataagtgtactcagccacaggtatccttgaagagaggcttaaataggatttttttgcatgttaatagtgctttgcaaaatgcaagttacctgggagggctatgctggctgataggggtgggaataggaattggggactcccctttcctgggatagcgacctggaggggtttgggtggagccttgctgcgggccctgaggcagggaggggaaggagaggaggagtccttgccaaaatttccctttggagtcctaagccttgcacgcgccctgggcactccaatcctcctcactccactgctctattttccccatagcattgaacatgctgtaacattctatataatttaccaatttattatgcttttgtttagaatctgtttccctggttcaaaggtaaggcctacaagggcagggagctgtttaatcccctgataaatcccaagcacctagagcacagcttggcagttaggaggcatgctcaggaaatatacgtcaaatgaatggatttatgagtagggctggaattctgtctcctgagaacaagtgagctgaggtgggaagaaggtggcggtggtggggggaccaggggagacgagggcatcagtcactccagcagggagcttgctgcagggagaaagagagaacagcaatttgggccgtgaagcctggcactcattcttcaagggggctgcaagcccccaggattttcctggaacccagggcacccgcacactagctgcctctcccggtcccttccagcaacctgaggaaatgccttccaatcagagcaattactgctgccctggagccgctgcctctccaggtgtctgcctcctgcggctctggctggagacaatatttctcctctgttcatcacgagaacagggacaacaaataacacaatggcagatgaagggccctccaagccctccagagctgaaagagtctgggctgttggcagcgtctgcgtgcaggggaacagaagctacaacctgcgtggggtgtggggatgactgactcttcctggatgggggcactgtggccagctttgtccgggaactgtgctgctcctggtccaggcaggcagggctgtggcagccgccctccgcccgcccaccagcaggcagggactcagggcaccatgggcttgggaaactgagagagagctatgtgtgtcagttgtcttgttaagttttttccccttggtcttaaccatgtaggtactcttgtgttcaaaggaggaaatggaatctcagagaggctgagtcactggtgcatagtaacacagctcatcacacagcagtgctgggataagtgctcccatgtttctgaacccaaagcacatctcgtcgctctggcactgagtgatccgtgacacagatgtacctatagggcgtgagtgcagccccttacctcccagcctcagtttccctactagtgcaccagtcactgaagcttgggaggtgtgtcagtgactcaacccactttatcctgccacctcacctgaccttgctggcatttcatccctgcctcctggggctggggctggatcttgcctagtgccccagctgctggctgaggctctactcagttactcctgaacgctcctctttctactgtgccccatccttaggagcaggggctccctctgaataccagccagggccactgcagcagaacatgccacagtcctttgaaagctgatctcaacaccagtatggatactaactctggctttcattgttgagcatttgttgagctcaaatgtaaacccaggaaccagactctgagggctgcatacctaaccattatacaggcctgcctcttcctcatttgacatggtcttttgaccttaactaccttggttattcgttttgttaataccccctttcaaattgatttctagaactgaacccaaaattccagatgtagcctgatcaagcaaagcccagaagaacatcacctccctctgttttaaaaattgctttgcaattaatgcagtctaagattacacccactttcctgggcccccagctcccagagtcgactcctatggggctcttcagccagccctgtctgcagggctctgccttaaatccctaagtcttctagaaactagctgctgtggcagaccttttgtgtggctgagatctgcaacaccccagcggtccccacctcaagggctgtgtctgccgtggctgcatgcggccctgctgtggctcactgtggacacagcagacgaaagagaacatggtctcagctaagtggggggctggaaggaggagaaatggtctgtgaaggtcactgccactgtacggtgagtgatctgtccccatttcagcctcagtgggagagtgatggagggtgtaattagggcttgagctgtgcctgtgggggctgctgcaccaggctcaaggaggctggggacacagctggtagtctctgccctcctagataccttggtagcgggagccgcccttcttgggaccactcccttgctggccatcccagccaggtcttccatccctgttctccccactccttctctcctcaaaatttgtcctgtatgtctcatttcacccattctcttgaggatttgccttattagaaagtgatctggctgggtgcggtggctcacacctataatcccagcactttgggaggccgctgaggcgggcggatcacttgagcccaggagttcgagaccagcctgggttacacggtaaaattacgtctctactaaaaatacaaaaattagctgggcacggtggtgtgtgcctgtagtcccagctccttgggagtctgaggcaggaggatcgcttgagcccgggtggaggaggttgcagtgagccgttattggaccactgtactccagcctgggtgacagagggagatcctgtctctcccacacctgcaccccaaaagtgatctgattcaaatgctgtattaagatgttaacatctaacgactggctggacgcttgtaaccaggtgtattccacaggtaacaatccttcaccaagagaatcccttaacctaaaggcatacatcccttagggtgaaatcctgtgtgttctggtgggaggtttgtgcaaggttggccccggctggttataacagccagggcattactgcacatgtaacctgcacttcccagtgatgaggaaatggcagctcagagggcttctacatcttgcccaagatctcagacatgctcttcctgtccagccttgtgtataccagccatgctctgccttgcacctggacctgaggtcagctctgggggccccatcagggtggtagtgcttctagaaggatctggctgttcagagaaagctctctgtcctgaaggcctgaactgggtgaggaacaggagcactataaatattgctacaatttcttcatcacctgccatgtcctagatactaagttaggctctttacagctcataccgtgttgtcatacgtatgaccatgctctgttttaccagtaaggaaactgaagttcagaaagtttaagtaacttacacttggccactaagtaggaagtcctggcagggggaaaggcaggcctgagtcagcctgcctttgggccctctcaccacccctggagcccaagcaacataggcctctcatagggccaacagctcccacccctatcacatccttcagggtgcagtgccacggctgggggtcgcttgcctttggactctccagagaggagtccctgggacagctgaggccttgctcacagccctaggtgggccaggaaataacattccagggccttttgtcgagcccctaggatggggacttgcatgtgctgggtgcctatgatgcctcaggccttgttctaggtactttccgaacagttattgtcgtaatccttataacaacaccataacttaatccttataacaacacaatactataaaggtatcattgttccctttatatggatgagaaatactatgtcttaatccctataatactatgtcttattatacaatgctaggtctgaatccttataacaacacagtactataaaggtaccattgttccctttatatggaggagaaaagcaaggccaagggaagtctaaagttacatagctaagaaagtggaaggagctgagatctgacagtttccagcgattccaaactcaggctctttctcctacaccctgtagcttctccaagaagattggggtctaaaggggcagagctttctccaggagcttctggtccattgagggagatggaatacatcaggatggaaaggaccatggcaaaaaacccacacagtacactctgcatgcctgctgtgcgggaaacagcgcgcctggggccagagggaagggaggagggagccagggtggggagcccaggaggcacatcaggggaggccttggggaagacgtgagtttagcaccagtcgcaggtaaggcctttttctgtgtgctctgggaagagaaagctattgagctgggtgtggtcacagcagggaagggctgggagcaagacactctcagctcaggcagaaaaggcctgttgttgagagaaccgatgcaggctgccgctgggagcagagggctgggcgtggcgtacctttctttcctgtgagggggctaggagctggctggggtgggagggctgaggggagcaggcacatggtccagccacgttaggaggcttgcacaaagggcttctaggcctgaagcctccagctcccaccccgtcagccgacttgcagattgtctgaatgggtctccaataggaaaaaagccagggctttggagaaacagatgcttaccacggaaccaggatgctgtcgtctgcaggtcacccctgtgtggatacagaccgtgggccaggaggctcttcagagcagttctcccacagctcatcctgtaattgactgactcatcggtcactgcttgcgcgctcagccattgttaactggtgacttgaaaattacctttatttagcaccgttatcgggaggcttcaggggcgccagcatttccacgccaccagctctctctggctgatggcagcaagcagcctcatcacactgtccccagctctaagccacagccactccctacccactgtggggaccagggaggggccctcgtgctaagtggatgcagtaggcaggccagtacctcccaacctgctgtgaccccctctgggtacaggtgggcaatgaacacccggctggacctgtggcctgctgtctgttctcctctgacttgcttgtctgctgatcatttctccatagccacgttgccctgtatgcatgagacaatctggaatgggggtcatccatggggtctgggcctgcacggagtggaattaattgcagaacttgtgcaattccttaattctgagtgaacgtgcatataagccttagggagagagaacattcatagcttttagtagattctcaagaggatttgtgagccctaggaagctgggaagccaggttctgagtcatggttctcagatcacccctccaggaagctgctcaggttagcccattgcaccgttgccatcactgcgagactcagggggtccagtggtgcaatacaactgtccccctccacccagagggcaaggccaggtctgtactctgctcagtggtggatgcagatgacaaatcacaaagagagaacaaagagatgacatttgcagaaactcctgcctttcactttctgctttattggggaaaagaaatcacatccccaggctcccttccctctgtccattggcacagtgtatcctcctcccatcctccacccctccctcctggtcacaggttctgccctgagatctgaagtaagctgtgggactcatctacctggagaagaaggcaggcagaagaggaagggagggaaggatggaggagctggtgaaaactaacagtaaggtgaagggtagggctgggggctgggtcggagccacaggattcatggcgtactgtgatttttttgttgttgctatggtcctttctacctggatgaattccatctccctcattggaccagaagctcctcgaggaaactctgcgccctttagactccaatcttcttggagaagctacagggtgtaggagaaagaacatgagtttggaatcgctggaaactgtcaaatctcagctccttccacttttttcgctgtgtaactttagaattcctttagcctcgtttttccttctttctttccacatagcatggggccttcaactgctggagggtctgggcggtcatttatccttgctgggcctcagaggcctcatgagtggtgcctttaagagtgcaatgaggccgcagcagaaactatctctaaggccagctcttaaattctctaacccatgctcctggccaactctcctctgtccagccgcaggtcctcatagaaaggcagagacactgaatagaacatagaaggggttgttttcctaaagctcatataaaattctgaagcctcagcgatggaacctgcatttgggagctgctcgatcttttctgttagcatttccgccacgtgcttctcagcgttttgccccagttggccttccgcccctgggagggggaacaatgtctcctggtgaaagtcactttgcagctgccctgggccctcggaccctcaggggccttctgggttgtgaggcgtggggcaccccgtcctgagcgtgccctgaagatgggcacagagctcccccagctgccgtggcactgtttccatgcagctgtggggatggtgacaaggcctgagggctgtcagcccggctgagagcactcaagagccacttcaccggccttcttttctctttccaaggctcttaacccacttgtggagggggtggcgggtgaggggctgaagagggtggatgtccactttgggcagacaaaggagctgcagtcagcctcctctccagcctggctctggagaaatgcagtcagcctcccctccagcctggctccagagatccggagctgagggcagtgtaggagctggcagggcccttggcaaagtggagcccagcaggctagttgtcccaggtttatcgcccaggattggggggctctgtgtggctcctgtcttagctgatgactcagatcttggactatttctcccttatcaaggtcttcctcatcctaaacttggccttgatttgagcctctttagtttaccaagtgtttacctgaattatctcatttaatttcacagcaaccggtaagggatgcattgtgagcatcatcttactgaggactcagtggctatgactcaggactgtgtcctttgcctaaggaaggccacacagctagtcagtggcagagataggactagaatgagttctttttctcccagggagacccagtggccagaaggcacctgcagccaggccacaccgcccccttaggagcgatgggggacagcaagaactgacaagccctgatggcatacaaagcctccaggtgaccagcagtgacagacgccagccaggacatcctttccagaaccttctctagctctgctggcataagcagcacctggttttcaaaggctttctttggtgtgtgtctatggtcataaagaattgtaataaacaatgattaagggtcacaatataggctggtgctgtgtttcctcccttaggagcagaggaaagtggttgaggtctccaagcaggtggggagcccttggcccctaggaaggcaggaaagtctcccaggataaatctgtctgttctaggctctggtgaacccaacggaaagccctacgagcctggctggtggctgagctgccttctccataggctgttcaccaatctcgagagtcacctgccatgaagtcccaggagttctgacatccagtgttcatgcccatggagcaaccaacaagaatgttctgttcactgccgcatccttagatctaacacagcacctggcatatggtagatgttgagtacattgtcaaacaaacgtaagtgaaaggaaacctacaagatcatcatctgcagataagtcacaaattattagccctatttttagaggtggtagtgaggcccagagaggtaaagtaacatgcccaatgtcacacagccagttagtgagggaagtgccagactctaggtctcctttcactatactctgtcccttctgaaggggggaaggtaggaatgtgatgacctcggccccagggccaagatatgttcttgccatgtttcttagctgcattgagttgacagtgatctgatgtggctaggtaatgaagagatggtttttctctgggaagtgactctgctccctgacttctggcaggcatgcgggagtggggaggaggtatctctgtgtggagctctacattctgtcttaggagcacaaagctcttcacagctcacctacgcatcttgagcccagctttcttcttccaggaagggggaatgaaagcaactattaataaggtaataagaactgaatcaaccatccagcctggtcttccagaagagtttgatggcctctagccttgggcaagagagacagagcccgggctgcagtttcctggcctaaaggatgagtgtctgcagatccatctaccagtttctagaatctttaaagcagcaggaggaagcaggatggggcattatatgggctctagtctctttacaaagtcattcagaggaaaacagggacctaggagaattttggagtgtggtagccagacagacctctcagaaattcccttgatttacactagccatcaccaaaatccctgtgtctccattctctccctttggagggccgttcccagcacgagttacccagaactacccacccaatcagagcccttggctctctgtggcagggggccctctctggtcaagagcagcctcgctggtcctggagcctgggccagagcccgcctgtcactctgcagctccgcaatgtcgggacaccaaagggcagtgccagtagcccgctgcaagctgacaaggctgagttcacatcagtgctgaggagtcgacaggaccatctgaattaagtggccaagtttagtttttaattaagtccccgtggtcttttaaaaaggtcactgacgacaccatcttctttaaggccaatatgaaaagacattcaaagtcaaagttctgagatgggagccttgtaacttgaaatgtcacaggaagaaatttggaaacagggaaagaggaagctggtgggaaggacaaccctgtcacattcttttgccgtcagcttcacagttcccacttggagctccaaactatttcggtctcaaagggcaagtggtcccaaggttctctcgagtgccttccccgacagaggattgtggagcctcttgtttgctgtgccagtgaaaaacagagcccttgtggtccctgacacggaataaaagttgatagcaatggggcagaatgtggcaacttacccctgatggctgaggaattaacaaaaatgtatgcaattggtcaccatcctctgcacccattcctgtcttcacttttctacctaccttgatcagtactgtatcatttggaagtacagttctgtctaaaacagagcacagcagccacttaagtcacccatagcatcctatgaggattgtacagtgagagcaaagacctgtgcctggcttagacccctaagagaagtagagacttgaggtaatttgagcagagtggaccacacctcctagagaagagatttggaccagccaatagctaatgagcaggcgcaagaatattttcctggagttcttggctcacgccaatgtctgaagagcgggactttctgagtggtgaagcgttcagtgactttgctagggtcagaggggttggaagtgctcagtagtgtgtgtcacattttgttcatgtttgcaataggccatgtaggaagtggaaagaattttggatttagattcaggaaatttgggtcttggggcaaagagtgctatttgcctacctagtatacattctcccatttatttaccattacagtactttcattgttggtgtggcaggttacccaagttaaccaaatatggatttcctagccttccttaagaagctagaggtgattgatgcgaatattcagagatcactggtaggcttctttaaagatggctgattcacctgggaggtgcacctcttttgtcctttcctcttgtttcttcttcctgcctgaaatgtggggctgatgactggagcttcagcagccattttatgaccatgaggtatgacccaagaatggaagccagtgctaaggatgggctgcccatctactcctggtcttcattttatgtgagagaaaagcaaacccctaatttgcttatgccacttactttggatctctgctacacccagttgaatgccaaactgatacacattgattgcccactctgtcattcactcctgagggactttgggcaagtcacttaatttttctgggcttcggtttccttacctctgcagtgggaataataattctggctttgtcttgcaagcgttacttctgacctgtagggctcactcttaggcttcctagaatgttctcaaccccagtctgaagatcacgtggtttttgtgcctgagcagtggctgcctccctcccattgtttggccagataattgttcccaaactaagaaatgtgcctgccttccgacttcaatggctgttataaagtccccttgtgggctcccattttctagagacacaatagcttttcctggcttgcccaggcctcacccctccttgctgggtgcagagacatctgctgtttcaagctgctaaaagagaagcttcaaagaaccccacattggcccctcttagggctctgactcatataaatgtttctagaaatcctcaaaagccttattaatctgttaagacatcccagaagcaggagtctgcacacccaatttccacggcttttcagctgcttccattgtctcagccgcattgtccctgctcggtgtcttggcccctaatggactctctctgaggcaggcacgctttcggctgcacctgctattccattgcctgactcttttcttcttcttctctgttctctttaactcttaaaatgaaaaggtgaccagctcttcctgggctgtttactcctctagctcccctgtgcgggtctctgcttcaccccctttctcttctggcatgtggctggatctgagtcagagacatagaggcccacatagaaagtaggggcccatttgtcttttccatcaaatggaagcctctaggggtctgtcattcctcatgcctagccaagataccgggtatccccacaagcctctgaaggggacctgcttacagctcttgcatatagaagctctaatcaggcttctccaggaactccctcatctctggtccatacagtaatgaccctctgatgtgtaaccttcactgtggttgaagggccctggagaaagagccagaagaccagggctctgttcctgacttgaccccagctggtttctattttcttagactagcatcaggggacttaacttgacagccaaggtcccatggtgggcagcttgccaattactcctgcctcctggttttcagacccctgtgtgctcccttcccttgagtatgggctagacctggtgacttgcttctaaccaatagaacacagcgagagtgatgggctatcacctctctagttaagttataaaagactagtttgcgtgttctgtcctgttggctctctctttttctctctgtctctccttctcagatgcttgctttgatgaagaaagctgctatattggagaggcccatgtggcaagaacttgagtgtagcctgtagccagtatccagtgggcaaatgaggctctcaatccaacagcctacaaggaattgaatccaactgacaagcatgtgagtgagcttggaagccaaccctgccccaggtaagccttgagatggtaaagccctgacttacatcttgattgcagccttgggagagaccttgaagcagagggcccatctaagctgtgcccagattcttgacccacatatatttagaggtaataaatgtctattgtcttaaactgctaattttaatacagcaagaaataactaatctaggtccttattagctaagaagaaatgtgtttcttgccttgttcctctgtatttaaactctaggtccttaaacctttcatacccacgagctagccacttgggttgtgcatgtgcaccacccaactccaccaaccaccccactccaacactcaaatctatgggtggtgcaaatccctttactcttactccaaacatacatgatcagaaaaaatggaagaaagacatagctgaaatagagctccaacgagatgattcctggtttctactaggaatataagtaaaatttgaatttttgccagaatccaaagtattcaaggaagggctccttatacacctttgatcattcacttccatgtctcatctttcaaagcttggcttaaactttcctcctctgggaaaaaagaccctgacttcttcagttagggttactgttccctctcccagtcacccatcagttttgtccatatcagagcattctattttagttatttgcatattcccttctctctctcacccctccacggatctcctaccccaggaaggtcagcatccagtgaccttttcaggaaattacccaggatttcacaatcttagtcagaagcgaaatttaaaaccctttgtcccccgtcctcccagccccccgatgttccaggaagccaaagcacagagcaatctttccaatctaggaagcaataaagaaatgtatttatgaaccagcctctatctaagggagagaatttatgtctcttcatgctcttgttgacaataataactgattgctgcatcaatgtgatgcaatataattttaaaaccctccagaacaaggatcagaaaacaactggcagagagactgagcggcagccgtgggcatcttgggttttgcagctcagccctgggcctgctaatgccctgaggcgatgggaacacagctctgggagcacctgcaatctcatcttgtttctttccaagcaccagggaagaaaagcaatttgtttgctctcatactctaaagatgaacttcccgtgctcaatcaaacgttattatcccaatgtaagtcaatttacctttgaatttgaaggctattttcttcctaaatggctaattatgggagatagatggctgtaaacagaagtcttctacctcaacactccgccaggttttctccttatggcacctgagagaaccagagaaaggaggcctcacagtgtcctggccccctctgcccacttgccgcccctcctccattcttctcatgcatcctgcggtgccattcgcccaccccgcctacattcctggacacctatttggagtttcatccccctgaattccatcccctgccgcgtccatttctaggagctccattccctcgtgccatctcccgtttttaaggactggactaaaggtggaggtcttggcctgagaaccgtgcatacgggacagcatgagttttaggagacaaggggtcctgtgtgtgtttgagatgaaacaaggtcacctgaggccgcctctttgatttgcctgacagagtcacagaagctgaccgctgcgaggcaggggctgcggccttttcccgtggcatgatcaacacctcgcaggaactaattgaatggccgagtttgtttactgagaggaggagtagccccctcctttctcgcaaaacaaagtctttccccaggagcggtggcaaagaggtcagccctggcagcgtttctgttttgccttttgatgaaagcctactctggctgctctgaagaagggagctcattgtgtgctcactgtcagaggtggctccagcagggaggccacagccctgggggctttttgggtcttggggttatggagcctgtggtgtgtggggttatctacagggactgagctttctagctcttctcccagaagtctggcctctggtcctctgccctttccacctgggccccagaagccatagtaatagcaacctgcctttgtccggtgcctcgtcgtcgtttatgcaagtctatatactttatctcacttgatcctcacaaccatcctgtgctgtcatcctcccctgacagatgagggagaggcccagagaggtcaagtgctctgcctgaggtcacacagctaggaagtgacataactgggacctgcctccctttggcttgaacgcctctgatctctcccgtctgtcacagtcccatcacagaaaggcaggcatgtggccccgtggttgaagccctgccccagctgtggatccgcatcacctgggccaggcttccaatttatgatacttactgagaccttggcaccacggccttgataaacccctctgccctgggcttgagcttgctgttctgtcgggggcagttcgcggggctgggaggacaggtaagaagggaggagcttttcatgagctgctctggaaaagtttaaggccatggtagggtcagctcaggaaagcacagcagggcaaggggcaggtaggcctgtccaactcagctaatagctacagaggtctcaagaagtaatgattggaggcctgactgaggcatagagaccaataggagacgctctctctcctagctcagaccaaggaaccctagaacatgctcctccaagttcacccaccgtcaccctgcaggggaggggtctgccacactccaaaaaagaatcaatccactgtgtgttctgtggactgttatttagagatgcccctacagattcctggagctgctgggccccatgccagggcaaggatcccaggactccctgtttagcatagtactttgattaaaacaataaattcccattgaataccgatgggcaggcaagtgggggctcatgccagcctcggtgccctcctggcatcatctcacagcaactcgtttggggagaaatacctccctccgctgtgatgagaaccctcattcccaatgaatgagggggcagaagctgcctgggagcctcaggaatgagggcatcatgggcaggacagggtaggactggggcagctgcagatggcaccaaggatatgggggccttgactaagcagggagggccacagaaggggagagggggcacacagaaacctcaatggctggcccctgtctggtcctcacctcctgaccctgtctctgcagacatgctgaactgggaggaacatgcttgggtcttggccccctgagcagctgtgctggagccacgcctcagtgcccagcgctgctgcatctgctctctggcagcacatggctgcatgtttctctgggccctgcctggtgcgcagcagccatatcctgggcaggtgtgctggggctgttgcctcacctggccctgggatgctggtagctccggattgaccagggtttctgatgggaagggatgtatgggagaagccagggagtggagagagaactcgtgttccccgatacaaggctttttacccatgtctccccaaatagccccccctcctcccactagccccgaggctggagatcaacatcatggtcccatctttaagaggaaccaggatctgttttgagatggccaatcagccaaagaatgccataattcacgttatccattcacttttcagttgacttccttccttccttcctgctttcctttcttccttttatccttcctccctcccttctatccattcagtaatatttactgataatccttcacatgaggcccgatgctaggctgtggaaatcaaagatgaataagcaatagcctctgtccttgtgctatctcctccgggtgtccagtattatgaccactgtatttctgaaccgaaaacgaggacgcagagctgacaggggtgagtgtacacgtgggaatgggcaggaagaccaccctgaaggtctgaggcattctgttcctaagctaggatgaaactgagtattccatacatactggctgcattgcatttttgtctagcattctttaataagaacagtaagagctgccatttgttgaacatgtaccatgtgccaggcttgtacaagataatgtgtataccatatctcatttagtcttcaccacagccctacagagaaattcactgtccagacagggaaactgaggaccaggccgttcgcagttagtgttagtacagtccttcttggccactctaaatcctctgctgcctctacagctggagggttctgatccgttggcttacaggtgtgtcctgtgggccacatgggggtgggtgggtgttcacagcacactgcctggagccatggtgcacacagcagggggtctgaggctgcgcagaatggcccacttctaaacaagcgtgtctgagctttgccaggtgtccatgtttggaacacaataaaagaggaggtcttcgaaaggaggtgactcagagaagcaacgctagactcaccccagagctgcaacctgctaacttcacagagcctcacagcagaattatttaaccccaagccccctctcctcatggggacaaaagagaaatcaggctgatgctatctccctcatagcacacttaggaggagcaaatgaaacggcatatgtaaaagtgcattgtaaattgcaaagtggcagatgagattattattactgcttccttcacctcaacaaagacccataatcacagacaatgcatcgagcctggtgagggtgtggcctttcttggccctgccctttctccttggctcctcccacgctcttggcttttctcctggattccctgctctcccatctgcagcaggttggggccccatggataactatatctagggaccgactcctgggatcttaccaagtcacatttgcagttggtgcctccttagtcactgccaggattccaggcaggtataatgtgctgcacttaatgtagaggatcagggtcccagtgagcagcttcatcttcaggcgtcgggagtgggagcaatggagcacccatggtctccaggtctcaggccacttgggtctgggatttgaggctcagggggaggagtcctgcggtgactgctgtgaagtggtgtgggggctcaggatgggacctacttcatgggacatgatggatgagactcaggatgccaggagggaggcacagcccacacttagcagcttggcgcacgcaaataggagctctgctcacagcctgtgctgggcacttcatttcccagagacaaccggcgcgttttaataatgtctacttgggttaatgaaagttgtcggtttcacttaataaatacattgccattcttggccacacatatccgtcatgctgggcctggagctgtgcgtcccgcctgagttgagtagggatgctgggagtgggaatggggtggggaaagcatggggcatatgggtagagagtgaggtctggagggcatgggacatggtccctcttgggagttaagcagagggagtcctctcattgcatctttcctctgggatcaaattagaggcacaaagggcagaagggaaccttggaggttcctcctgttcattctctgcctcagggaagtgacacacagaatggcccctttggcagggagcagtgagccatagtgtggtccagagggacgcaggccatcttgggaaggaatcccagttgaccactcattatctctgtaactaagtcaattattcaatctccctgagcctccatttcttcagtaaaatggagctaataatcatatttgcttcatagagcctgtttcgagcattccagcataagccatgggaagctcttagcaggcacccagcatctaaagcactcaaatcagagtcactagtattattaatgttaaaatattatttttatgaaggcacagtttagtatggtgtttatgagagtggatctggagtgtgggtttggatttcgggtgtatcacttactagctgtgtcactctggagaatttatgtagtctttctgtgtttcagtttccaagtctgtaaaatacggggaaataatacctaactcatggagttgtgaggagtgagcagattatgacatgtacatcctttggaacacagacccaataaatgttaagaattattaagttgtcgatttcacagggccatgggggagggaagtccgggctctctgggaactgccttccacatttccccaccttagggtggtctccagaccacatcccagatgaccttacacaccccaggggttgataccaggccgagaccctcgacattccagggagggaaccggaggactccagtcagtttccaagctgcataacttggttcaaggttggcagtgaggggagagacccaggggagggatcatgcttaacattcttgggacattctccttgaactctgcaggggccttaaaacatccctaagtgccatacctctacatgctggccttcttctgcactctttttttctttctttaaaagcttagactgattaaagatgggaagggatttggggggtcaagggaggactctggatgggaaaggggagaagctcagatgatgggaaggggcgggggtggccaggcagtgctttctagctgaagtaagcagctttggaacctgcctatcacatggccgggtattccagggtttttaaattgcatgccacatgtttatccttattaagcagttgttctcttccaaggggctctctctggcagccaagaaccaaccacagggcttgtcgtggggcttatgagtagctagggcctcccaggaggtcgtcagagtggatggaggggcaaagccaggaaaatacctgggggcttccactccctaaacccagggaaacgatggagtagctgagccgagattggctcacctccttgtacaggaagaaaaactgcggccagaggggcaaggcgaggaagtcgccataacacatttggtgtggttttgggcagacagaacgggtttcttatggctggggctgctttctaatgtgaatatgagtactcttggctgggagaggaagggctggaggagagatcaggaaggagagatccacatctggctccgagctgactctcggtgaccatgaccacctccttccactggagggagcagcctctccgcaggtggggctgtccctcaggagcaggaactgggctcccgctggagagaagcagcactccacgttcaaagaccattattgccattattaattgatcgctgttattatcatgtaggcattaagtggcttcctctgccctttgagttgtaacacttagggcagctgctagcgaggacaaaacaaagcttccctactgcaagagctttatctgggtccctgctgctgtgtggccttctgcaattagccattttacagatggagaaacttagtcctaatgatttgctgaagggccgagttgcttagccctgcagggtacacagatgaatagggagcgttgctgagcacttgcaatcaagacagagttgccacccactgcaaggacgaacatcactactgggtcagctctgcagctgcaagtctggggaaaagggatccacccaggcactagggcaactgctcagccccatcgcagcaagggcccgaggaacgagcacgtcagctgtctccagggcctttctcatcatctcccgtgcctgccgtgctgtctcttaccaacccaggagggagggttggtggctgctgctccatcctcaccctttagaccaccccacaggtgggacagggtgggcccaggtggagtctgagctgggtgccaattccaggaatgcagctggaggtgggggcgggccatggtgggccaggacaggtgggagagaaaagcaggaggcagctgaagggggcggtctcagaagcccccgctgggagcctcctatccacctggcaggcgtttggaacaacgtgctgaataacagcagcatttgtgaaatctaattagtgcaggcccaacttctgacttccagtgcgggggctcctcctctagccccaggctatcgagctgaattaagctgcctaagatcacctcattaaattcactaaccttgcttttccaccacgtttagcccctggtgcccttcctctgtctgtgggaggtgcgcgtctggcattcctccagtgcgttcccaggcaggtgttttgagaaactcccctcctcttccctcctctcccctccccaaatggctcccttaatcacgagctgctttcttctgagctcaataatcaccctggactaatccatacacaaaatcctgtggctgcagtaggagcccccttcccagccctccctggctaagggatggtggtcccagaggcactgaggactcctcctggaggcaggcagggggctgtccagaggcagagcattgggcctgctggcaaactgctaactggcacaggtgacttgcatttcctggggcctaactgctgggagtgcacttctggagtggagatgggcaatggggatgcctgatgagacctatgtccaggacaggaggggaggggatggagaagcagctctggagcccagcttgctgttagccctgagaaacaagtgacttcctgtgggtcagagtacagggtgggtagcagaaacaatcaggccagaggggtatttgttgcagaagagaaatgtgatgcaattagtatgctaggagaatggaaaactaacccggagacagggctaaagttactgcccactcaactctgcatggaattgtgctgaattgaggagcactgcagcgagacctgaccaccgcccagcccaggttgggtttgttttccccgctctgagaccggacctcaggaaaggggtgcggggaaggttgggttcagaaggagagactctccagccacacctgtgaagctccaggcagtttccctaatgtctctccttagcctcttgcagagagggctaatgtatgtcttccccccgggctggtggctgggttaattggaccttgtttatgtagcatctattatttatgatttcctttcgtctctcctgagtatgacaactgtggttaagcaaccagagttattcctgcctcgggacatgtatgaggacggtctcctttgcagcctacctgaagtgaatgtgaggccgagaggcttcgtgaaaggttaagtgggtgggggacctgctgggagagaggggcaggggaatgtgcctgagatcagacagccttgcactaagctcagctcctttctggggggacctccgatgcatgctcacttgtataaaatctaactggaactgggatcgtgttctgggggttccgaactttggctgcatattggaattatctgagatgtctgaaaaacctgacaaccagagattccagattaatcggtatgggggtgtggctacaaggtttcagagctccccagtattctaatatacagcaaaagttgagagccactcgcagctccagcacattcttactgtgtcagtttttttctgttgattatgaacaacagcagctaacattaatagaacctgatgatgcgataggcacagagataagaattttatgtggatgacttcaacgaatcctcagaacaacccaatgttgttggaaggtgcaatgatcatcttccttttacagatgaagaaactgaggctcagggaggttaagtaaatgaggccgaagtcacacattgtttcagttacaaagttaggcctgacctgactccaaaatctgtgctgttaacttttttttttttgagacagaattttgccctttcacccagactggagtgcagcagcaagatctcggctcactgcaaccttcgcctcccaggttcaagcgattctcctgcctcagcctgccgagtggctgggattacaggcatgcaccaccgcgcctggctaatttttgtatttttaatagagatgggggtttcggcatgttcgtcaggctggtcttgaactcctggtctcaaacaatctgtctgccttggcctcccaaattgctgggattacaggcatgagcctgcttgtctgaactgtaagaggattttaacagtttcccaagcaatgcttcatattcacaaatgaacacattaggctcaaggacagaagggacatacttaggatgatagactaacctggcccagcctgcaacctcatgggaatgtgggataatgagagagaatgtttgcattggaggtctgtgggcgtagagcactcaacaaatgccaggcactggggctataatcacatggggagaaggagccaaccgtgcatgtctgaagcaggtattctcttccctgcaggtgccaggactacagacagggcaacggagagcaggggcttgctggagaaatccatccttccctgggatctcttggagggctctccatctctcttagagcagtttctttcttagacagttgaagctgcctcagtggtctccccagatcatgcaggtcggggcagaagcttctcactcagagaactgagaatatcatttttcacagaagtctaaggtggaatttagaccaagatattcttggccttagcagtttgactcgggcgggggtttgaagctggaacttttcaacatacatctccaagcttcaggaggaagctagacacatctgaaagcctctgaacaacctgcgatgaagattcttgaaaaaagagaccatttgccttaggggctaagagtacaggtgcaagagacagaccgcccacattaaaatctgactccactcctgagctgtgtgactttgggaaagttcctcaactgaagtcacaaagacctaatctgggaggtgggaatagtcatagaaaaaggatcgtggggaaatgaaacgagagaatacatgtaacgttcttggctcacagcgcccggtgaatgttagctgctattactgttgttcctaccaccgcaccctctcccattcctttccttctcaattctattgacatttttggtgtctaactccttttgagagatcatgacttttgtagaactaggctgctttcactctttgagggtggtctttctgattgatccatcggtctgcattctccttgccgtccttggtatgcacacacatgcatggaagctatattcctccttcatactggactttgaggacaacgttttcatgtttcacatttcccacttcatctcctttgttttccacttgcttagtttcctactcttccctttatcctgaggtgtcgtgagggcaatggcctgcagagtccaaaggtggctgtcatgtcatttgtccacgtttgcattcccgtgccctccccacagatggctgctctctgggctgcacgcacgttgggttcactgatcgcagagtctttttctggctgccaagaacatggtagcctcccagaggctgttggcatgtggatgctgcctctgtgatccacagccccgccaggctgatgcttcaggaatggatcacaccttggctggacccatcaggctggaacaccagattcttaatcaactgtaggtgctactgtcgctctaggacctgccgatgccctctgtccttctctggtgactttgtccacgtggatcttcagttccttcaacatgtgtgcttgttgccccttggagcccacctcctcaagcaagcctcccagcccagtcagcccctgtgcactctcatgttacctgtgcatctccttcacaactcacgtcactgatggacttacgcagttgggtgtgtatttggtaacctgtcttcctcctgctgaaatatcaactccaagagggcaaggagtgtgtctatttgttcactacagtattatatgaacacccctggcatataataagtgctccctcagaatttgagtattatatggacacccttggcatataataaatgctccctcagaatttgagtattatatggacacccttggcatataataaatgctccctcagaatttgagtattatatggacacccctggcatagaataaatgctccctcagtatttgaataaataaatgtggtgtcaatttggattaattttcttgatctcatacttgtgttctctatgcatcctatcacctggctctgctactaactgtctcatgaacttggaagctttaggggttagtcttttttaagtacattcgttaaaaaagagatgttgttcatataacataacattttcccctttaaaatagacagttcagtagttttaagtatatttacaacattttgcaaccatggccatgacctcattttggaacaatttcatcgcccccaaaataaaccccacacccatcactccccatttctgtccccgtcggtagccattaacccactttctgcctctgtggatttacctatactggacactcctacaacatgtggccttttgtgtccgtctcctttcacgtaacaaaatgctttcaaggttccatcccagttgccacatgcatcagtactttattcctttgtatgggtgagtaacattccatggcatagctataagcgcattttgtccattcatcatctgctagacatttgggctgtttccacttttcggctattgtgaatactgctgctatgaacatctgtgtaaagtttttgtgtgaacgtatgttttcagtactcttgggtatatacttagaagtgggatcactgggtcatatggtaactctatgtttaatttttgcagaaccgccaaactgctttctgaggagtttttatttgacttttttaaatgaaaggccaatttagtgtccacccccttacatttaaatttttatttgataaagaactcctttagaaacatattaaaaaccatggaatctccagataaatgcatatgtgtgaatatacatcatttcaggggtcccagaaccatcagaaactggctgtggatcccaaagttcgtgattacaggctcgcacgcagcagtgttttaaggttagatgattttctccaacacagaactccagctacagttttggctttttcacacggatattggagatggataatttggctaatgagttctaatccatgttctgatttgcatctgggatcagaacattcagcagccatttagttgccttaattttttccacccactctgcaatcatttgattgatgtgcaattacctccccctgcttggacacgtgctttcccctgctcatgtgtgtcatccaatgcctgataaccttcattttttcccatttattttgtgtgtgttggccactgtttgatataattatttttgtaatcatcttctattaggtgaaagaatattgcagtagagaaagaaggaaaaagaaaataaatgccttcctgacaagttctaatattttatgttcacaaatctcccaatatcagagcaataatattattttctcgatgtgcatttattaaaatgtaaagtagctccatcacattgggaacgaaaacccttgcattaccttggccagaaaatatcacttatttatttcagattgcatttctggaatgttaatactgttgctttttttttttttttttttttgatttttttccccatagcctttatctagcaggggagtgaacctgaaggtctgatttctaaacaggccttgctgaatgcacaggaccttaatttggttttaagaattgcttttggctcttgatttatgatgaggttcttttctgtgtaattcttttggctgaaaactgaatagagttctccctttgtgggtggcgttttgacatcacattttaagacagggtacagatgtaagtggggagtagggaagatttataaaagagaagggggattaacatgtgcgctttaagggttggaaaagttcgatctattgtcgatttctctatggtatcaatggcataccccttagattccagttcctaagtcagaatgttaatttccaggtagcctagtaaaagagatactagattggaagtcagaagccaggagttctaatcctatttttccctctaagtaggtttgtgaccttggacaactcacttccattctttgcgctgttttctcaagtgcaaaaggaaaggttgaactaagatggatgggttttaatcttagctgcgtattagaatgccctggagagctttgaaaactacagtgatactcaggcccttagatcaattaaatcagactttctcatgagggtgcatggacctgggcattggtgtctctactaaacactgcccaggtggttctatcatcaagccagagatgaggacccctggtgcaggtgatctcagatgttcctccagatttctggttcctcagtgttatgagctgggcagtgatgtcagtccagccaaggctggtgagatgtatttgcagacaagtgggccgcaatcacaggattgtgattctgtgctggggttcgaggtgtctccgctgggagactctggggagatcctgaatggaattgaatttctcttagtatcaggtctgggttggggcaggtaaatcttcctttctttgtgggctcatggtgctgagaagatggatgagctggggccggtaaaatagctttgttccttggagaaagtcatgtagagagataaggtaggcttattatttttcgagtggaactgggactgtttagcctagaaaaggggggacttggggagaggcgtgatttgcggtcttcaagaggctgaaaggctgtcatgtggaagagggattggagtgatttgagatgctctggggggctgaactcaggtctgtgggtagagagtcagggaaagacattttggtgcattatgaggaagaattgtaatgtagagctgtgcttcatattccccgtgcatacctctgcctcagcacctgcttttatgacagtcttctctacaatgagacgacatctttctcatctctgtattctcagcacctaatccagttcctggcacagtcctcaataaatgtttattgtcattcctgtgattattaattactgtcatgaatgcccactatgcagatcacttttcttgctttatcttgtttaactctcctaatgctttagaagtaagtatatttattaccccactctacagttaaggaaaccagagctttgggaggttaaggaatgggcaaaatcacagccagtaggtagcagaggctggatgtgaaattaggtctgtctgactcaaaaacctgtgttcctaaccatcctgcccaccaggatcctggaggtattcaagctgaagatagacaaccacttgggggacctagttgtgccatggcaataagtatggattgagttaggacagtcccagatgatgatggagccaggagctgagtagatttttagagtctgaggtcacccagttactgctctatcagccacctaccccacattcctccagtgaggtgttggcccggtccagaggcagagccttactacctttggctacataggctctgggatggcagtgctctctcagcagttatggtcttttccaggtaataagtattgcggcctcctctgccacttgcctgcattaagccttttggtcatatgtctggggagcagacttctttgtatgcccccggggacaggacaggatggagggaggagccctgggtgtgtgtgtgtggggtgcgtgggtggggagatgcatgactgctttggttatgaaacattgtgttagtgtgtccgttcacttcacatagacacagtgattgcattactacgcggccgagcatacgtggcagagggtggaagcagctgaggaaggagcaggtgctccaaggaaatctttcatcaaagtgatggcatagctaaaggcacagaaagaaatgcattactgagatggcgttgcccgttcatgggcggctgcaaggaaggctgaaatggtggcttgggagaatgaatgggagaggggctggaattggctggaaagacaggaaaaggaaagagggggagaaacaagttcgtgggaatggtgattcctttcaaatggggtgcacagcctgacaagctgtgcgttcttcttaaacacagcccaaatcaagtcttaacttgaaagaaaattaagtcagattcagtcatgaccctcctgttagcctggttgggcatagaggctttccagaaaactctctctctggaggggttaggtggtggttgtagcagtggtaagcacaaaaaagggagccagcatttgagaatcaagtgcttaaaatacatcatcccatttgtttctgataatgaacacacagagtgggtgataggattttccttttacagatgagaagactgaggctcacagggcttttgttgttgttggtttagagataaagtcttgctctgtcacccaggttgaggtttcatggtatgatcatggctcactccagcattgaattcctgggctccagtgatcctcgagccttagcctcccaagtagctgagactacaggtgcacaccactgtgattggctatttttaattttttttgcagaggcagggtctcactattttgcccaggctggtcttgaactcctgggctcaagtgatcctcctgccttggcctcccaaagtgttgggattacaggtgtgagccacttggcctggcctcatagatgtttcaaagactaaattataagtgaaagccagagagtcttacttaaacatgacttaaaaattgtttattttaccacatcatgtgatcttccagttttccatcagagcaggcaggttggaggttgggggcttaggagtttgctttcacagcctcactaaataaattttggggaatggccacagattctagtgggcctgttagcctgacgaggctgaggttgcagacaggacccacagaatgggagaagctgagttacttgcaagttggaaaggtgatgtcatcatgaaacaaaatggatttggttggtgggcttgcccacgcagttagatggcaggtggtgaagaaacatggcctcttctctcttataactctgaggggcaggaggagagagctgggaatcactagattcactgcagagaagtttggggctgtatctaggtcatgggtaaactgataattggaaaagaaattcaaggttggacattcattttgatttttggttttcaaagtttatacttatctactttcaaaaataattttaagagacatactattttctcaggaaaagaaatatatgccctctaaatagttttcttccttgaatattgccagcaaatcagccatctcattgaatattgatggttgtagagcaaatcacgaatgctgacctagagctgccatttattgagttcctactagggatttgactctgttttaggtacattgcacatattagctttataaacattccccacaacccagcaagataggcatttttatccccatttttcagatgaggaaactgaggttcacagaggttaactgacttgctcaaagtcccactgtatataagtagcaaaactaagatttgaactcagatctgtctgacttcaaaatcaggtgctctttctactctgtgacatgaggctatgaacatgtgaatctcagaggtaaaaagcagagttggatatggtttggatctgtgtccccacccaagtcttatgttcagttgtgatcctcaatgttggaggtggggcctggtgggaggtgattggataatgtggttggtgttctcatgaatgggttagcaccatcccttcagtgttgttctcatgatagtgagtatgtgagatatcacgagatctggttgtttaaaattgtgtagcacctccccactcccctctcctcctgctctggccatgtgagacatctcgcttctcctacaacttctgccatgattgtaagtttcctgaggcctcagctaggctgaggcagatttatagttacgcattggccagggtggtgctaactcactcatgagaactctacccacatgatccaaaccatattagtgagccaaactctaccttttagctctgagattcatgtgcgcagaaaccgccatgtttcttgtacggcctatggaaccaggagccaattaaacttcttttctttataaattacccagtctcttttgtctttctttttttttgtttttagacagagtctcattctgtcatctgtcacccaggttggagtgcagtggcacaatcttggctcactgcaaactccgcctcctgggttcaagcgattctcctgcgtcagcctcctgagtagctggtattacaggcatgcaccaccatacctggctaatttttatgtctttagtagagacaaggttgcgccatgttggccaggctggtctcaaactcctgacctcaggtgatccacctgccttggcctcccaaagcgctgggattacaagcatgagccacctagtttcagatatttcattatagcaatgcgagaacaacctaatacactcacccttacctcttcaacacaaagagtcttcccagagcatccctgctaagggctgtgacttgaatcaccctcctctactaatgaaagactcgttaatgactccacgaggtgtcaggtccactgtttgatcctgcattggttcacccaaggaatatttaatacgtgtccactgtgtgtcaggtactattctagaacctggcaggccagacaagggcctggttctcatggatcttgacttctagttggagaagcaagcccttgaaaacaaagtaaataacaaagagtttcaggtgctgataaatgcattggagataatgagacagcggtctagagggtgtctggccatagggatccctttagatggaataatcagggaagattttgctaaagagatagcaactgagttgagatctgaatgacaaggatatgccttccaaagatctgggagaaaggggatttaaggcagaggaaacaggagatgccaaagctttgaggccagactgagtttggcacattaagtaagcccaatagcctggagagaacaatcaactagggggagaatgggaggagatgagcccagagaggaaggcggaagccagatggtgtagggcccacctgccatagcgagggctttggattttatcctaagtgtggtgggatgccatcggatgggtttgaatgggaaaatgacataatctgattcacattttaaaaaaagatcctatgtggagactggattgcaggaggcacttctaattgttggaaggactgttctctcttctactgatcaaagttggttcttcaagtaatgacccttatgaaactgtcctcacaacattaatgagaattacaaaccagactttaggcggatttgtagttaggcattggccagggtgcactggtgcactttgacccacttcctagcagctgctgactgaccaagagtcacacagcatgctgaccacctgctttcccattgttcctaaagatagaatctctgacactggacctttttactcaagaattacttaagttatttttcggatcctgaaatccagtggaatggctcatacccaccagtcttaagacccccaatcaaggaactgacccagcacaggcatgcggtttcttcatctccctgtcccatgacttcattcctcacttcttgaccaattagtgatcccctattcccttagaaaatcaaactccttaaaaatcccatcctaagtttctcggggaggcagatttaaggtttcctctcatttggctgccgtgtgattattaaactctctctctgctgcaacttccactgttttgctgtttgcccacacagtgggcaatcgaatctggtggtcttataacacttgaccaaaaaccaaacaacaaaaacaaggctactttcttccttcttaaaatttttccaatcagctattatagttccctttagttctttctaaacttcccttgttctttgaattgatccttggattctagacccaaggtggattctagacccattatcttgatcattctttatcagcaaatctcttgcttgtccatgtccttattaacatgtggcatccagtaccaaacactctttcaccagcccaggattctgaggggctgtgaattccaaggacatccattaatgaaaagtattagactaagtctttgttgagtagtaattcttaatgtgaggctctaggtccatgaaagggcccacatacaccacacaccattgtctatggggtgcctgtgcatgtgtgttgtgtatgcatttctaggaggagagtccatagctctcattaaagtctcaagcagagcctcctccttgagaaccactgccctaggaagttaaatcaaaggatttctctactaagcagatgttacaattagttccttcctggtcccacattcattcccttgctgccttcttcaatgcttttataggtctcttgatctcttcttcctgcctcataccccactttaaattccttctttagcttctaataaatcatccaaacccagagaagataacttctgctttcttcttggagcagcaactagtgaggaaggccgtaccccacttgctggatgagaacatactgacaaataggcctaagaccagaggctttttgttttttcttctcttctctggactcataggtctttggaactgacctgtgtgcctgacttgcagacttcttaagagcagggcacagagagactggaaagggcttgagtgtaagcgaatgcaaagggcaaagtcatcttaaaagaattattattcatttcccattgcagttaattttggcaccttcatcagggtttaaattctagtaccatatcatatcaaaggaaaaaagtatttgatgtacgtgttaattactgctaagatgtagctacttaaatcaagagtttaatcttcatttgactattcagaacagctctgagtgggggatggggagaaccccttttgatttgggttactttaataggtgatgagaacttcaagcaaaatggctttctaatttcagtatttggatgtcttgcaattagtacccagctaaaggaaaaataggaaaatcaggttcctccaggaattcccaagtttttgcttgttctgtgaagtggaagaatgttctgaataatttaatttcatgtgctcaaaggcttgagaatctgcagagtgatagcctaatggtaagtgatatcttaaaagcgtgtgagaggcttaaaaagtagatccatgtataaaataataaactattatttaaaagcacaaattgtcaaaatgatactactcttagatacactctttataagaaccatcttggttgaatcctaatgtgcattttttttaataccacgaaactataaaacccattgaaacaccacattatttaccaagtgattaaatcatagtcatctattatagttttactagaacattgttttcttggaattccaaggctttattgcctcagatataacactttactcctaataatccctattgattttattatattaccttatatttttagatttgttttaatgccttgcattacattttagccttaatgtgctatataaaatgagatacatcatcatgtttctcaaaccttctgaaggtaattatcttaactaacatggataaaaaaatgctcattgttggctgctgacagtggtgggagtctgggggtggggaaggtacattgtagtctctgggactgttggttgtatttctggacagttgaggtgctgcccatgggctgggtgaatggtggtgggtgtggtaatggggcattgccacagattaggtatctcatttgtgtcattattttgctatccttgcctctcttgggatttgtggctcacactgcatttacaaggtgttttgcatacagtaattgttcacttgctaaatcagccagtagagaacttggtattcttagagaaagttgttgcacctttgggtgctgttttaattactttttcaaggtgccttctaaatgttaaaaatggtgacacattttatctcaagttgaactttgcatccccattctctggatttggggtcattctcttgccttggagtctggagggaggagaggagtcggttctggcttgtgagccatggtgctactggtccctctggaggaagggtagctactgatgagccttccctgcagcaattgtgtcccaagatctgacacactcttatcagggccccagcaaataactcagcaccttcattacaaaagttagccaggtatggtggcatgtgcctgtaatcccagctactcaggaggctgaggcagaagaatcacttgaaccctggaggcggaggttgcagtgagctgagatcacgccagtgcactccagcctgggcgacaagagcgaaactctgtctcaaaaaacaaaaaaacaaataaaaactccacaaaacttcagtggagactagattcttgactactaggaactcaaactctaaaaggagaaaataatcacaccagctacactttttacagtgctaactatactttttgtagagttaactacatgcacaattttatttgctttatctatattaattcttttcatccttatgaaaagcagatactatcattagctacatttcataatgaggaaatggaagtacctagaggttaagtattttgcccaaggtcacacagctagagagtggtagaccgagaattcaaacccaggcaatctgatgctcagaacctagactcttaattacactaatatgatatttacaatttacaaagcgttatccactagttatctcactgattttcccaagagactttggctccactttagacataagaaaacagaaataggtcatcatttgtctaaggtgacagagcccaaacccactaacaggacagttttcttcaccttcaactcatctcaatgggtggaaaaacctacccacatgctatgaggatgggaaaccaaagtgtctttgcacataaacagactgcctccctggaaaccaggcctgtccttggtggtgtatgagcaggcccctgggatcgacacatggatgaagggagccctctgaattctcccacatctctgggcacccctctaatgtgctcttctcagcttgttgctccttcactgtaagtccaagttctttgaaggaaggaactatgttggtattctgtgatgtacgcggctctgtgtgctggtgagattttgtagccactggaatgatcagaaaaacgtctgtgtgaatcttgcatgatggaagaggaaaccaggtaagagtgagcaagcaggatggtaaaagggataacagctgatgggccagcaaggatgcggggaggatacctgtggtcaggaccaggttgtgtgcagggcagctctgattgctttcttagcagaaagcacaagaccaggcaaagcaggcgaggagaaagccattgaataaatactaagctagaaaacaaagatatacatagaaattctaggttctcaagaaaataaacaaaccaacttacagaaaacccctttccctgtgttgaggccctctgttgaacctggcaataaacgttatgcctctccccaaccccagtccagaaggggctggcaggtacctctttttattcattgagaaagtaacggtgagcagttttgtgaattctgtgaattacccttgaactggtcagaaagatccaacagctcagacaaggagaagggaagagctaatctcctcttcacctgtgatgactgtttttccacctgtggcttgggaaggaccatccttgctggtgatggatgttgatttagtgctttgagatccctggaagacaggtcaggcaactaacaaggaaaatggcattttgggtcaagtcactaggaatgaagaactagaatacagggagccagggggtggcggtgtggcggggaggaggccagaatgaaagataggaggatcagagaatggtgataagtttgtacaggtgggatcatcagttattctccccaaacagatcattcttgtcttctcctctgatttccactaggaaaaaacaaaacaaaacaaaacaaaacctgaggtatttcttagaacacgaagcatgaatcacttacaccagagatgagaaaagcaccatcaggtgcttaaaacacaattataattggaaagaccaagaatttgtggttcatttctagcaggtgaacaaatgtatgtttataatggtgtaaaaaccctggtttccccttcccattcccggtgccttcccagtgtgcttggaacactctactgtgttattcacctgacggattaagctcagcagaggcaagctgcctaggcatgtcgtgtaattcagcattaagtatcctattgattcactgaagtgctgccatggatgttaatggagacaaatattgtggctgtgatttttcaaagggctgagtaattcccgagcatcaataacgtgtgtcatgatgtaatgcagggagacctccagatgcttgacttgaggccaactacggagggcagagctgatggaagggcccgttggatactgacccagggcttggggagatagcctgcactttctccagacctaccatcagtaaggatggtggaaattggggtggggcagggactgctgatggcatttcctagtcactcatcacaaggtcactgattgttggatggcatgggcacgcttcccattatggaagcttgctgggccttaggagcttataccataccctgtttcagggaacagggtgggttttctcccctctccagttggaaacactacatatccctgatgataatgcagcaaaactactatctaatcttaacagcgtctaccctgtgccctacttgatctgagcatgtgaccacttcagtgcacgattccagtgactgctttcagagaggttacatgccttcctcaaggtcactcagcttcctcaaggtcatggactaggctacaatccaggtctcaggactgcttcccctggtctattctcagttacctttaggtagggtctctggaaatcatttgagtatatggcctgaaacaagcgacattttcttccaaaaaggctctgtaaaaatctcagggttggtcgttgtaaggaatcaattattcccaaacaaatctcatttcagtcaaattctgcagactgcccaatctttcctacactccaattcattctccatactgctgcttacattatcttgaaacaagacaaatccaatcttgtcactccctagcatgaagacctccatcagcccctctctgctgacaggataaactccttgcatgatattcacaatctctcccccaagcctgcagtgtgatgtcctgcccctcctgtccccagcacttggaacatagcagaccactttatgctctttgccccctgaatattttatacaagtgattcctggtgtctagaacatctttcccccacctgctgcccagaaaacctcagcccattcttcaagagccagttctactatcccatcccaggaaaccatccccacgtctccagggtagagttatgagtggtcctttctctgagaccccacagaacactgcttatccctttattacccctgtataatgacagccttcctattgaacttactgatttattttcttgtgtatcttcctgcattggaatttggatttctgcggttgggggctgtgtctttgtcatttttgtcctcttgttggcatgcagtaagtgtactacataagtttattcactgaatggatgaatggattctggaatcagaaccctgctggggtagggactatcagtagggtatagggcaaataaattggccctgtgagatacatgtttctatagtcctgggtctaggagggacccttgggggcttgagaactggaggcagaaaaactgtccttcaactcagcagcatgctggggtcttggagagagtctctggggctgggtgtgccctttaactaccatgtcccttgaaaatggtagccctgagaacatatgcaaacatgtattcccttgggaaacagagtctgacattctaatgaagaaccagcacacttgactttgatcaacaccagccttataagcagcatggatattgaaacattcagtaaccagcatggcatgtgcatgggtcagtcagaatgcacacaggccacagggctgaagcagaggtctggagggctccattgtgccaaccattaactctttagtagctggacagtagggggtatcttggaggagggtctgagaatagcaggagaaacatgagtaagggggcttgcagcggtgactactgaccagccagtataaaaatatttcattattttaacaaccggccctggtactgctccaccggtgcctatcagcccgttgataagtcttgttaaagaataaccacagttttggctgggcgcggtggctcacgcctgtaatcccagcactttggaaggccaaggcgggcagatcgcctgaggtcaggaatttgagaccagccttggccaacatggcgaaaccccatgtttcaccccatgtttctactaaaaatacaaaaattagccaggcgtggtggcgcatgcctgtaatcccagctactcaggaggctgaggcaggagaatcgcttgaacccagtggggcggaggttgcagtttgcaccattgcactccagcctgggccacaagagtgaaacactgtctcaagaaaaaaaaaaaacaaacaaaaaaagaataaccacagttttgaagcctcaaaggaaggtgtgtgtgcatgcatgtgtgtgtatgtgtgtgtgaaggaatgaggcagagctctataaaggcagtactagagtggaatctttcatttttagttgtatttcaatataagcataaggaggtggaggtgagagaatttcagactgaggaactgaaagagccagggcacagagtgtgaaagggacctatttgggagaggtggctgtaggatgctgaggattcctgggggagatgaggaaggagacagaggctggagcaggtggccaagggccttgaaaaccatgttgaagcatggtgacctggtctgtgttcctataggccgccctttaggcaaaccttattgcttaggctggcttttgggtggtccttgctgggacaaccagtggcgtcatcttcaccaagtctagggtggtcacctggtgatgggaacaagcttctccttaattaagaatgtcatagcagcctccctggctccatggtgactgacgctgccagtccagctgccatgtggccgatgtgtcctaccgtggtacatcatctcctaattaacatgtcttgtcaggtccagcggttggcttcagtaaatatgcctcaagcagctgtcactgggaccctgcgtggggcctgctgcctcattagctccagagaagggagatggcattggcggcaggagggagggagaagaatgttctttatggggggtgttggcaggattagagggatgtcagatgctcagagagaactcacaggccccagtggagggcttggatctgagcaccatgagcctctctctctcccatgtgtagtgagaggataggtgggtagcagtgtgggcaggaaaacagcccaggagttgggagacccacatcttcattctgtctctcccaccaccgagcaaggctcggtctcctggtttgagaaacaggaatgatcccagctctacctatcctgaagtttgttgagtggttctaatgagcaaatgacctatactattctgaaggacaagaaatgctaaattttacagaaatcaagccagggcatggttgtaatttggggctatcagagagaagtctttgctcagacaagactggtccctctgaacacacttcgcccacccctccaaggcttctggcctgcatcccactgcactgtctgagcactcatcaagacctgctcaccacccaccaatcctgtcagactctttctctccagcctggcctcgccttctctgtgagaaggaaaatgagaacattccggaaggaagcactcttctttctctggctgctggagtaccttccaggctgtggaggcagggagctgacttcacagtgactgaggagacataccttagcccacccccactggattttgagcacatgcctaaactttgtacccatgagagcacatagtaggtggttaatgaatgtttgctgagcaggaagaacagtatatcccgttctcctagctctcaaaacaatggtgggtgatttcatagtttctttcagcaacttgttctattgccaacctttctataagccttcttctgagatccagcccagtctccttgggcagtgtgtatctgtttcctctttgtccccagcagagaatagaaactgactgtcattctctctgcctctcctgaaagactaatactaagcactcttatctcaccccttcccatctttcctattcatcagatttcctggagcccagcctgctacctggagccagggcctcgcctctactgccccctccgctcgctctgcctgtgcagggtccatcctgaggagagtctgagcaactgaggatgttgtgaaagcatctgacagcacagggaggcagggcttccccagcccagcagaggcaccaaacccacgcaatttgtaaatctttgataatgagcatttaaagggcacgtcctaatgaagggagccaggaatgactggccatggaatgcaggcagaagattttaattaaaatgcttgtctttttagttttcctcttcccttgtctcttccaaacaccacctccccccaacccctgccaatgatgcacatgtcttgcttctggaccaggcctgtgcaaaaaatgtgcgtctcatatttcccttgatttagttgctctctgggggactgggtgctcttcttcagctgggcgcgctgtgtgggtttgacagggactgtgcacatgtgggtagaggcggaccaggactgtgctgcctgcagccaagcagatgtcctcaccccaggaagcacagtggggctctaagagagctcatgaatgagtggcagctgccagccttgtgagcttcctgtagtgaagctctggggggagctctggggggccagctgggagacttctgggccaaaggggtgttttctggggcctctcacgatacttttctctccaaatggctaaatggagtgtggcggcagagcagctgtgagggactttgcactgctctctctaggggtggagggaccgttggctggatgccttccacgtgctcctccagatccatgtccaccctgccctgtgccctgggaatctgagctgtgtggattccagcagcagacttccttgctataggcttcagattgggtctgcccaatgaggaggccttggcaggacatgggcggaaataggaaaatgaggttggactatattttctggcgctttctttgtgagatcatctcagggctggttgtgtcttttgattgaagtccacagtgcctggtaaaggtggcttctctaaaagatgctctccttcctggttctatgagccactctgtcccttcactgctgccactctttctaaccccaagatactatactcttccttgtattactcctggagcaaaaccttgtaaacagtccctttattaaacactccagattccccaatttctgtgtattgtctgttttctgccaggatcctgatagattcacctgttcttttccagactggttccttcgcaccagacacatggtcagaggggattattcatgttattcctgggatcctagctctgatgtggaatgcaatgtagtctggtgggtgataaacgtccctacttccacatagacggactgggtttggaaaagtgcttgtgaatttgtttcccaggaactgatgatagtctttggacttctccaaaggtctgtgtcgaatggaatataagccccctctctgtgtgggatgaggtgggagtggggatttattcctccccaacatgttttcatctgggctatgatgccattctcattttatagacaaggccactgtggttgagtgacttacccagaatctaagaggcacgttctcttcaactaatatttagcaaagaattaaagcaggttttctaccaattgatggaaatctctcctccttttgttccttgccccttttgctatttgttcactatgaagacctggcttcaaggatcttgtggggaagtgagtagggctttggtcttggactgggaaaaactccactcagatacactctctgtcagtcaagctctcaggcttttccttatccagcgatgacttacctcttacctctgcctggagctggcctctgagtagggtttctgatcttggcttagcagactgattgcctcctgcttgtgcctcagggccctaagcttttagaagcatgcctcactcccagcctaagagcttgtctttgactcctgattggccctttttcctgatgtgtgggttggtgttctcgaccccacagggcgctgaactccagttagaactgccacccatggcaactccacagggtgagcccgccctttggacctgacactatgtgcctgatcactctttcacagacgtctcccttccttcccactccacccgagtcaaggctcctgaccaactaggagacagaggccctttctccttgacacgtcctgcctaaagtgtcagcttccatccctgcctggtgttccccacaccaaaatatgaaaccaatctttcttctcatacacagtgacacagtagctacttcgtgttccctcttcattcagttgtctgtgcaatcagtctgtatgtatgtattcattcattcattcattcattcattcattcattcattctgctatgtattcagcaacctctaggtgccacagcttgcaaatatcatctgaattcattctcacagatctctagcagatctctagtgttcactgttactgccattttacacatgaggaaaccgggtcaaagagtaactaagcggcttgatgagggccacacagctggcaaatgtcggagccagagtttgaagcagaacgtatggcattcgcactggaattctcaaaccccagcacaaggcacctattcacagacagtttgaagttgttcatatgcagaatcggaagattctgagcagattccatccctcctccccataagccacacttccattagctctgctcaggacaggtgggcccctgtgtgttggaaattgagatggagagaggtgaggagagaacaccctgagggagaagtgtgtgggggtggtgcaggcaagaccaattcaccctgaggtgatttgcatctttagcaggagtacatgtcatgctgtcacagccttttcctgtattgacataataacaatcctttacttttgttagcactttgtagctttcaaagcagtttcaaatccattagctcattttattcctacaacaatctcacaaaaggcagaaattattatccttattttgcagatgaacaagctctgtgaggctatataacttctccagagtcaggaagcctggatgcaggcctagatacctgactcctggtcttatggattatgtaccttgcctcacttttctcattgttactttctgattttgagccatttagggggaaaggatggcttcctagactctcagaaacccctcactcttgggttccaggccacctagactacataaagcagtggttctcaaattttatttgacaccaggatcacttggaaggccatcacatagattactgggccccactaccagagctactgattcaggaggtctgggaggggcccaagaatctgaatttccaataagttcccaggtcaggttgatgctgctggtgtggtctcacactttgaggaccacagatataaggcaatgcctatgagtctttagctgaatttctctaatcagggctcttcttctgggctgcagaaacctcagatacagaaagaattgcccttgtgggtctctccctggggtgagaaatttgtgtatgtcttgcttcactgactgtggtgtgacccagagaatgggaagaaaacctcaggctttttggtttatacacacacacgaaaggaaaatgtccacacatgagattattaattcattgttcaattaagttatgatctctaaaattatcacaatatttggctcggaggaaggcagcactgaatagcttgttacacgtaatgtgtgaataatgtaactttattacttttcccactcgtaagtaattgtgactgacacattggcaataacacagattgccttcttaccttcccctctctctactctcagcacggagcgtttactttcttgtctctattattttcttgctcatcctcctccctgccacaagcctccttccctgtgcagctgcttttctgtcctgcccaagagcagccctggggagggggcaattgagtgagggactgcgaatgccagaaaacatgggtgagaagcatgtccgcacctcccacccaacctggtgggaatcctgtaaagcctgcctgaactcttgttcatatcgttgctgcatactgggcattgggagataaaaattgatgaggagacattagtatacttgttacagcagtggctaatatgcagtggaggaggcttgtggggagagagagagagagagagaaaagaagaagaaaaagaaaggaaaggaaaggaaaggaaggaaaggaaggagggaagtaaggaattaaggaaggaagggaggaaggaaggaaaggaaggaaannnnnnnnnnnnnnnnnnnnnnnnnnnnnnnnnnnnnnnnnnnnnnnnnnnnnnnnnnnnnnnnnnnnnnnnnnnnnnnnnnnnnnnnnnnnnnnnnnnnnnnnnnnnnnnnnnnnnnnnnnnnnnnnnnnnnnnnnnnnnnnnnnnnnnnnnnnnnnnnnnnnnnnnnnnnnnnnnnnnnnnnnnnnnnnnnnnnnnnnnnnnnnnnnnnnnnnnnnnnnnnnnnnnnnnnnnnnnnnnnnnnnnnnnnnnnnnnnnnnnnnnnnnnnnnnnnnnnnnnnnnnnnnnnnnnnnnnnnnnnnnnnnnnnnnnnnnnnnnnnnnnnnnnnnnnnnnnnnnnnnnnnnnnnnnnnnnnnnnnnnnnnnnnnnnnnnnnnnnnnnnnnnnnnnnnnnnnnnnnnnnnnnnnnnnnnnnnnnnnnnnnnnnnnnnnnnnnnnnnnnnnnnnnnnnnnnnnnnnnnnccactgctgtaacaagtatactaatgtctcctcatacaatttttatctcccaatgcccaggcacttggagtctaaacttaaaaaaaaaaaaaaaaaagaccaggcgcggtagctcatgcctgtaatcccagcactttggcaggccgaggtgggcagatcacttgaggtcaggattttgagaccagtctggccaatatggtgaaaccccttctttactaaaaatacaaaaattagcctggtgtggtggtgcacgcctgtagtcccagctattcgggaggctgaggcaggagaatcacttgaacctgggaggcagaggttgctctatcaccactgcacttcagcctgggcaatagagtgagaccctgtctaaaaaaaataaataaacttaaaaaatcattctctattaaaatccagtctaagcactgccatgatttgggtatggtatgtttggccatgccgagtcccaagtctcgtgttaaaatctgatttcccaatacacaccggggcctgttgtggggtgggggtgaggggagggaatgtagaggatgggtcaataagtgcagcaaaccaccatggcacacgtatccctatggaacaaacctgcaagtctgcacacctatctcatttttagaagaaataaagagaaacaaacaaacaaaaaaattgattcctagtgttagaggtgggggctggtgggaggtgtttgggttgtgggggtggatctgtcatgaatggcttggtgtcattctcatgctcctgggagtgagtgagttctcattcttcattcccacaagaattggttgttgaaaagagcctggcacctccccctcgccttgcttcctctcttgctctgtgatctgcacatcccagctccatttccccttctgccatgagcggaagattcctgaagccctcaccaaaagaaaatgctggcacaatgcttcttgcacaccctacataaccatgagccaattagatctcttttctttacaaattacccagcctccagtattcctttacagcaatgaaaagggtctaagaaaaacactgtcttgtcttccttttccatcatccatcagtgtatgtttttgtaccagcaagtatgtttatttaggcagaaccacaggtactggcaacgtatctacagtgtagacatgaaaagaacaggaagagcataagtaacagagattttgttcacatggtttagtcatgttcccactgcaatgtccctcttcatacagtatttcttacctccttccacctcttcagaaagtacagcgtagtccacatgaatgagacctgagtgcactggggcatccttccctcctgctctgggggtcaggtgtggtaatctggcttagcttcctccaaagctccagttggaagggaacacgttctctttttctggggtgatccagtgtcgaaggccaatttacatgcagactgggtgtgttgtctgtattgctctgttcactggtaccgaaggctctgagtaaggtggaatcagaccctactctactttccctgaacagtgagagcagcaagagctaacagctgagcatctactttgtgccggaccctatgacatgcactttccatgcattcatgcagtcttcacaataattgaatgtggaaggtgccattgttccctgtattgtaccgctggccagtgagagccaggagcctgtgctcatcacaataccatagttttcagccccccaggctaacatctaccctctctcgtggtgcctgggacccttctggacctgatcaaggtgtagcagctaatggactcggaacaagtctctgtagatttgagtggaggcgccacttgggctggagaggcttgcggggagctttgcaggggaaatgaagcttgactcttgggtcctcagggtttaaggtttgccttttttctcaaaaaagacttaaagggaaccaggtcccttgtacctgctgtgtgcacctggcaaagagtgcatcgggtggaatgcagtcctctctcaccaagctcttgcactccattgccccctagcctagaatacttgctccctgctcagtaaagaatcaaattcctgcaaatatccatcctcggtcctaggctacaggtctgcgccctctcggaggcccttgctggtgctctttccactaagcctcactgcctctcctgtcttcaaggggactgattgcactagggaagtgtggagggagggtatatgcacccagggaagaaagcagcacagcacttctcacagctctggtctacagttgctccactcagcaagtggggacagttccagcttctgggctcttcttgcccctaaacttctcctcgatcaggagtaatatagtctgagaatgagcacaaagaacactttttcttttaaggattgaccttttgctcaatgagcaggattgaaccttgaacccaacaaaagggtctgcagtgaggcagggctggacagctccacctctaggcaggcacagcaagtgtgggcattgcttactgcagagaggcttcccttctaaatccactcatggggggtgccaggtgcttccctccaaggcagaaggtaacccctcccagtccagagcaaatcacggtctccatgtttttcctccctggtcccacataggtgagtgatatatacagaggttagacctcagggttatgttatggattggagggagcagagaagcttcctcattaaaagggctgtgctggttggctggctccaaggccctcagcacctctgggcttctgagccatgggagagttggacagaaggctgaacagtggctgatggcctggaggaggagatagggagggaggagaaggctggatgctgggttcccattgtacacccccagcaacgagcccccctgccagcccagagtaaccagagatcttgggccacaagtcagacacacctagactaagatgtggctttgaccccagctggatatctgctcacgtcatcaaagctcttgaggcctcagcttccttatctgtaaaatgtggctgggaatacctgttctactgatctgaagaattgttgtggtaatctgaagaggcgattggtataaaaataccaggtaaaaggcagagtgtgtcccatgaatgagacaccctgtccttctccctcaagacatcctctttgtttctcattcccaatatgaaaataacaaaccattctagggaacaacttggttatttttgggtcatgggcagggccagcaggcctacaggtagcgggagggatcagtggaggaagcgacgtgattcctgtaagacttgaatgcccctgagtcaaagtctgctctgaagaccagcccccttagagtgacagagatggggctacctcacaactctgccacttactatttttaggaccttggggaagtcatatagaattttgaattttagttccttcatttgtaaaaatgggaagggtaatagcactatccttagcattataaaataatggatacttatggcatacccagggcatggcatgtgctaagcattcaataaatgtggactattattgttatttcctttttgagctagttgtgtttgcttgctacggaggaaatacccatttcaaagaattgggaggataaaattaagagactggtaacccagcatctgccgtttaacagatgccctgtaagtgagtgccttcctctttctcccttctggcacttgttctgttgagagtctgtgatgcccaaaccttggaattaaccctgatagaaaaaaggcataaagccactggatatgtggcagctctgccttcgtgttgggctcacattacagacatttgagtgtctgcccctcatcctgccccccagatctcactgctctctgagtcttaccttagtctcctgtcttttcttctgccctcctggacccagcttactgcctgctctgctgccagcaccctttcttgtgtcttggtatctgcctgagacctttgttttgctggttacggttgtggcctgatgggctaagctaggccctttgtaccacctcagaacagcaggggatgcagcaataatgccaactaggagtccggatgatctggacttgaatttgtatcccggtttaaccacttactctatagccttaggcaaggcacttaatgccattgcatgccattgtcacatcaatacaatgaaagtaacacctatatcatggcattactggaagataaaaagagatgactgagggataaaaaggcgatgtgaaagtccctaggagggtaggcacttagtaatactaggctacctcccttcctcctcacttctctagtctcaatgcctgcttaggggaggggtagagatcagggtggtgagttgtctcctctgcaggatgactcagcccctccctactcccctactctgttactgcctttgcctcatcatactctggaaaacctagactaaagtaagttttttagctggacctatttttggaggtggagaatggaacttcctcactggtatgctgagttttgatttccatatgggctgatttcagagtaactgggaaaattcagtaattagcagtagcagcattagtgaatcatgttgtaatcatcctcttctcgcttcttccctcttctgcatgttccaaatgctattaccgacactatctttccctccactggcccttggcctcatgttcccactgcagacgttgtgcttcctgcttagcactatgggtcagcctctgggtactttcctccctcccagcctccagcctcctgctcaagcctctgcctatttgtccagaaccctggtgggcacatttagctagtttctcctcttgcaaattcaacctacaggtttatttcaattcaaagaaaaaaatgactcatctaaatcctgataaaaacatggctagtgctgtctgggctgatgaaatctacttggagaatggagaacctaagagaaccttctctgtctaagtctggatatctctgcggatggtcacttaaaaaaagataaaaatgcagaggagggttttccttagcaaaaactaataatcagtggctccatccatttatccatctatccatctaggaaacatttacacaatgtctacaatgtgccaagcctagcactgggctttaaggacatacacatgatagctgagaagactagcaagtaaaccgatgaccattgtacagtggaaaacatgccaagagcacagtgggagcatgagtcagtgagcagcaggggcagctcctctgagagggaaatgcttaaatattgaggaatggagagaatttagctttgcagagtttgctttcattggtatgcgtgtggaactaaggctcaacaaatggaaacctgtaaaatctatacttactcaaatttttgtagagcattgtaatgtgctgggaatgggaagctcagaagaggaataataatgggctttgctttggggtttagcactgacttctcagaatttgagaatttggaacatttaagtaatcccatttcctcttgacagaattttcctaaaacatgccagagagataggaatagaaacaccttgcttgttcttaaagaatctaaatctccacaatgttccctgttcattccatcatctcctgttgttggaaaaacgtacttgtctgtcctctggctgcaactaaagtcagtcctctccttagggcacccaggaactcttgatgtttcaccagtcctcttgctgagctaaacccaagagttgttctgtgttctatactgagtctggcctagtgtcacagaatctgcattagacatagaaatcattactgcataaatgtggagcaatattaacaaaaagctgaagcattcagatgaagaggcagctgttttgccttaggcgggctggggtgggtagccccatagtccgtggataattctccctccgtatctttccctcacttatcctatatgttcacgtcactgcagttatttggtgggcagttgtagtcttagatgagctttagtgaatgggagcccagcttgagggcttgaaattcatttagtgtaggaaccttggtgagaaggttgctgctgtggaggaatcgctatgtgaaaggactttagtcttcaaaagccggctaatgacccaggcatcaccccgtctccccatggccccagtgacagcaggcacaatgtctggatattgagtaattacctatttccttttctagatgatgtaagctctgttttgcttaccactgcatccccgggggctggacagtacactttaatgatttttttttaattgaatgaattaagattcacaagtaatttgaaaggcatctctatttatctcgctggtgtttctcagtcctgggctgcattgccaaagtttccagtttcttcatgacttggccagccccccaatcatcccaaagcccagttaagagaaacacttcggtgctaatagatctggaaacttaagctctggagggccacctgtcagatgagatttgccttcaaaggccactggctctgaccttttgataacattttaaaaaaagaaaccttacatattgactgaatcaggcctgtctccaatgaagatctaggcagctatttgtatttctgtttggatttttgggtccttttctttttgtacctctgggtaagcaaaaggaaaaacgttcctttgctttaccaaacctcatttaaaagttgtttgtatatattttttaatggaacccaatcccttaagcctttaaaagtaacctctactgagctcaataaaccatttccaatgtggcagcttctaatccaggagagttaagaaggcagatgctaaccaaccaccaattgcatcccaggacagttgctgaaagtctcagggctctgcaagctggagatgagatcggctaatcctgactctattctttcgtctgctctgctagctggccctacttgtacaattaatattctccctggtgttgattttgttcaaatatattgggcccatcaatcacccactttccaactcatctgtctggatcagtcatttacaaagttatttttgagccactaggattcttgtgaaatagacacaagaaggagctaaactcatttcaggtttgacctctgtggctgggatctgagaaggcttagtttgattacgcttcatggccatccaatccaatctggcttgtagaatagaaaggccacttgcttaattgggaacactttaatatagatatccattaacttatgctaaattacagtaaagcatctatggaggaacttgatgtgacatctgcatgaatactaaataacttcattacgatcagtactgtgacaatgaatatgaaatgaacgtgcccagagaagacaattaatctcccaccttcccaagccagtactgttttattttaccctgcattgtactaaaaaaataaggcatagaagctctatgattttctgtctatctcactcacccttcagctggtgagtggtccccgagagcttctgtcatttgtagagtggaaactgacccaccctgaggaatagccatgggcagtgggtatgtggggctcctggggacccactttggtttgggaaaggaggttgtcaagactaactgaacacaacacacacacagacgcgcgtgtgcgcgcgcacacacacgcacacgcgcacacacagaattaaaaggcatcctcatccggaactagcaaacagactgtcagttcagattagcaacatcaaaagcattccaatctgttccctgcatacattacatgcatagatctgagagaagaatttggcctctgaattaagtcagctttttccttctgggctgcttgtacctgaaatgtgtggcgaagagggtccagcagtcagattaatacacctcatagcatttagtctgaaccttacagcatggtcttaaagagacaccctctcatattacttgctgctgtttcacatgggttctttctgaatctggaatgaaccatgggacccttgggttgaagactatgcctaactctgtatgaggggtcgctcagaatggaggcatgcatgaaagaatattcctgggttctccattctagtcatttccctcctacgtcactgacttattgctggcatctcctccccttgaccttcatattggagtccttggatctcttctcaatcttatggctttaaacaccgactctactctgatgtctctcaattttgtatccacagcctagaccaccccctaaactctggactcatctatccaattgcctagttctcccctccacttgcaatgtgtaacaggcatctcaaatttcacatgctccgaaaagaactcctggtcttctcccacaggcctgcccctctcacggtcttcttcatctttgaagaagatgataaacttgtcagtggcaattttatccttccagttactcagaccaggaaacttgaagtgagtgatcctagactcttctcttcctttcacacccacatccaatctgtcaatgtagcctgttgtctcaaaatatattataaaccaaccacctctcaccacttcctctgctactttcttggcccgagcctcatcacttgttgctcagatggttgttacagtcatggttctgggtttagcagggtctctactccaggccttgtctctgaagagcctcttggtggtcacaaagctacttgccactctcatcagatcagggtgcagggtgtcatgagttttacagattctggctacaaatacctgaggtaaaaggatacctttgacattagcaacaacaggaagggagaaaattgctattaccacctagactgtgagcaaataacattctggccagtgggatatgtctcaccaatccatttacaggtcgcagacatttacaacaccagcctcctggcttcttatggggatagtggctgcatcatgtcccactgcacccttgcagctgactccatacccctattacataacacaagtctttctccttctctctttgtacccagaggctccagcatatttgcatagcatttattatgctatgtaaatacaccattatatatgaatttatagcatatgtgagaactcagagtaaatccaattccatctaaaaccacgtaatactcactgaggttcccaccacagtccccttgcttacatgtgcacatcctcaacttccactctttctcaggtcaggaacgtgtcaattctgcaacttcaagtggcagttagggaaggatcctctctccattatatgaaaagtaggtgtctagtggggaggagcttccttctgaaatgctcagaaatgtaccgatgtccttagatgctgcagatggagcccagatcccagtgagcgactgctgggctgttcacagagagccagaggcccctttggaaagggtggatctccataacccatgggaggggagggacctccaacaatcttgttagtgcatcaagtaatagatttttgacagatgctttcctgccttctagtccaaacttcaaaatccttcctgcactggtctcattggggttggtggttagttctcactttccccatttctgagaccagcaagaggctctgtttgcgccaagtctccctgtaaacactgtggttatgcccacactaggcaatgccttcctgggagataacattgcatttattccaggactcctacagggaacaggaggggaagaaaattgcctctctgtgaaagcacattacaatgtggcctagcccaagctagactcactagaaatgttaactctgccctgcactttccattccccatcccctttcctctgccttttccaagcaaactcttactctaggaaatacatgtttgattttcttgggtgaccaccatctccaagagaacctcttagaagtaggccaaggagcaaagaagaagtcccataaaggtcaagagcatcttacaggaaaggaaagtggttacggcagattgcaattgtaggaggaatgacacaaaaggggtaggctagaaccagagtcacataagaacagccttctggaggcagggggatggatgaaagaatgtctttatgtcccttcaagggttatgattttgtatgtgcaaaattctgaactgtacatccagttgaacaaagtaaacatttatcaagcatctcctctgtgtcaggcttgaagtgagaaattcaaaggtgaaccaagcatggttccagagtacaaggatcctacaaagtaaaagggtaaaaaaaaggtactttggcctcccttcttccctcccatccatccatccatccatccatccatccatctatccatccatccaatgcaaggcatattgtaataaaggagacacaactctaggcagatgtcatgagcactggaatcagattggaaaactgagtctgccacttactaattctgtaatattgggcagaaaatgtaaacaagcatagcttcaattttcctatttctataacaagaatattaatggtatctatttcatagggttaacatgggaattaaagaagataatgcatattaaagttcttggtacatagcagatgctcaataaattaatatttattaaactaatgaattacaaataaagaaaatgttagggaaacacagaggggagctcatcaatagttgaagagattgggctaaaatttacaggaaggatggaatttgagatggtcttgaagaggattttaacacatgcagatggaagctatttcagacagagggaaaaaacatgagtattgaagtggaaaagaggaggtcatggttcagggaaaggtgactagtgggaaataggactgaagatgtaggctgaggcgatatcatggcaaatctttatctctacactgatgatatagacttgatccttgggcaaaagtgcattagtagggattctggagcaaggcataactgtggtttaggaagatcaatgtggcaacacaatgagtaggattgtactgaagatgaattggagatagggagaggagtttggaggcagcagtaatctcagtgagattacgtgaggattttaacaaagctggtgacagtagaaatggaggaaatagaaaagagttattatgaactggtgaccaaaaagatgaagagaatgaggggaggaagagcaaagctgaccctgagcatttagggagaaagaattgaaaagatcatgatgtcaactctagctcgagaacacagagaaaaggcaagagtttttgcaggaaggtaagctatgtgctagatggagagttagggaccttgtaggaaaccacgtgcagatgctcagtctagctggaactatgtgcctacagtccaggccatcgtccagaactagatataaggaagtggcatcagcctcatagggttaatggctgaaagtgtgggaaaggatgtcattgaaaaggggctaaaataactcttgatttaggggactagcatggtagattgaagtagatccagtgtatagtgggctatgagaactgggaactggaaaatcaagtaggcagaaggacgaaaagctgagtgttactaatagtagaggtaaaacatgaggctaatagagttcagggactggagccaccaagggaagtgggaaaataggaaaggatgaaaagattgaagaccaagggaaggccaaaaagtaggtcaagagggagtgagaaaatgagtgaggacagagaagaactttgacaattggagctgaatgttcagtagttttgagtcgtgcatttcaagatgcaaatggggtagatgcaggtcacttgggggaagactgctgggacctgaggaggtcagaggcttgggaggactgaaatcaccaaggatgaagctggtgaagacatgggttgggggtgggggctgaaagcctggtactaaaatcctagaggaagatggagtcatgtccagaaaacctgcagatgaggtgagaagaataaagagatggtacagtggatggaaatattggggcaaattgctgaaattgaagtgagtctgtggaaaacaatatgcaggatgaatttatccgtctcctattaaatgcctcaaagagttaaagtttttaagttggagggtcaaagaacatctatggaacaaataataatctatagatgtacaaagctagcaaatattttaagtgctaaaatgtgtggtgctggtcacaaatagcttgagcctggtgcctttgaccagccctcctgacaaacagcgaacgtgccaagtcctacaaggcaccgttgcagcccaggagagctaaaatctatgccctggaagaggtgaggacttgggatgaaccttgagggaggggttggggttgaagtgggaggagcatttcagtcaatgggagagtggataaatgagcagaggtgaagtgaacacagcatattctgaatatatcgcaagaggggtgcagactgggcgttatgaaggaaaaagctggaggaagatagagtgggaccagaaagtgaagggatgcagactgacatcgtaacaattcaaatgctaatgaaatattctcaacttgagttccctgcggttgtggtcatgggccaattgcagtattcagtttttatgaagacctccagcgtcttcatgtgtggtcctcaaatcctgaatacttctctcccagagcatttaccacacggtgctgctggtatgccagcctttctccttccaccgtgagccatttgagggcagagaccagaccatctccgcagcctctcaggctacagggtaccctgcattatgcagactgagagctctagaaatatttgtggcatgaatgaaagaattcatgagtaatagccgggcataaatcagaatatgcacttgaactgggctacagtgttccaccagaggccttccacatctaaatggaagcatcatggcacaaggtgaaattctaggtttctgaagaagaaaaggtaagaaggactctcaaagcctttgttaattaaaaacacacacagctcttcagggaacatttccctgcctcccattctccctcgttgtactgaatggcagataaggtggtgtcttcgcctatgctttggaccacatttaattaaatgcctacattactgcttcctcacacaccttattttatttcctttccttccttccatgctaaagagggccagggctaatactaatgcatatgctgttaaacctttttaattaacttcaacttctcccagagatttatgtttaaacagtaaattttttgttgatactcaaatacataggcggcactcggaatgatgtacgagtactcttgtcctcaaaatgattcttcatgagttaccaccagagacgttttcatgagcctcttttattaaaataataatactcagcaaggcaataatgctttacagccggcagctaattaacccaccccaccccccaaacaggtcagcattagcatctgcaggttcgcgatatgatcgcccagtgggtcccccttgtaccttcgagtcagcactgaatcggtctgggtttgtgctctagcatctgtgaataatgattttcatttaaaacacatctttgttcttagactgtagctcaatctattattattgttatttattttgttcttgtttagtgccttccctgcactgggtatcagtatttctgatctgcagttgacctcttgaaacaaaatttaaccatgccttggaaaatccaattgatttaaaactcttgtctaattgcaaaatccatttatttttctgcaactctaaatttgtgccccaagtatttttttttttttttttttgagacagagtctcgttctgttgctcaggctggagtgcagtggcatgacctcggctcactgcaaacttcaactcctgggttcaggtgattctcctgcttcagcctcctgagtagctgggattacaggcatgcaccaccacacccagctaacttttgtatttttagtagagacggggtttcaccatgttggccagactggtctcgaactcctgaccttgagtgattcacccgccttgggctcccaaagtgctgggattacaggagtgagccactgcgcccggccaccccaagtatttttaatcatgatctatgctgtcaattgtaattgcaatgtagcaattctttgccaacaaaaccaatctacctacccaagctcctgttcttttcttcatgttgagacaacgtttttccccacaagccaatgtggtcatatcacatgttgcaccaccgatgagccaattatttcaattttggcatcagatttaaaagagactttaatgatcctcaatggtataaactgaatttttattcctacagcaatttagtaatgatgatgacacttaagcatttagaaagtattactcatcttccaaccactgacaaacaggaggctcggcacttttcattttaggcacttttctaggcaagtctgatggggacctcagcatggacagcatttcacaatatttagggagcccaggctcacccctgctactctgccaggagctatagaaagaaaaatctccaagccccagtgcttgtctgctggggtttctagctggaaatcagaataagctcccaagccttgcatgcccgttttaattaacttgtctattcacgcatccaacaaatatttaatgagtttctgctaggtaaggaaacccagccccaggagggagactgagatatatgaggtatacccctttccctctaatcaaattcaaccccacccctctcaccagggtccaagttatttgaatacttcatttatgcatacgtttactcctttcattcagcaaacgtttatcaggcaccttttagtgtaaggtactctgctgggagcccaaaagtttacagcgaagatcaaatctgtcagcaaatccctttggttcttccttcaaagtaaatttggaatctggtcttcttgcccctccaaggctaccccctggtccaagtcacttggaccctgtgcctggatggcggccagagcctcctaattggtctcgcagcttccatccttgtcttctgctgtctagtttcaacagggcagtctgagtagtgcttttaaaaacctaagtcagagggagccgttcctttgttcagaacggtgcagagcattccatctcactgagaatgaaagccaacaccctctccatgactcatggtgctctccggggtctggcctcgttgttacactttgacttaatcttcactcttccttttgcttgcttatacagtttggatttgtgtccccacccaaatgtcatgtcatattgtaatccccagtgttggaggaggggcctggtaggaggtgattggatcacaggggtggatttcccccttgctgttcttgtgatggtgagttctcacgagatttggttgtttgaaagtgtgtatcacctcctccttcacttcttcctcctgctctggccatctaatatgggcctacttcccctttgccttccaccatgattgtaagttttctgaggcctccccagctgtgcctgcctacagaaccgtgagtcaattaaacttctttcctttttaccccgtctcacgtacttctttatagtaatgagagaatggatgagtgcacttgtgctggcctctttgctgttcctgaaactcaccaggcatgctcctgcctcagggtctttgcacttatgcagttccctctgcctgggatgtcctgtcctcggtccctcccctgcttcaagacattgctcggtggccaccttcttggggactgaccatcttatttaaaatgtgcaccccacgcctataggagtactttatatccctctccctgttttacctggctgtagagtgcctatctccatctgacatgattcatctttatttgttcatttcatgtctcctccactagaatgtcagccccatgaagtcttagctatttgttttattgactgatgtatcaatgcctagtgcacagatatttaaaatttgttgaacatatatatgtatgtaatgagtgcatgtaataaatagtgctgtgataatcttcaagaagcacatgatcaaataggaactatatctaaaaataaataatgagctatgttttaagaaagctagaaataaatatggtagcccaaagggtagaaaattcattttgcctggttgaatgagtggctaaaatcacagtcctacaatttcaggtgtgtcatgttggaaaatgtattagtcagttttcacactgctgataaagacatactcgagaatgggaagaaaaacaggtttaattggacttacagttccacatgggtggggaggcctcagaatcatggagggaggtgaaaggcacttcttaaatggagatggcaagagaaaaatgaggaaaatgcaaaagtgaaaacgcctgatataaccatcagatcttgtgagacatattcactacccctagaacagtaagggggaaaccaccctcatgattaaaattatctcctattgggtccctcccacaacacgtgggaattattggagtataattcaagacgggatttgggtgggaacagagccaaaccatatcattctgctcctggcccctccaaatctaaggttctcatatttcaaaacctatcaggccttcccctcagtcccccaaattcttaactcatttcaccattaacccaaaagtccacagtccaaactctcatctgagacaaggcaaatcccttctacctatgagcctgtaaaatcaaaagcaagctagttactccctagataaaatgagggtacaggtattgggtaaatacagccattccaaatgggagaaattgaccaaaacaaaggggttacaaggcccatgcaagtctgaaatccagtggggcaaattgtaaagctgcaaaatgatctcctttgactccaggtctcatatccaggtcatgctgatgcaagaggtgggttcccatggtcttgggtagctctatccttgtggctttgcagggtacagcctccctcccagctgctttcacaggctgacattgagtgtctgcggctcttccaggtgaacggtgcaagctgttggtggatctaccattctgggatctggagggcgatggccctcctctcacagctccactaggcagtgccctagtagggactctgtatgagggctctgaccccacatttcccttctgcactgctttagcagaagttctccatgaggttcccacccctgcagcaaacttctgcctgggcatccaggagtttccatacattttctgaaatctaggtggaggttcccaaaccccaattcttgacttctgtgcactctcaggctcaacaccacatggaagctgccaaggcttggggcttgcaccccatgaagccatggcctgagctctacattggcccctttcagccatggctgtagcggctgggatgcagggcaccaagtccctaggctgcacacagcgtggggaccctgggcccgtcccatgaaaccattttctcctaggcctatgggcctgtgataggaagggctgccacgaaaacctctgacatgccctagagaattttctccatcatcgtggggattaacattcgactcctcattacttatgcaaatttctgcagccagcttgtatttttcctcagaaaatgggcttttcttttctattacattgtcaggctgcatattttctgaacttttatgcttggcttcccttataaaactgaatgcctttaatggcacccaagtcacatctagaatgctttgctccttagaaatttcttccactagataccctagatcatctatgtcaagttcaaagttccacaaatctctagggcaggggcaaaatgctgccagtctgtttgctaaaacataacaagaatctcctttgctccatttccaaacaagttccttatctccatctgagacaacctcagcctggaccttattgtccatatcactatcaggcttctggtcaaagccattcaacaagtctctaggaagttccaaactttcccacattttcgtgtcttcttctgggccctctaacctctccctgttgccaagttccaaagtcacttccacatctttgggtatctttttagcaactctactggtaccaatttactgtattagtctgttttcatgctgctgataaagacatacccaagactgggaagaaaaagaggtttaactggacttacagttccacatggctgggaagatctcagaatcatggcaggaagtaaaaggcacttcttacatggcagtggtaagagaagaatgaggaagatgcaaaagtgaaaatccctgataaaaccatcagatctcatgagacacattcacttccatgagaacagtatgggggaaaccacccccatgattcaaattatctcccaccgggtccctcccacaacacataggaattatgggagtacaattcaagatgatatgtgggtggggacacagcaaaaccatatcagaaaagaactgcaatccacgtctaaatgagaaaatggttccttgctataggatttctcagctagactaagaaagtcttttgggaattggtgggatggtgcacagtttgtgtgtttcactgagtcttgataattattccaactgggaatccctctccatcttccccaaatctcacaaattccagtgataaactccactccatgtctcaaacagggactatttttgagaaccatgcatgctctttccagatatcagtggacagcatccaggggggcagagtcagtgtaatttctcatggctgattttgacaggagatgtcaggttagtcttagttatcctggagcctaactggatcttgggaataaatctcttattttggtagcactttcaaataagtggcagcagttcatgcataattacttctgaattatctaggggatttatcaggtttgattatagatgcataatgaatttaccaaatttgtgggtattatggagatattaattccatatgaaacctcacaattcattcatgtgccatttgttttcattccttttttataataagctaattagtttaaattatttgtacttgtacaaggtcttgaaacacatattaggaatgattataccagagaacccaataaatgagaagttttggagacagcattaattgtgatgaagggttcataaagcagtggatgttcaattttcccatttggggtggtaataacaggtctaatcatgacacctccataaagtcatgggaagtccctaatgaaagtttctgaattcagatatttaaatgatggtagggtaagtcattatgccaatgggagaatgaggcaaaaagcggagttcatccttgtgctaaccaaagaaaagatgaaatggtgagggctcatcaattctgggccaggaggaagataggcactagtaggtctgatctgtctggaggattcctttaaaaaaacccaaggttctggaggtcactggcaggctggaatttcagcccctcagagtgaagggatgggcttctttggttgagttccggtgtctgttaaccccccaccccttgttctttgtgtgaaaccagcacccactggccaaaaagcccgggttggggtctctgtgggttgatggatataaaccatcttctttacttagggcacaaagaagaaccaagacaggagaggaagcctgggccaagcctgcctagggagtctatcgtggtaggaacaagagctaccatgccttgagcccattctaaatggtaggcaagtgctagatatttggctcacacatttcatcctcataacagccctatggtgtagagaatatcattatctccacttcacaggtcagggggctgtggacaagaggtcaggccatttgccaaagtcctccactcaatctataggtagcggggctgggttcctaaggatgtctgattctgaagcctggtccttgatctctgtgctccatgaccttctgtaatccccacagtctcccaaacatcaatgctgtcattacaaccccatcacctacccttacccttaccacaccaaagagttactcttttttgaaatctgaatctcagattttcactttccaggcaattcaccaggacagaggcctttcaactttcctccctgagatcttcctccgtgaaccaacaacaaaaggaccagccacctcactggtcctctgttgccagtagaaaaagccctacaaggattaatgcaagaagaagttctgctttgggtgagacatcagtttaatttatatttgattaaaaaagtcattcattcatgcattcagcagccagtatttgttaaatgtctcctacactcttaattgggttttgtcgggttgtgggggtgggggaggggaaaaagagagcaggtataataaagcttatgccagacaccttgtttgtaattgtcttgtgaggaatatatgtacacaactgaaaagttaagtaaacaagagaatgatggaataactaggcaagtgagagaggcagacagtgcactatctacagaatccaacggaggaggcggtactggggcccgtggtggcagaggatgacggctttgcagaggcagaggaacgactgacttgctcagtgaaggatgggcagacttggggtggcagaagaggcaccagctggacccgcccaggaagccaagcccctgtgctgcctcaatttgaccttgtggggaatcactctctagagcctcaccgtctttgctgtaagatggagataatgatacctcatggggttgtcatgaaattcaaatcaagaaatggatatgaaatggttctgaaagatgtaaagagcaatataaacaccagatacggaatgagaaaaaagcggcaccggaagtggcattttgcaaactccaatcccccaggaccacatgtgaaggagctcttttcaaggtcacacggacactctgacccgactctctcctggcagcattcaatgtgacacgccagggcaatgagaaacgggaggggctgcgtgagacatggcaaggctgaggccaagccccaaagttcacggacattccataaaaagtgcacggtggaacctgagaaggtggagaagggcagggatgcccctggcacttttttcgtctctggtgctatcaaacagaaaatgtcacctttgttcctctatagccatttttagttgcaccaaaggggggagttgaaaaatagaccttgtagctgcctccatgcgattcaggggaaggtgataccacttctgcctagagggtgacccccacgcccagcacatatctcaccctcagtcacagcgaggccacagccctcgattctagaatctgatgtccttgaatctccctatcacgggctcccagtttcaagggcctctggacacatgaatttctactttgagaatcagtttggctgtgtttcggtatctgcattcagcttcacaaggctggtgagcgagggctcgtggttgggacacctgacagggcggggaagacctccactggggacactgattttattgctagaagttgctaaaggatgagcaacttagcagctaggacttttaccacttcagtgatagaatgtaaagtcaaccccgagaagatggatctaggatacctaaactgaaagtttttttttttttttttcacagcatattgcaatgcaacagtgaaaggaattttaaatgggcagcttctccttttctcctacctccaggcatctgcctctgaaatgttgaaggtggagggagataggattggcctttctgggaagacctctaagaaaggggtttccattgagaagaaactacgggtaacagttaaagaggaagagcatgtgtaatgtaggaagcgcttttgcttcagatagatgtccttccctcaccccagagcacagtaaccctaatgctatgtcctgcatctgtctggaggggttgtctagcctggcccacatcctgagccctctccacatgggcaaccacacagccgacatcgtgagaggtctgagcccctcagactcttgaaggtcaatggatattgtgtatcttttttctacactgcttcaatgcttttcaaccattatttttttttatttttttatttttttacaaccttgagtgttttaacgatttgcttctttaaaggctttgcttccctctgaatattatgactagcctattgggtcagaggccaggagtctgcagaggaccattcattcaccccagaggccgctccttgcttttatcctgtcctcaacatgatagctcaaactgccagattttacataggaggaaggaagacaccgaaagatgttcctagctggcacaggctgtgctgaacacaggtctcaccccactgtgggcaggtggtggtggagcacatctgtctctctccgtgttggtggctgtgatttggcagctctgccgaagatttgtgagatggagaagaaagtgcagggttggggtacggggaaaggggtaagaaaggagattagtcacttgagtcaggataatttttcctgatgtcaaagcctcacccaggagagctctcgctgttgcctgcttttatctggaaaacaatgtgagcagtatctctcaaaattaggtcagggcttgcagaggcagggacttgccaaggtgctaactgcctgaatcctcggtgggtttgcacagctctctgctctgacaaatgcctcctttgtctccctgaaaagcctgcctcttttctccttcacccctccactccccccacaaacaactgaatttggaaggttaaaaatcacttcacttgtcaactcgaaagctctccctcccacctcaagttgtttctcttcctgcccagggaaggcagctactgtgtgtccccctggggactggaaccactttgcaaagagcgcagatctgcagttttcacaacgcagttgtcatctcgggagcagtgtgtgcccgtccaccctgggagaggcttatgaaggctgtgtctcaagcatttcagggggctgcagatttagggggacagtcctggtggcttggtcttaggcttgtcttggctcaggtttctgtgtggcaacagcatgataaaaattctgtccactctaccaaaatgggagaagcaatagcaagacagcagggcagcaacagtcagttcttgtctggctttccaggacaacgtgactttctcttattttttgttcctgacactgtttgcactgactaagatatcacgatgatgaaacactgttgaatctaaaaggtgggtggggctgaaggaggggtgggaggaggccttagaagctaattagaatcctctagaagtgtgtggaaatgggaacctgagccaggagagtcctgtggattcactagattctgggactataccttatctatgctgtgcaaaggaataagaaactagtgctgtctcgggaaccagcaacacagatgttcccaggagcaatgtttgcaggtgagtgaggtcagggagggctacagagttaggactccgaagtcagaaagatgcctgttggttctgccgttcatatctgtgagatatcaggctggtttcttaaccataacctccatgattcagtttcttcatttgcaaaataatttaaataagataatatgttgaaaactcttagcacccaataagccttcaaaattataattgttttgtatgttttggcaagaaaatagaataatattattattggagtctctggaaaacctaggtttccaaacctttcaccttaagtagatttttataaaatgagacttcacgtggaatctcaacatacaaaattggcataagtgggggataaggcagcaggtgacagtggttgcgtgctcctgggcaccgcctgcccagcccctgcactgattgtcttacccacaggggcagtttaaatcttcatgcttttaccaccttatactgagtaagaagatgaatttgcacagatttctccctgcataatttctccgtatctttagcacagtttggtgatgacttttaagctttgacatcatgtactcataacctatctcttatgaaaataaatgaaactggctaggcgtggtggctcatgcctgtggtcccagcactttgggaggccaaggtgtgtgcatcgcttggggctgggagtcccagaccagcctggctgtcgtggtgggaccccgtctctactaggaatacaggggttggctgggcatggtggtgtgtgcttgtggtcctggctgcttgggaggctgaggcatgagagtggcttgaacccaggaggctagggttgtggtgagctgagatcatgccactgcactccatccagcctgggcaatggagtgagactgtgtctcaaaaaaaaagaaacaaaaaaaaccagaaaaaataaatgaaaccatgattttctctcacactgtattgtgtttaattttcatttgtttattctataaacatgacaggcttttgaactttgtattacctatatattttataatagatcatgcataatctctcaggagaataaaatgagaattccaaataaataattaaataaataaataaataaataaataaataaatcttcatggaatctcaaggctctgaggggcctagttagacaactgctggtttaaaatattagagaaatagtgggccagttccaaaaaagtagagccctgatgacatccagccagttaacatgttttagtaaccaagcaaaccaacccagaaagacatggatcaggagaaacctccatatgtggcagggcacaggtctgagaggtgagtgctggaggaaccaaggccagagtgggacaagctgtttagcaaagaagggcagtgtcattcctcttctcacccagtgtggggctgggacgtgtgggaactcagggcctgtagatgggttgggggtgaggtggagtagggagatggagacaatgacacagagacagtccgtccccagcccaaagaggactgcgctagcttgggagggaatgagactcagttggcatttctgcacatggtctgggtggacctgcgcaactctgattgtgtccatgtagaaacctgtgctgtgttcagtcactgtaatgcttttgtagttctatggctttttccccttttgcttccccttagttttcagagaaattccaatcaggctttactgctatctaccggaagagacaagaaggtaatttgaccagatcaagaccacccagcccagcagagcgcaattcatgaccagtccacagagctctcctcccggatcccatcagtttcacagagaagatggcattgccaaagcctggggctgctcacccaatccctttgtgtctgtcacagctctcccatttctggaggagtcgagttagcccctccttctcctttgaatctcttctctttaagactcgcagcttcaatacccaaatgctgccatgtctgtagtggtaatgcttggaataacaagtagttattgtcatacaagaagaataaggaagcttttgatgatctcgaataatgtggatatctacatcatttttgcatgtcagtgggtatacccagctttgagggaatggttatttttatacctttcaagacttggtatgcttaattatctagggaaactcataaccccaacttcctaagccactcctaaagaaaaagcacagatgcagtgactaaaaactttctggcctccttatacttcatctcagggctggaggtgactcagatgtaccttgctattttcatgatccattggtgtctcagtaatgaatgttcaccactgcagtgccctcatttagcctaataacctcagtaaggtaatgtttgatttgtgctaagtatctgattaaacaacataaagtatttaacctattgatcttttatactttgccagccctacattgctggatatactttaattactgactcggagagctttcctgaatgggatctgcatctcgttaagactttttctttgtctttaaggtgccatatcaacagcttctccttcttgttgcctctaggcttttcttccacttcctgctcctccgccagaccctgcttgattctgcaagactgacgtttggttaatctactgaaagtagagtcctttatgtaaccatgaatcttactgcttattttagaaagtcaatgaccacataaacaatcggacttgttactttgtccaccctgatctttggagcatgggaagttgtccaaagtgacaaccccattttaggcagttggtcacagctgttggatggacctaacccttctatctcacaaggagacgaggccagtgggcatccatcaagagaaattataggaaaccatttagactggccaattggttagctaattgctctagtctaaaccacttcttagaaaactacagaaaatgatacattttccctcttgcctgcaaggatatagtcatgaacgttaataataattagctgctttacatgctgtcttttcttcaagaatctcagacatggtgagtttatttattttttctcttattttaaaactagatctacaaaggctgagatagcttctccatgggtcctcccaaaatgagagtgacacctcataggattaagagaattcaatgagaaaattcatattgaacacttatcataatgccactgagtaagcactcaaaaaataggagttatactattagttattattagttatatcatctaagaagcctgcgacttgtgggttgcccatgaatttctgaatagagtcaggctgggaggaaggcacactggtccaagtgtctagttactttgtccagaccacctgataaagactgtctcaccctgtgtgccaacatcctttggtctctgctggcccatcacacataggtcttggacaaaaaagagtggtttgtggaggattaaaggtcatgaaaaggcgaacattcaccttcactcaagatgctgcccgaagtcagatcagaagcagagtcagaatggctctctaaacagcttctcaaaggatgccttccacgggctgatgtgcttgataacaatgcaaatgcaaggaacatgccccagacaactgaactggaatttctatgagcacagcccaggaatttgcaattaaatcaagctcgtgggtgattcttatgttcaataaagtttgagaagcatactactaagtgttgcctttaaaggcaactcgaaaacttgcagaaaacatctaaagaaggctggaggtggcctggtgcttattgtataagagcatctggcaagctccaccctctaggtggcattctggtcttgaaaagcatgataaaaatttggggttgctactaagcagggacaattgcgcagcttgtggagtggcttggagacctccaatagccctgctaggatctggggcagacagtgggcaccagccgatgccagggtatgtgaagggcaaaggaggccctttgggggaagagaactgtgaggccacaggactactgaaatagagctccatgcccttctccattgcctctgtaaataccctggggatcacttttactctattttctggcttctctgtcacttgtggtgcagttgggatgcttactttcacttccaaatgatgatacctcagagaatgcaaactgtaatgcacataagacacagacaatccatggaaaacatgatactgctgagacgtaggcacatgttcacactgacgtgcattgcatcattgcatttgttccaaagccggtaaaaatgattttcagataatctgctattttggatcgtctgcactgctgcttgcttccattagcatggctaattgagaactgactgtgtgtcttggaccatttccaggaagggaacccattgcctgtataatacaggctccctgagagagccaagtaaatggctggaaatgtcaggttgaatgcccacattggaggagcaaacttttgaggacgacctgaccattctcaggccagagaagcaatcttgttcagcatgtcacattgattgccaagtcagtaaaccataaaactgtcccacagctagaacatgcactgactctgagaaagatgaggcttggttagtaaaggatgaagccattccaagaccaataaaagatgcaatatggttttccctgggctgtatattaacaccatcctggcagctataggggatagaggcttggcaaacaactgtgttttgctttgacttttgcagagtgaggatgagatagaggccaatggggagatcatctgaggccagatgaaaggcttggaaagagtaagtctttacagaaacctagtctctaaagaaaccactgatgtttatgtgtcttggccagtgtcttctgtcatataacatcttggtgaaataccccaaatagatcttaaaaccaaaacatactaagaaaaaaggaaaatagaaagcacaatgttgtaactgccttctgggtaaccatgttttggatggtgtcatttttcttatgacataagctcccagatggcacagacactgtgtctcagaaaaaatagcaactagcagagggtcatgcctcatgtgagtttctgtaagtattgtttggttgtgtgttgtttatcacaaagagaacagatactattgtcagacaatctcaccagctgcattttgcaagaagaatgagagaagtcccctacaacttttacaattctgtgttctgtcccaaataacgacgagagatgaatcacctgggctgaaggataattgaaggaggaggcacattactcaagaaggtcagaaagcctatgtctaggattaatctgtgctcatggaatcgtttctatgtgttgctaatagctagagggtctgctgatttcatctgtgcccagtcaactccctgggcccacctctaatcaaaagcagaggacataaactgtgaagatttccaggatggatttctgaggacagctgtctatagcttcagatatggcactagacacagtggtgctcatcattggctgcatgttagaatcacctgagggagctagaaaactatggatacccaggctccatccccagagattctgatttaattggtcagggatgggtcctctgtatgaataattttaaaaatcacctaggagattttacttgcaagcagggttgagacagcccgagctaaagcctctttagtggtatgagggaaaacaggaggctctggctcagttcacaaagttgaagatcaaacccagccttcgaaacagcattcttcttctttacaggatgacaggaaataaaagactgtgggagttggggtttgggtaaagaggaaagaagggaagggagaaaaaaggagagagccaaaacgcccattgagaggaagggaataagattgattttcccctagtagtttttattcaaccagggtctgaaatgtgctcagtctacctcatgaaaagtgtgtcacccagggcacactggtgtttctatcgctagtcacagaggcttcgggcaactgctgaatggcagcattagggacccataaaaggaaaaatgcattgctatgactaagagcccattaccataacaattgtaaatgactttggggagtctgcccattgaccatcaaagaaaccagaaaacggggccaggccccttggagagcactagaggcttatgaaagccatgcactggtaatgttagtgtcttagtcccttcgtgctgctgtcacagagtacctgagagtgggtaatttataaaaaacagaaatttatttcttacagttctagaggccgggaagtgcaagatctagaggctggcatctggtctggtgagggccttcttgctgcatccttatatgcagaaggtggaaggcaagctagaacaagttagccaaacactgcataaagcctcttgcataagggcattaatcccattaatgaggaaggaagtctcatagcctgatcacctcttggaggccccacctctcaatactgtcacgttggcaacacctgaattttggaggcgattaggtttcaacatgaattttggaggagtccaaaacattcaaatcctagcagttggagatagcaaagcacattgtatgatgtgacaagaaagtcacatggaggcagaaaaagaagaagagacccagtgggtcaccccaacttcaaatgggttctcaacattaactttctagagtgtaggattttactttttccaaagtcctttctttttttttttttttttttttgctccatctctctgattcttactcatgtatttctactcagaactggagccaggaatccatactccctgttcactgtcccttctggcagaaatactatggaagagcagatgtcagtgatactgcccgatcttggcaagggaagaaccagcaagaagagtgcagggcatctccacacgtgggactgatgagcatggggagtgtggagtgtgagaggcaggagagggatgtgggggaggttttgatatcatgtctggctttttttttttttttttttttgagatggagtctcgctctgtcacccaggctggagtgcagtggctcgatcttctttcaccgcaaactctgcctcccggggtcaagtgattctcctgcctcagcctcctgagtagctgggactacaggtgcatgccaccacacccggctaattttttgtatttttagtagagacggggtttcaccatgttagccaggatggtctcgatgtcctgacctcgtgatccgcctgcctcggcctcccaacgtgctgggattacaatgtctggctttaacaagacaaagcttttgatagtttatctcctgcaattcctggttttctctaaggtggtgctggtttctactacacagggagagggatccacttgtcataattaaaacatctcatggaagcgtatgcttctgtgctttcctggaaaatgtactaatagctggggatggcaggttcccagggaagtggcacatgacatgtcaggggagtccagcaatggggaggcacaactcctaggcccttagatttgtagcctctgaacccattgcatcctggagccagttacagatttcatctgagggacaaaaggagagtgagagacttggaggctccctttggagctctctggcaattcatgattgttgagcaagaaagatggggaatgaggaattagttttcactgaattgccacagggcctgctctgactataagcataggagagccaccccagtcctgtaaagccctagagttgggctagcaggggaaagcacaaggtctggagattggaaggaattttcctgagagtgtgtgtgtctgtgcttttgagcctgtgcccctggcacaagggaaattaaccagactctgcatgttgtgggaattctgcatggcaacctaatagaggcttagcttttcattaaaatttccattaatactggagctgtttagagcaagttgaatgggaatatccataatgcacctcctatcctctattaccattctgaggatcagagtgaggtttcaggcttttgctggggccattagcattttttttttttttaccatcattatgatcatcaacccagcaccaattatgtagagcaggcaaagtacaaagaggctcacacagaacctatccttgtcctatgtgacaggcagggcaagagtaagagagcaggcacgcagaggcagagagtgaagtctagtgagaccacacggacatggactttccagtgttgagaagcacctccttcctcccacctgcctactctaaatgaaacagctctgtcatactgggctagagcaatctcaggtgcagggaaggcatagatcttctgttggaactggggatactgaaagggatgaagaagttcggcctcacctcttgaggatcatttctacagcagagctgcccagaggatcaccattgttaccagctccgatgtgcccttcctgcatgccaaagccagttctctcttggagatggccactgttgctctctgggctgtgggacatctaggaagctgatgtccttgtttcagggtcctgggaggctgtttcaatgacatctcatagagacactttcctttctaaccctggctgcagcctcatggcactacttcctcatctatgaacctcttgtgcccttagacaggggggcattccctgcctcaaccacaggtagctggagctcattctacagtgtccagagtgaaacctgtcccctccaggcagaatgaactgtgctcttactctgcagccttcgacacattattcataacatgatgattattttggagtgcgttcttttgcttctcacaatgagcagacactctactttatccagcttgtatcctctatgctaagtgcacagcagattacatggtagttccttataaattttttaaaaattgttgtagatttccttccacctgcctgaggtgaggctcaacactgttactgatgaaacagtccatgtgtggaaaaacagagcccattaaaaagaaaacccaaacacagctaatagtctgggaatggtgtctgcaggatgatgcagttgacacattctgtttgtgccacacgtgtgttttgtcactgagactgccagctctgaggggaaaaattctactataagaatatttaaaataagattgagtacagtggctctttgccaggtgtgtgtttcaggaggcattttaatgagaacatgctgtcatggtctgaatgtttgtgtttctccaaaattcatgtgttgaaatcctcacccccgaggtgatgctattaggaggtggggcctttgggaggtgattagggcatgagggtggagccctcatgaatgaaattagtgaccttgtgaaagaggccccagagagctgccctcttccaccatgtgaggacagagaaagaaggtgccatccatgaaccaggaggcgggtctggaccagacatcagatctgccagcaccttgatcttggacttctccacctccagaatggtgagaaatacatttctgttgttcagtctaagatcgtttgttactgcagcccaaatggactgaggcacatgcttcagccccagtggtgaagagcacagactttggaaacatgctatgtggacctgaggtctgcctgcaacacttagctgtgtgacctcaggaaggtttcttaatctctatgtgcattcatttttcatttgtaaaactggaatcataatagacccatcaccttgtgccattgtgaggatgacatgaggtaaaaatatatacaaacttagagtagtttatacttatactgtgtcagtctaaagcgttgttgctattaatgaatcagaaagcctggaactatgatctggacctttttattttgaaggcgctcctcggagattctgatttgcatccatggttcagaaccacttgcctactgcattgtctgtatcatagaagttgaggaaccattaagcattaataaataagtgcagcaggatcttggttccgcaggaagagtgtggattcttggaatgcaattgtcatgtggcaagttatttcaggttttcttgttatcctcctccctgtatctataatggacagccttgggttttacctcctgtccaggcacccgttcctctttctgcagggataagagtgagcatggaagtacttaagcaccagggaaaggggagaaagaaaaagtgggggtaatccaccaactgtctaaccatttcctgaaaaatagagggccaactaccattagagctcttagaggattgctgagccttctaagggtttaccaagaagggacaaatctaatgataagaaagttacagccaagtttattgaacaataacccatttccttcatgtagaaacaatgaagaaacattttttctcacttacatggcacaaggaaaacaatatcaatgatttgtgctgcctgcttgtcgagtctgtttaccaacttggcttatttttttactgcatgatatgaacacttagggttaaacagagctctctttttctctctggtgaggtttttgcttttcccatttttatttgtattgactaggaggtctttcaccagaagaataaaagaccatgcttttgaggagccagtcactgagtttctctgttgatcaatcaccattgctggtacaggtatattcattttgggtctgggatggatacaggtttgatgaaaggtccctggggaatgagagggcttagccaacagtctcagggtcagcatttcctagtcctacaagattcagatccctgatgtggagccaaggaaaggcttgagtgactaggggtctttttgaacaaggcactttaatttgccaagaactctacatcattttgtacaatttatttcagggagagatatcactttaagctaaaaaacaaaggaaaaaagctccagactactccatgatggaggacaaagcatctcagtaaataactttgaaagtcaagagttacaggaaataaaaaaagaagacaatcagagaatgtgccactaatgaattcaatcgcagcaaaagtccatttccattcccttgaactctacacaatttccagttgcaaatatctttcagaagtactgtacacacacagttggatattgagttgcttgacaaacatttctgatcaaaactgcttgcctagaaatggctgctggagcaacaataatgtggatttagaatgagccgggctgtttgcacataggtgtagtctatgagtttaatggagttttgcagaaggcaattgcctagaaaatagtgggtttttaaggatgaacttttgactcccaatgcgaggtgaagggaagatcgggggagaatagggagagaagggctgtcttttctgttttctctggggcaccatggctataataacttctactttgctgtgatggactcagcaatcaatttattctacgatcttttcccagacacactctcaactcatgtcggcttagttgaatggtcaccctacctggattctgagacccttcttggggcctcaattgggatatttacagcttccatttttgagaagtgtgtgtgtagaggcactaatttaagaacaaaaaaggccagtgacatctagggaaatgtcttcactttgggcaggagtgggatgaccctctgaaagctgcacaaaaggccacagatctggccgatctgaggagactggtgttttctgatcttgggacaaagcagttaaaatcctggagctcttgcatcttggagaaaaatcctgtagcttctttctctggggcaaggggcaaggctgtttggtcacactgtttagtgattcacagctgggaatcttctgtgtctgaacaatttcagcccctcataaggggttgatagctgagcccctgtgtcttagtcagtttcggctataacaaaacaccataaactgggtggtttataaacaacagaaatttatttcttacagatctagaggctgaaagatcaagatcaaggtgatggcagatttggtgactggtgagggctggcttcttcataggcagtgccttctctctgtgtccttacatcgtggaagggacaagaggcctttcttggacatctttcataaaggcactaatcccattcatgaactccgttttcatgacctaatcacctcccaaaggcctcacctcctaataccgtagccttggaggtgagaattttagcttatgaatttgggggaatataaccattcagaataaaacaccctggctatagaagagaggtggcttttcctctccccagacagcttccctttccccacagtccaaccggctgtctaagcttagggagctgcccctggggaagaggagccctgtcaactgcacccggaatgatggcctttcttcctgttcttcctcgttagtttcttcccacttctctaggatgacagagaggccccccttctcggttttctcagatagcatgccatttgctgtctcaaatctataaagagctgttgggaagtttctgtttttctttctttctttctttctttctttctttctttctttctttctttctttctttctttctttcttttttctctttctttctttcaaaaaagttcaattctcctaggtggctcacctgggcttttaataatgtttggctccattttaaacccctggctctgagtgtgctgctaagaatctattcctataggcgtttggtcattgcagggttaagaaaatttgagccgttcctttcctgcctatgttggggtgctgggtactgacagtaagagtgtccaggatgagggaatgcatgtttccagtgactcctgaagttttattcacctgttagggctttccatcccaattttcatccctttttgacaattcttggtaaaagctttgcaagtatggagctaatcaaaggatttctggctcccaacttgtctgctctttgttttgtttttgctttggttttttgcttctctggggtatgggtcttcatcttgtttgttatggcaagaattccctttagtgactagtgttgggagttgttagacccattgaacagatgaaaataaaaggggtctctagatctgggatcctggcactgagtgaagttttccttcagcgtatttcaaacacgtgcaagatcttcctccttccctgagacacttacctctcctttagttctcaggtgttggatcatgtcctctagaaaacttttccctatttaatcccatgtatttttaacccactaacataatccccaatgtttccatgtctttagttaatgcttgtaatatctatgtatttaagggcttaatcatgggcggttagatttttaacttctggttcggactaatacatcttttccagtgcatgggtacagatctcagtagcacacatggaacatttgctaactccgtggttgactcattcaagccctcccacgagtcagattacccagtcagccagtaaatgttggaggactcctgcacttcctcgtgggcttttctctcttctccatttacatttttctctcaaggttttgcatgaaactccaaggctttaaataccattgagatacagatgattttttaaattataaatccagtcttgacctatcccttgggctaaagatttgtagagtcaactgtcttcctaaatctttttttggaggtctaataattaccgaaaactgtaacatgtacaaaacagacttgtagcccccaccctgcacatctgtctctctcccagtcttcagcatgtcagtgcattgcagcaccatccaccccgttgctcaagctcatgcctcagtctcccctgactcttcccattccttctcccagcacattccacacaccagcatgtcctgttggctcttgtttcaagatacatccagaatctgttcacttctctgcactgccactgttccagtccaagcctccatcaactcttgcctgagcttctgtattagtcttcccaactggtctccctgcttctctccttgccacctaaaatctatgccccacatagcaggcataatgattttaaaaaatcagcatttgaccaaatcgaatggctgttcataataaaaactatcaaataactaggaattgaagagaatttcactaacttaatataaagagtataagaaaaacctagagttaacatcatacttaatggtaagagactgaatgcttttgtcctaagattggaacaaggtgagaatatctgttctcaccacccctattgaccactgtactggaagtcctagcttagtgcaataagataagtaaaagaaataaaaagtgtggagacttggaaggaagaaataaaactgtctttattctcgggtaacataattatctacataaaaaacccaaagaatctgtaagaaaacacctagtaagtcaatatagcaagattgtaggatacaaggtgaataaacagaagttaattttttcaatagaaagttggaatcgtggtaagctgcctaccttgccccacccttgggggctacattttagcttttactgaatggaatgaagaaagataaatacaaatttgtgtctttaacgaagaaaaaattaactgctttcctccataccaaaaataatctcaggaagtgattttgtagatacaacaaacttaatgtaaattttgtatagaatggcgaaggacctagaacagtcaccacaatactaaataagaaataagttggaggactcatactacctgatttcaagacttactataatataaagccacagtaatcaagacagtataatactggtgaaggaatacacaaatagatcagtggaacaggatagagagcccagaaatagacccacacaaataaagggacagtgttttcaacaaatggtggaggaacaattggccatctatattagaaacagagactagacacagatcttacatccttcataaaaaattgcttaaaatgaattatacacctagatataaaacatgaaacaataaaacttccagaagaaaacactggagaaaatctatggccttagattggtgatgagtttttctccttttttttttttttttgagtcgaggtcttgctgcactgcccacaccactcttgaactcctgagctcaaaaaatccccctgcctcagcctcctgagtagctgagattacgggcatgagccaccatgcctggttggtgatgagtttttagatattacaccaaatgcatgatccataaaacaaaaaattgaaaattttggctttattaaaattaaaaacttttgctctgctgaagacattcttaacatgtgaaaaagacaagtcattgaccaggagaaaatatttgtaaatcacatatcagataaaacacttgcatctaaaatataccaagaatcctgaaaactcaacagtaagaaagcaaatggtccaacttaaaaaatgggcaagagatctgaacagacacttcaccaaagaagatacacagatggcaaagaaacatatcaaaagatgatctatagcatctgtcattagggaaatgcaaattaaaattacaacatacctctacacacctcttagcatggctaaaatccagaaaagctgacaatactggcaaggatatggagcaacaggagctctcattcattgctgctgggaatgcaaagtggtacagccactttggaaaatagttttgagagtttcttaccatgctaaacatagttttaccacatgatcaagtaactgcagtcctagatatttacccagctgatttgaaaacttacgtgcacacaaaaacctccacgagaaggtttatagtacctttacttgcaatcatcaaaactggaagcaacaaagatgttctccagtaggtgaatgggttaataaacttgggttttttaaatacacaattaagctataattaatagcatgccccatgcataatcacagagtaaaacaagaaaggcccagcccattaggtcaaacatgctgagtgttgtggaacagcaaaaatctatttctaaagacttgaacagtagctggaaacataaaagttcagattattggctcagttggacttgattatatgagactagtgtgtatataaagaccctaaagttgggagggtatgtttaagagatacatgaaaccagcaggacagggtggtgctgacatcactttactacaaataaagttgttataaatccatatagtgggatactattcggcaataaaaagaaatgagctatcaggcgacaacatggatgtatcttagatacatattgctaagtgaaagaagccagtctgaaaaaacatattgaatgattccatttatatgacacttgaaaaggcaaaactatagaaaaagagcagtagttgccaggggcgtgggcagaggagagggttgaatagatgaagcacaggggatgtttttaaggccgtgaaaatattctgtacaatactgtaatggtggtagggtataataaaaatatacatattggatctttgtccttggttcccagcatggagctgggaggatacaaagaataataccaacagctctgagagtacatagggaatttgctatctagtcaggtacgtgttacagtgtctcttttcttctatgtccagtgagttcctcccttacttgttaaggacctaaactaacaatctagttaattaaccaaccaattccctcactcgtatttgcattagtgtttcaattgctttgcgttaaccttaagtttcaaaatttcttaagccggttttcagtaatctgcccttcatcaaattatagaaagtagcataacaaataggcttgagtttcctcatctcctggccctcctccgtctctggggaaaatattaaagacagaaatggtcccccagtgtagagctggagccaggaagcaggaatacagttgagggctaggataaccaaatgaaaagcagagctgggtgttgggcaaattggttgtattccgcgaatgcagacagctacacctgcaaagacgcaggaatgcagatgatcagataaaccaagttcaaagaaatgaggccacacttggctcgaaagagcggagaggttggtgggtcagtgagataattgtgctgcttgttcagaatctgaaccagtcccgtctgttatctggtcaggacaggtggcttgcaggcagagtttgggctcaggcaggtggcaccaagaggaaaatttatggatagacctttaactctggtcactttggagcccagcagctctggaaattggatccagatggatagtattttgatagcttctcctaaccaaggaatttatgctgattttcaggacccaaggggaaggaggaagctcctaaaggcaaggaattcataattgcttcttaccatgtttccaaaattcatctgtgttttcactcaccaccacagtcagggctggcacagggactggggaatgaaaaataaatgagggctcagggcctcactcatcacacgtgtgccttccatgggatgtcctggagcaggacagggaggagtgtggggaatagtctcctaattcaggaaaaagtctaggttgggtctgtaagatcttcctccactgagaaatgtattaatccttgccctgctcatagaagcaatgaaagaagctctaaacaccgggatggatgttcctccctccacatttgggtttttgcgtgagttaaactactggaagggtggagggttctccctctgtacggagctcagtacaggccaggagggcccatctatgtgaacacttctctgaaaatgaagctacttctggtcatagctctgctgttaactgtgtaatatgggtaaccccttaactgcctctgggccatggtgtcttcaccggacatttgcatgagagccagaggatggccaggaccctttcaagctctcatcttcaatgctcctagaatctccgttggaaaccatttggctctgctggaatgttacagaaagaaggcaagggcaattcttcttttctcatgaatgttttgggaattctgttgcttggaagagacttcaaagactgtatcttctgcttctctgtgagattcatctccaatttatgtcacaaggagatgggattttgaaggcatactaggtgatctccatccaggttttcatagcttttgcaagcacttactgagcacctgctatgtgccagaccttgttctcataagtcctgatttcatactaagacatccagacaaagaggtagcataaacaaagggcttgagccagtaaagatgataagcaggatgaagaatactgttgctcagtccccagtcagatagagcatccaacaacagcctgcccagctactctcagaatcctgacactgtggcccagtgcccatctcctttcctaattccaagcaagaaatcatccccaatactgacattcaccaacagcccttgcactgcttggggacctacaaaaggagattcttttcatttctcttccaaatttcatggcaagggcatttggaggagttagtggagaaggatggcaggggctttgagttgtcatcttttcttaggagctaagaattttaaattgtacttaattgctggtcacagtcaatggattctaagaatctgatgtgcttaccctgcacactcccaccagtccctcagcctgggccagccataaaaacacattactggtgtctgccatttggatggctggaggagatggcgtagtgagttttatttttacctgaatagtggggagccagctgatgtggtgcacctcgtgttaaccaataagcacctgatgggatttgcctcacgtcaagaggaagaaggggctcttggctctactgggccacatcccagttcagtgtttgtggaaggcattcaccttggagcttgttgcctgccaggccccactcttagggcctcttcgatgctggggagaatgatgtcagcaccacccattcctgctggtttcatttatctcttaaacataccatcctggcattggagcctttacatgctagtctcatataatcaagcccaacagaggcaatgatctgaccttctatgtttccagctactatttatgtctttagaaatggttttctacattccatagcactcagcatgtttgacctaatgggctgggtctttcttgctttcctctgtgattatgcaccaggcatgtaattaattatggctcaattctatattttaaaagcccacaactttggactgagattacaatgaacaacatttagcattggcttacctctgctttcacgtggagctgagagatggagttaggtagtagggagtgaagtttgttatgataggattgaaacctgcaggcagcagtattagataatttttctctagctggggatctgggggtggtggagaccaagaggtcaatcaccagcatgtaatgtggggccatcccaatgcctactgtcgttgccactcccaagaacaaagagcctgcttcctggatgactgggagccaaccatggtggaagtagggagtaaaaaggaactaacagggtcagctcatgaaaggttttgtaagccaagcataggaatttgaactttattctgtaggtaaagggaagtcatttgaagcagggaaatgatcacttcagcagctgtatgggtaatggattaatgaggagagactggaagcttggaggccacttaggaggccacagcagtaatccaagcagagaagaggaagctgtttaataggcagaattgaatgaacgtgttgactgaaagatagaaggagagggaggtgttgatgactccatgcttttggtttgagaagctggatggatgatgatgttaacaccaagaataagaaatccagtaggagggagaagtttgagaaaggaagaggatgccaggtccagtttgggacatactgaatttcagatggtttggggacattcaggtgtttcattgtttggccatgtaggtctagagctctgaagagagacttcattagagattacaagcaggggtgtcatcagcatcaaggtgctagtaactatcacgggcaaagatgaaatcagctaggaaagaaagcacagaaccatcaggagggaaacactcagggccaggccgaggcagagaagcttctggagggcagagactgagaagatgctttcatagcctggagtgaagtctgtcccatctgtcctatctcagttcaggctagaattctctcctaccctggggcctctctagtcccccagggccactgggctggctctgcagttggccacactgaggctgttctttgaccagtgtttctcaaatttgcacctgcagatgttgtattgttttgttttgtttgagttggggggagatgctgcgagtcctttaaagaacctcccatagcagtctgtgaatacgtattctgaggggtctttgagttctcaagttcaggaaactcagacgtggtcctggactctccttgcctggacttgaggtaactgccttggcctccctaagccaaagatgcatctgggccccatatgcgacccagggcttcccatggcaacatgtggtgttgtttttactactgcaactttttatttttctttagagctgattttttttttttccttttgagacagagtctccctctgccatctggactggtatacagtggctcaaccacaggtcaccgcagcctcgatctcccaggctcaagcggtcgtcctgcctaaacctcccgagtagctgggactacaggcatgcaccaccacaccacgctaatttttaaaaaattttttgtagagacagggtcttgctgtgttgccagggctgatcttgaactcctgggctcaagtgatcctcccgccttggcctctcaaagattttttttttttaacagctgtattgagatacagttcacatatggcccacttaaagaatacaattcagtgatttttaatatattcgcagatttgcacaaccaccaccacagtccatttagaaccttttaaaatcaccccaaagaaaccctgtacattttagctatccccttagcctcagcctctccctccccatcacctgggttttaggcgactactaatttactttctggctaatggattaatgaggagaggctatagattcccctattctggacatttcgtataagtggaaccatagactgtaactttttaggattgcacgttcccatctgataaccgaatctccattctggagaaaggatgttggcatagtctgggtgctttgctatctattatctcctctaattctcaccacctctttggaaagccagccttatcaaccccattttagttgagagtgctgaggttcggaggtgaaatgacttgtcagaggccccagggacagtcagtggaagcacgctgaacagggaggggcacccagctctgtctggctgcattcgctgagctgtcgctgtgctaggtgctgaagcagggctgggatgggggtgtgaagacagaaaatccaccagcagctcgcacgagtgggtcctcccagaatgagtccaggggagccccctggaccaaagcaggacagagctaattccaggaacaactgcacatttgtccactggttggagtgagcctcccccttttactgcatctccacgaggcagaggaagtggcagtggcctgagccctcagatacctggtgccctgggaatgttcccaaccagatgattatggctgttgtcaccaccaagccctgtcttgtcatcagcctcagtgtcaggccctgggacccagagacacaccccgtccccaggctccagcttcatggagcttcagaatcaggccctgttacacccactgcagggaacttatcatctcattataaaggataaggcatattttttcagtatggttatacgcggtaatgaagcatgcaggaaaccacacaagatagatggcagctttcactagtgaagctgaaaacttggttaccttaatagtctatttattacattcactctctgagcttacagcacctgattaatatctcccatcttctcccttgctatacaattaaaactagtaatatgtgattgcacatgctgactccagcacagatgggtgtgtggagttgaaggccgagataagaagtgaaggggtcaggcgtggtggctcacgcctgtaatctcaccactttgggaggccgaggcgggcagatcacgaggtcaggagattgagaccaccctggctaacatggtgaaaccctgtctctactaaaaatacaaaaaattagccaggcatggtggcaggcgcctgtagtcccagctactcagaaggctgaggcaggagaatggcgtgaacctgggagacggagcttacagtgagccgagattgtgccactgcacaccagcctgggcgatagagcaagactctgtctcaaaaaaaaaaaaaaaaaaaaaaaaaaaaagaagtggagaaggaatgttcttcctgggtcatgatagaggagtcagatcccttgctggtaagggagtgatcttacagaattaattacactcgaggagaaaaggaccctatgtccactgcccagtctcacccattgccgtggcttctggcaggggagtggtgaagcctgcacagagagaggatatcagtggaggtggccatacggcctttaatcagcaaaaggaaagatggctggactttaactcatttgcttggatgagaatgtttgaggttgaattcgattacaatgatgtagctactcaaaagccgctcccaacttcctgctcccctgcccacctgctcctgaagagctgagcatttggccaagttctgaccaatgagatgtaaggagaactctgctgaggggtttctgggagagatgctttgctttttgacaaaatggcaagtcacattatgagaacttgctggtgctgccctctgccccttcttcctgaatgtggatgtgatgactgagtttgggctgccatcttgtgagcatgaggatgaaaacgtaacatgccatggatggtggagaatcaccagggagagcctaggttcatgattacatcacccagctgacagcccaaccctggggtcatctacttctggaccttttgttaagcaaacaatatatagccttgtggttgaagccacagttagaagggcattatgttccttgcagctgagaaacatacctacataatctaaatggctccatttattgagcagcatatgcatgtcctttgctaagtgctttgtgttcattttgaagcttcaaaacatgttccctttaagggagctactatgacctctgttttataaaggaggacacgagttttaagtgtataaggtcacacacctattccaggaaagagcagagctaagatttgaatccaagtctttctgactagagagttattactattaatcataatattgtgactttgtagacagttcatctcaacactgaactctgggaatgagtgttacttaaagtctggttggcataatagtactcagtataaatcacgaagtttttccacatgacccactaaaataaggtgaaattcagtcttattggtgattgaaaattgcatattttttacctgcctcaacccactccaaatagccggggttgaaattagtttagctaacctaacttgccccagccaattggatggccaaaaagtgaaatgtgtatgaagggaaaaggtcccagagagagaatttgagttaaaagaccaccagtccgagcctgtgtgcagcccatctcatagcttttgagtacaaagcaggaagcctctccttccgtggcatttgaagactcagagcaaggttaagatggctttgaaacctgggtctggttctcccagaaacacttctgttgcttctcctcattaaagaaaacattccaagtgtgcaattgttctctgagatgaatttctcaaaacacatgtgaactacttgagactattctaattcctggaggtgcctagtcagtgctggccatataacagatgctcagtaaagatcggttgctttcatgaccagtgagggcaacagaaaaaacaaaagatctcttaatgaatatgattcatcctcctagcctcagtgaaaaggcaaaaaataggctgctttcttggaaacgtgccagctaatggtacttagcatgcaagggaccgcgtactgatccatacccattagcccaatgctcatcaactcttctactggagatatatatatatatatatacacatagccagcagccaacagagggacttggccacatgctgattctctctcccctcccagtccatcagaccattattcagcaggaggtagtagggtcttcccctccctcttatgccctttagggcaggagctatctagagagggaaaaaaagtcagaataaacatatgcaaggactggggtttaaacatcccatgaagattaacttatctggagtaattgccttaactaggggatttttaatgcttttcaaagttttttagaggaagaaaaatatgcagaatgagtcttaaagcagccaacagaggagatacttagagcaaaaaaaaaaaaaagatatcaaccataagaagcccatagctaggaaattttaaggcactgattctaggggatttaataagaatgtaatttgtataattaaccattcatcaatgtcaatttcattaaatgaatgccagaaatattaccttcagcagcacgacctaacaggattgaatatattatatgaaaaatgaacacttagtggtttcccccactgctctgtctgtcacagcaagatttgcaaggctgagaaataatttaaagggtagtaaatgaaaccggctaaggcaaatgtgtgcattttggtaactaacctccgtcatgatgtatgagagttcatgtcaaaatgttttcctgcagcaatgactaaagggacttgtagctctctcccaggtggcaaaatgtgagaaataatgccaggaacttcccaaaggtcccccttgtcactcgcctggatacagcttactctttccctagataggctgcctagggtctaagaccagaagccatgtgtttttgtgtccagaatttgtagaccttcccttcatacctccaggttagccttacatccaatcacttgcctacctgtccaggaaaagtgatgattgatgtgcaggagacagaaatcattctgagttttatttatgttattgcctacagtcatcaggggagcacgaagcttgaggtaggtgggctgatgaaatatatgtaaataggacttatttccaaggttgctcatgagggaggcagtttatggagggaggcagtttatggggatttatccatttcagtgcatcataggaaaagtggaggacttgggagcgggggctgtagtaacttgtccatgtgtgtgctcctgggaatgtatatacagacacacacacacacacacacacacacaccagatcaagcacacactggagatcagtgcttgagatttgcaaattgttgtcactggagttggcctggtgcctcgtgtatagtaggtgatcaataaacatttgtttaattgaatttctcttagtgttaactccactcccattctcttctgtttcagggttctatgaggctgaaaatattggatcagtattcctgaggaatctgcgtttcagaatcccaggtccggaaggacaagaagtactttgcaaacaaatcaaatgtacgtttaggaagatgaaatcatgcaacagaaagatttttcagaatttttcagcaacagattttacacacaattcagaaggaagaaagaacagatgagtttgggaatcaggagaccagatgtcaagactggactacatctttatattcatttccagatttaaagttctatgttgtattttatttgatgcaaagcaataaaatattcctccctcctgtgaccaccgaaaaggtcatatttaggacctgggtgaaggaagagtgggcatcacagagctgctgtggagtgtgtgcacagattctgtgtactaggtctgtgggctctgcaagactcaaaatcaattgctgaaacacttcttaaatgtgttccctcctatgcattctgctatgcatagtcgccctctcttccttctaggttagagtgggtgacactgagcatgtaacttaacctctctgaagcacagtttcctcatctgcaaaatgaggatgataatatcctcctcccagtgttgctgggaggatgaagtgagatgaatctggtgatactgagtaggtgtgcaatcaatatttgttttttcctgccactcctttaccaggccttttttcacctcaaatgagtgatgacctctgagtgcggagcttttttgtcaattttttaaagacagtggtccccagcatttttggcaccagggacaggtttcatggatggcaatttttccatggacctgggtagggggtggtttctggatgaaactgttccatcatagatcttcaggcactagttagattctcataagagacacagcacacagcctagatccgtcacatgcgcagttcacaacagggctggtgctcctaggagaatctaacgcctctgctgatctgacaggaggcagagttcgggcggcaatgttcactcacctgccgctcacctcctgctgtgtagtctggttcctaacaggctgaggaccggtaccccggggctggggatccctgttctatgaggatagaaaatctggtaaagtaattcaccctaagatgccattaaattactatgacctcctgggctcaagcaatcctcgcacctcagcctcccaagtagctaggacttcaggcatgcactactatgcctgggtaacttttttgatttttattagagatgaggtctcaccatgttgcctaggctggttttgaccccctgaactccagtgatcttaccgcctcagccttccaaagtgttgcaattacaagcgtgagccacagcaccgggttactttgttactctttaggggtattggaaatattaagaaaatacagcagggagagattgatttttaggatttaagaagaacaagaatagttttgggagttctgggagctacttccaagggcatgaaccaaatctggaaagtagagttggggttgtgaaatattagaacgtgtggatagtctgatggtttgcaagtaagtgggatcgaccgtggggtctctggacagctccccagagggccgtggtccacaaagggaaacactgtcccatccaactctgagaaatgggtctgggcatccactgctttcaccgagggtctctgcatgactttaggaaagtcactagacttctttaaccatttctttcttatctgcaaaatgggaagagtaagggcacccatcttggaggagatttggcacgtgatgctcagcacattgcctgacaatactaagtgttcaaccaatgctcatgattggccagggcattgacggcagaatcgtaaggatcacagagacctcaggaacatggctctgaaggatagaagctgaaaatcagtgtgctgatatcaccccttttgtctatgaggagtgaatgtctccaattaggctgcattcagcaggcctggcagcctcctctctcttgggatgcaaactgcttatgtggtagaaacaggaagccgtcttgaaaccctcgccaggccccagacgcgcgtgggtccacctaccgtccatctaccggggtcactgagtcactcctgcccaggtcccccttcagggactgtcgtgggctgtggcctcagaggtcccttacagggtggtgggacccagggcccagggtttggctccgggtttttgggcagctccgccttcataccgaaggcagcttagcatggcactgtctgatctgctgacagccgcgaccctgccacctgctcagtgggatggcatcttgggggagcaccttgggcagggctgcccagagccctggaactggactctccctgtgcagggctgatgggaaggaggtgtgtgcaatatggtgggaggagccgggctggaggctgcagactctgcctctgtgcccgttctgggaaagcccctgggcttgctggacccatttctgcccttctgaaagcgggagttagactagattggggctttcaacattgctgatattttgaacagcagaatccttatcacaaagccaatggaaacaaagaagtgatacattaaaaacacatcgaagcaaaacctcctggttgaactggcttccctgcccctccaaagtggttccaaggtgcctccacaaagcctcagggctctgagggtgttagggaaaccacaggtgtccacaatgcctgccatgctatgatttcatctggccgatgtgtcacttcagtattctgatgaatttaccctaccaggccagtcagaatcgactcactgatgatcaaaaaagagaggacacttagaattaaattcatttctttgggccagtctcctttgtctgcacttgctgagaaggcatttatgatgccagtgtgacttatagttatcctggtaggtactgaagcttgtaaaggccacctaatcactttgctttggtattcattagtcatttaacacctctaaagaaaggaaaggtgcggcaggttgcgtgtgcgggaggggagaggtagtgttggcttggaccacagcgggagggacctgggaagagggagaagttgatggtctggtcactaatggtcctcagcaggacaggcttctttgtccttgtctcccccctcccttttgtcctcttctctcttcctctctccctcatttctggcttccctctttttctccttcctcttctcctcctctaatatggaaggaacgttagacacacattcctgtagatgctggagtggaaaggcaggttggaggaaatacaaagatgaaggacatagtcaatctcttcaaggaggtcatggccaagtgtgcaaggggacctcgaagaagcccagtgtgacaaggattgagaggtgtgctcaagatgtgctgagagcagaggatagccccagctctgctctggggagtcaggggcagggcggcagatgcttggggtcacatgaacacacaattgagcaacaaaacatagtcacacagggcctgcctcacacccagcactgggtgggttttgtgcaggagaacttcttgcaggagacttggagacagaaattctttgggaaggagatggggtagctgccttaccagagagagcgggatttctcagacactgctaacttcccacctccacacaagctgatgagactggctcagaaaaggggtctgcccccagtgcataataatagcagtgataattaataatctatagttaatgagattaaattaattattattttaattatgacatgttttcctcctctctttcccctgccagggcaggcttggcacttcccaggattacagtcataatggtaacagataaaccttaattaaaacattccaaaataccatggctgagttaaagtgctgtgacacgtcgtttccatctcattttgagatcttgcctatgacggcaaatgtctccccaccgtcggcagcatcttggccattcagagctgttgccctcacagcattcagtgatgtttgccagagtggctccacgccccttgggggcagatggccgacccactggatcggggccactggagactttttccctcatgctgggctcttcacgtggcatcctgtgcctgctcaatgctgaatctgcttcccatgtgcacagcttactcctttgctccacccggctctgcctctgttcccttcacctgcttcttctcaggccaaggtagacctgaggaaaggattgaaaggattgtctactctggctctgtgggcactgttcctgaggtgtgagcaaaccctgcctcagatggcccccgagtccatcagcagctccttccctgtggtccgagttactggcagggtctctgcgttctgcctttgtgttgagcttctcctccacagcccacccacctgcaggggctttctcacgtgtggcgcgggtgtggaggcaggtctccatggattgtacggctttcccaaggcctgctccagactggtggcctttttatggaggttagcattcttttgttagtccactcacatattttcactcattactaaacatttatggaccattctaggaactgtgcttggtgatgagctgcagagacagaagacaccatcctatttttataagccttgtgggtctgtggaagagaatggaagatacacaaaggaagggagtcccaagctgaatgttctgatagggtcagtgctggccactgagcggggagggtggggagggactgtgcgttcctgcgcatgttaccctacactgaattttatttttttattattttattttaattttgagacagagtctcactgtgtggcacaggctggagtgcagtggcgtgatcttggctcactgcaacctcggcctctccagttcaagcagttctcctgcctcagcctcccaagtagctgggattataagtgtctgctcccacccctggctaatttctgtatttttagtagagatggggcttcgcatgttggccaggctggtctcgaactcctgacctcaagtgattcacccaccttggcctcccaaagtgccaggattacaggtgtgagccaccatgcctggatcctacactgaattttgaaacataagaaggagttatccagatgataagaggggaaggaaggtcacattgagaagagtcaaattcagaaggcctgacagagatgacatccctggaactgcagtagaggagtatggctagaaggcaggacaatgaggatgacaggccagaggtgaggttgcaagtgtggttggggccaagaccacaacacgtgttcaaggtatgtctaagaaggctcaagttcatgaatgggtgcatcaaagaaccacaccccagaaataagctaagtaacacctgcaacactgtcatcaaacgtgctgagccctgccttgcgccaggcagtgagctagtccttattttcacacctggctttcttgcctaagcaaattcagagtcaccctaacttgggtcatttgcatcacaaaattgccttcaaattagcacagagagggaaaaatcaacgcatacctcccaacataacatccccaaatttacctagcccagagttttaaaaaatttatatttttaaccttgatacccaagaaagcaggaaatctcacccagctggaagctctcctgtaaagaattcacaaaaatccacaccaaaacctctagatattcccatggagctgctagttctggaaacactatgggggaaattgcagggttttctattagtttgaaggaggtctacttcctaagacattcttctgctaccatctcttgcatgctcagttcattgattgatagagtaaatcattgatatttttccccattgcttcattcaacaaatttacattgcactctcctacatgccaggcattgttttggatgctggggatacaaagataagtgctctgaggcccctattctcagagtgctcagtccagtgagaaactagaaaagtctgcaggtaatgacaggcaaagagagatgcggtgaaatggccatgggagcacagccttgaagagacgcctgtgcaaggcacaggctccactgccagcgagggagaaagccctcctaggcccgaagcagcaaaagaaagcatctagaaaaaggaaataaagggctgtaggtgtatcaaaggtattccagtgccagttaaatttgagagagaaatcattttatttacgaaaatgtcaaggggaagaagatgcataacttctttaggaacgactcctgcctctgctagtatgtcaattccgagaggcctaaaataatttgggcttgaagatggatggaggtggagagcttggccttattgccaacactgtaaattagcagtaccaagagcagcctgtcccacttctggtctctggctacctcttcacccagctctggccacagtcaggtgatctctgatgagtgcattcaatcaccttccttttccatttggaacatgattgtgtgcatgctgtacataagcgatattgattgcaaataagttgttgactggaagacatgcctctgtggacatgtttgggtgggggatagaggggaaataaaattaaaaagagagtaagaaaacacctatggcccccagttggaaacttctcaaatatttgaagctaacaatgttttggttgcctatttcttttttcttttttttctaggagctaaacgtcaatattgcatttattgctgaacaaactaaaatcataacaaatataataaaaggagagagttagcctcagctttctgcagagaatgattggcacttttgagccctggattggttgggcctttatcttagctgcgtcagctcataattaaacaataaaaggaggaattgttacttgcttggaatatatacagtcagttttctgtaaggtgggggcagtgtgtattttataagccctgttgctgtcccagttttctgtaagaagggaaatgtgggtattttataaactctcttcttgtctctgtcagttctaaaagactgagagatgacatgatagctgtcacaagaaatttctgcttaataacaatgaacactcagagctctttaggccctgaagaggaatgggaagatgatgagggaggaggaaataaaagcaagaaaatggtaggacaggaagattttttttttccgctctcaatcttgtctttgtttggctgaccatagagcagctatgtagaactatgtgtgtgtgtgtaagggggagagaagagagagagagagagagagagagagagagagagagagagagagtattgtaataacgtattgagcatgagctgcctgatctttgccaggtgataaactggcccactgtgatcttgcaggaaacatcaacagtctgagaattgttgtttcaggaactagaaagaatcctggaaatagttaagaaagacgattttccaatggccaataccttctcccagtggcttgtgagattaagatttggtattggaatttgtcccatctcgacttggaagaatgagacaccttggaagatgaggctgaccaggccatggagctgcccagaccccctgggagcccagagtccccatccttgcatctcatgatctatcatttaacagccctgtccaaagtgcttgctggagatcacagggctaggccacttctgctccttgcaagctccaaagaggaggtctcctatgcacccgaggaggatgagtcttcagagtttccagctgccttcttgtcacctggctctaccttaccttgacactcccaagtgtagacatgcctgattattctatccaaacccagccaggagatgggaagagacatcttgttagccagttgctctggtagcctgcattgcaagggcctggcttttacgcagtttcgcttcaagtcagtgcaactagctacctgtcttcctgtcacttttctttggccacctgggtctcagcagaggccctcccaagactgacaggttagcacggaaggtataatctgctagtcagatttcacatggctgcacagagaatcggtgcccttggcaggtaagtgaataaatatgggaagacatttgctattaactgcaaatggcaagcagcatcttagaaagctagttagtgaaacagggatgggagtgtgagagttgatgcttcttttagaccctatttgtctcccggcctcacactgccttcctcttgctcagactttccctcttgcagtatctcctaagtcactggaggaggcccgagaagaaagccacgacccccatttgtgtgactgagatgttttcccagcgtcagtctctcaacctccccagtttcagctgcactacttcagaatgggacctctcctggctttatctgtagtgcggactatgtgtaagatcactggcagtgagtgtttatgcgccttaattcatgtatgtgctgatagcttataccccatctctgtattctccatcagaaacccacaccccagcagggaaattctttgaagcctaaatacttaaccatttctttggctccagggaatgtttgaaagaaattagttctaagcagggtttttttttttttttcccattagtttcagagcagttttagggcaagaaaaataatcccccttccctcagtggatggataatgatgggaagtcacctcccttcccctgggattaacctagaagggctctggttgggaaaatgttacctggttctttggggaaggatgacggttttgtgccttatgttttggggttttctgggtgtccctaggtaaccatctgtgagagcatcttgggcttggagtttttgtcactgtgaacaccttctgtggactcaggtgaattctccagttggcaaaagagggaatgcaggcttcgctgactaatccctgaaccagctaaggacaaggccttagaaagtttcgtctacaataaagaagcttttatctgatgtcgaggaatctttaccagtagctgctgtcgtgaatacaagtgcacctttatggcccacagtaagcactgggggattttctgtgaaatccttgtcatttcttttacccattttcctaggaagtgagttgtgctcttgtatatgctcttcacactgtgcgaagtcagttacgtgtgtggcaaagaacttgccttggtttctaacttgttttacactttctttgcagtgtcttgatgaacagaagttcttatttggattaaagaaacacatatggtcaataaacatatgatgggatgttcaacctcattaatgatcagggaaatgcatatcaagggcacaagagataccaatctcacccactcggctgttaagagtatggaagtatgacaatatcgggtgttggagggagtgtggatctgcagaaggttttgtgcagtgctgatgggaaggagaaattgtacagccactttgtcatgatctcgtaaagttgatcattcaaatgctccatcatccatcaatcccactcttaggaagtcagacaagggcaactctctctcacgtataccagcagacatgtatgagaacggtcatttcagcactatttatataaagcaaaacttgggggcaatacaaatgttctctgacaggagactggatcaatatattgtggtgtgcctatttaatggaataataaacctcagtcaaaatgaatgaacaatagtcccatgcaacaatatgaattagttttagcagcagaattcaagtgcaaaaagtctcagaagaatgcatattgcatgataccctttgtagacggttaaaataaatccaaactgaaaattcttctttttttaaaaaaaatatatgtagcagtagtaaaactttgtttgaaaaaagggaaagcaagtcaatgatgaacataagattcgagaaagtgcttagttactttgggtagaggaagagaaaggatgcattgaagattgatgttgctactctagttttcttgtttgtttggtaatttaaagaatgtttattatagtgctgaagagaaatacataaatacagcaataaaaaatcaaataaccagatttaaaaaaaatgggaaaaggacttgaatagacatttctccaaagatgatttacaaatggccaagaagcatatggaaagatgttaaacatcactaatcatcagagatttgcaaatcgaaatgatagtgaggtatcacctcacacccattacgatagccactatagagaaaagccagaatatagcaaatgtcggtaagagcgtggagaaattgggacccttgtgcactgttggtggtgttgtaaaatggtgcaactgctatggataacacaatgaaggttccttaaaaaattaaaaataggaccaccatctgatgcagcagttccacttctgagtagacatccagaaacattaaaagcagggtgtcgattcgcacacccacgttcacagccacactattcacaataaatagctaagaggtggaaataggctgggcacggtggttcaggcctgtaatcctagcactttcggaagccaaggcaggaagatcacttgaggtcaggagttcgagaccagtctggccaacatggagaaaccctgcgtctattaaaaatacaaaaattagctgggtgtggtggcacacacctgtagtctcagctcctcaggaggctgaggcaggaggatcacttgaacccatgaggcggaggttgcagtgagctaagactgcaccaatgcactccagcctgggtgacagaccaagactctgtctcaaaaaaaaaaaaaaaaaaaaaaaaaaaaaggaggtggaaacaacccaagtattcatcaatgatgaatggataaacaaaatatagcatatacatacaatggaatattcttcagctttaaaaaggaaggaaaaccttccatatgctacaacatagatgaaccttgaagacattacgctaagtgaaacaagccagtcacaaaaggacaaatattgtatgacttcacatctatgagggtctaacatggtcagattcatagaaaaaacagaaagtaggatgttgattactagggacaggtgacccctccttggatctacccgctttgcaatgtgactctgcagctcttcccaccaacaggtggagactgctttcccatcccttggatctgagctggcctggtgacttgctttggcccatagcctgtggtggaagcgaggctgtgctggtgctgagccaagacctcaagaagcttgcatgctcctgctcacgcccttggaaaccagacatgtgaggccatcctagaccagccaccctctaggtgaccctccaggtgactgcagatagatgagtgagtgcagttaaattcagctgtgctgggccaggcactgtggctcacgcctgtaatcccagtactttgggaggcgaaggcaggcagactgcctgagatcaggagtttgagaccagcctgggcaacacagcgaaaccctgtctccagtaaaatacaaaaaaaattagccgggcgtggtggcgcgcacctgtaatcccagctactcaggaggctgaggcaggagaattgtttgaacctgggaggtagatgttgcagtgagctgagattgcgccattgtactccagcctgggtgacagagtgagactctgtctcaaacacaaacaaacaaacaaacaaaaaaacaacaaaaaaactggctatcaggagatgaagaatgcatctgaaagtcaacaaggagagaaagagactctgccggcatgccgtaaaagcgtgcaagtcatggcaggggaacacataagtgtgttacatctgtatgcacatgcatgtgagtgcctgtgaccacacacacacacacacacacacacccatagtcagaggaagcctcaaatcaggctgagtttccgaagggaaaatctcatttgtccaccagtgatagcgtatgtagccttctacattaatgtaaattgaggcaggattaccttctagtgataaagtcgcatctggtagcagagaaaaagtgagtggaaacggacacatttccaatcaggctctggcctgggctgcagccccactccgctgaacacctagatacacctttttaaaacccaggatccttcgggctcagcctcctagtccttgccccttccccagatcccacccctgtctgcccaccttgtcttctcgggccctcaaaacttaagccagaagtctgggcaggccagtagaggaaggagctggggcccaggcagccacaggttgaagaggcggagggaagcggcacagctcacagtcacactaggacaacttggaagttgaattggcaagttgcagcaggagatgggagcatgggctccatccctaagggagccacattcgttttttttcctttcaaagtcgtcaggcagtaaaagaaaattgcagggatggggaaataatgaaaaaggctctttgtttttcccccagtccgaactcctagctcatcaaaccttggaaatgctcactgcaaatggttgttcttgttttattgcttatttatgggaatctatttaaagtgaattgcacttttccattgtatcctagtgagcgtgcaccggagttgtgtctcccctggctgtggggctgtctggactggggattctgtctgattgtgtcagcatcacgctccgtgacatttaaaagtggggaaggaaaatactgcagaggaagcagggcgagcgtggagaatgattgctcaggcctccatcagctccaggcgggtgtggggaatgctgttctagggcaggtttgggggtgctgactaggccttcacacaaagaggaatctgctcttgtggatgaatgaatggcggtgacaaatcaaactttaatctggctctgctgtaagcattgtgaccttagggcaggtactgacttctatgagccaccttttttaaaaaaaattctctacagagaggtgaatactgggctgttgttaataatgatgatggaattcattatatatatgagagtgcttactcagtatcaggtagatgctcactaaatgtaaaactcccttataagggtggctggaatggggactggaagagacaggtaagtccccaacctatcttcattttcttaacctatgccttttgactcaaaaagaatgaaggctccctcactcctttgctttgattgggagatgagatgcgagtctcaatgcctagaatgctctatagcaggggtcagcaaactggctgaatcgggctgctgttctggtagctaaagcattatgggaacccatccctcacccccttctgtctgcgagccatctatgacagctttcctgctacagcggcagagcaggatagctatgaaagagaccgtggggcccacaaagccgaaagtatttactttttggccctttacagaaaaagtttgccaatccctgctctaattcattggtattttggggttctcttatctgtgtgatcagaaggtctgagcctcagagaaaggaagcagcaacttgtccaagatcacaaagttagtgtttgagttagaactgcaatcaggtttcccaattcctggcccagtgcttttccattgtttaactgtaccatttcacagagatcccaaagccattgggattagctttaccaaaaaaaaaaaaaaaaaaaaaaaaaagagtctctaagtcacgtggcatctgagctccatgtgattggtaaagttggcattagtccctgccacatttcccaagtccccaccttctctgctcaccacaccgctgtctctccaggctcagcaaatacttctagagacaccggtgtgtccttgtcctgaaacctttgtgagtcagctgcattgactcctgctccaggatgacgagggccaattccttgatgaagggccatctgcctgtgtctggctgcctgtctgtgagctttcgtgtcttgggggctctgctgcattgcaagaaggagctgggacagagctctgagagaggggaaggaggcagggagagggagtttgattcctgaagaatcttccttttcccatgaagacaagcaagctgatggccagcgtagagccacagcctggaaaactttatttttaaatttatttttggtggggaaagagttgggttagctctaatttacggcaacctccccagttccctgacactgctgcctcctcatatgctttgctaagaaaacctggatgagtcgggcgaggtggcttatgcctgtaatcccagcactttgggaggctgaggcgggtggattacctgaggtcaggagttcaagaccagcctgaccaacatggtgaaaccccatctctactaaaaatacaaaaaaaattagcctgacatggtgacacgtgcctgtagtcccagctacttgggaggctgaggtatgagaattgcttgaacctgagtggcagaggttgcagtgagccaacatcccgccactccactccagcctgggccactgagcgagactctatctcaattaaaaaaaaaaaaaaaagcctggatggcctagtgcttccttattgcttaattaacccttctccctttctttgacccttctcctccttggttgccttgtgtggttgatggtgacatcatccatccaatttcttatcctgtaacttccaagttacccttaactcctgcctttgcccaatccccagccttctatgagataccacatgcagcctgcaaactcccacagctgtacgcaggcatgtggcctcttgcctcgacatctggccccaccgtccaacccacctttcagcctccaggcaggtcctcacctctgccatcctccacgtgatccccaaacgttgctgatcaacacaccacagctggaatccacagaggcgccacagtaccgaaagggtggctcaaaccacatcgcatggctcataaggcccttggcgagttgacatcaggctccctctctcccaaagccacaccgtcttcctgcaggcaccgccagtggacacaccgaacacccctcttgtccaaacacactgcagctccctacatacaaagggcaggagctagactgtggaatgaggttgactagcgcttacatccagacactactgtaccacttgctttccgggcagattatcttccctttctgagtctcagtttcttcatctgtattaatggagatgacctaagagctgccctgaggattaagtggtataatgcacttaaacatgacaaaaaaaatgcactaaataagtgtcatctccttcctttccagcctctgcctgcacaaacccactgttctttcgctcagggtgctctgccctgcgactcagcctccttcgggctgcggcttagcatgttcccctcagcctccttgcaaatgaaggcttagtcacttcctccgctggtcccccagacctgtgttcacctggctcacagccctccttaattacaattgtaattgtttatgtgcttgtttatgcgggagatgacaggactacaagaaggcgggacttcctctattgccctaggccctggggtgaactgcagccagcactggccttgccggctcactgcacagggtgggcacttagtccctgacttggacaagccactcaacccctaggaacctgttttcttatctagaacatgagggtaatagttcccagttgccaaagcttttcccacagaccctgactcagaggagatattcaatgaatgctggttctactctacctttccagggctaagtcctacgactgtgacacaactgatgctcagtggctctttgtttaatgaatgaatacatgaatagtgattagagatgaggccccaggacctatagctttagatccaaaagaggtcagaagatttagaccaaccctaataacctgaactcatgtaaaagtggctctttcctcccagtccaaaccacaaatcctaaatgctcattcagcctcacttgccggggactcagcttctcccggggcctccgggtgggtcccatgattgctctgatcacctccctattattggatattaatcaagtcctactcagaccacaaacaagcagccctgctcttgacagtcatctgaggatctttgttggtgatgaggagagtgggaggaagggagagtgaaggaagaagagagggaaagtgatgagaagagagagccagggaggctcagagactgagcaagtgccaagaagggaagatgacaacgctggtgaagtctgaacaaatgcaaagtcaagcacaataataatttgggcaaaatggcaaatggcacagctgaggaggaaatagcattgtgaatgtaaaaactcctaaatggagcgcagatgggagggaaaagtgtaatcttctggaaaagcctctaattgtctgcccacactaataatttcagcaaacgctccctctctccctcctgcgtataattacaccattccatctgtctatcagcaggttttttactgtgccttactgctaccacgttctcatgctcacggagagatgaggggtttttgaagatttaagaatccttctgacacatatcctgaagaaaaaacactcaggcagacaaatccctctcccaggcctgctaagactctattttaaaaagttgtataatctctccaaacgctattatgaagtccaaaggaggcagggccacatggaccctccaccttgggtgttctcatctgccggcttgtcttagtaggtcagctctggagagacgacaggtcaggggctgcagggagaaaggggctggcagagacaccggcccgtgcatcccgcaggtggcaagtcataagagcatctgctcagggctatccctttagagtgtcttaggtgtcaaggccagggttctgctgcgtgaggaggaagaggaatgcaaatgaaagagaagaagccagccgggagtggtgggggagtgtctgtggccatgtattagctcagctcagctggcctgaggagcgctgcccagcgcccaaatccagggctctgagtgactccaactgccattggcttctctccctgctctggcagtgagttccagagaagacaggtggcctcgtgcacagagcccagtaggaaaggctccaggtttcccacccaagtcactgcccttcgtgcaggaggtacagagcttcccatttgcttgctccacgggcaggagctgcgatcttaaggggctgggagctgcctgcaggttcttcatcaggaagttttcttttcatgtgaaaaatcacatcccagctcttctccctttcctttccaataagtgggtcctaagtagttactggaaggggtgccaggagagaggcaggacaggtcaaaaaggggaatgaaggccaatgcccccaagaggatcttgaaggctagaggtgtggtggtggcagtgggtgccacgaggtgtgacctattcaccagatgtggattgggccaaggaaatgtcacacagaggcgattttgacagagccagagcccctccatccagcttgtcctcacatagcctgatatcataaccgcatcttccccagaattgctgagtggatggggagaagagttgactcacatcacaattcattcgacaaatattgatagtgttcccacaaggtgcagtaaaggctgaatacaacacgtttccaattctctatggcagcaacatctaatagaaatataatgcgagctgcagctgcaattttaaattttctagtagccacactcagcgagtaaaaagaaatgtgaaatttcttcgaatagtatgttttattttagtaatatttcaaatattattaattcaatagattataattataaaattatttgttagctattttacctttttttaggtaatgtcttcaaagtctggtatatatttatatttccagcatacttcagtttgagctggccatgcttcaaatgctcactgccacatgtggctagtgatgagtgtatcagatggtatagagccagagcttattaaggagaaaaaattgtatgtataattataattctagtatgtgcattattattattatagtttaggcccgcgaagtaattcgctaaacactttcacatacattatctctgatcttagcaattttgtgagatgattagttattgatattttttatcagataaataaaaataaggccggacatggaggctcatgtgtgtaatcccaacactttgggaggctgaggtgggaggatcagttgagttctggggttcgagaccagcccgagcaacaaagtgagaccccatctttacaaaaaataaaaaaattcattgagcgtggtggctcatgcctgtggtcccagctacatgggaggttgaggcaggaggatggcttgattccaggaggttgaggctgcagtgaattatgcttgtgccactgcagctcagcctaggagacagagtaagactttgtcacaaaaaaaaaaaaaagagagagagagatattcagagaaccgaagtgacttgtgacttcagagcagtaacttgacatccttatttcctactttctgaaacaagtatatgtacacacacatttttctgtgtgactcagtatggcacattggaagaggcagcgtaccaccttattttcctcttcattacagctgctttcttcttaagaacactctgaagaacaggaccggaaaacgatgtgaggtccccacactgtgttccacatacaattattagattggtgcaaaagcaattgaggtttttgcaattacttttaatggcaaaactgcaattacttttgcactaacctaatatctccctttactaatctctgctgctgtccccagatcagctgaggccccacctttggccgatcctctgcctcctagcctttctggcggaccccattcttagaaggctggggagtgggcctcaggaagcagccggggctctgaggagcccaggcattgtcttttctgtgagactcatcccgctattcagcaggtgaaacctctccgcctgtcattctctccccaccccataatgtgcaacaggcctgactttgtgatgggcaaatatctctctgagatcttctttacaggcattcaccccccacaccctcctcagcagtcttgggctaatgagctcagttcctttaaacccagctcctgcctcagcccttctcagaaacttatatccggccatgtagacaaagctagaattaaggcttccagatttatttcatttaacaagaacccacaaagccagcccagtagcccattcatcccaaaatagcttctgaaagcctgaacatacgtcagtgtctctttgcagaaaccacactgcattgtcatgaaagggccatttgaacaaggtagctacaatgaaattatctcaatgcatttcaatcactttgcaacatcaaggttcatttctcagtaacagtctctttgacaataaatgaattgcgtgattggtgtgtgtttgcgtgtgtgcatgtgtgtgacaccccttcatgatgaattcctgggtatgccaatgttacaagtgattggtctttgcatccatctcttagcataaatccccagcatcaacgtgacatgttgagcagcaccgagccccctggattctctcagtcttggtgagagagggagtggggactgtgttcacgctgttacaaaaggacatctaagagggacagcagggaggaagctgggcagaaatgctccgaatcaatagctctttcttcttggtggcttggagcttgcaatctctcagcctgtgtcgagtcatcatgaaactgaagaatccttggaaagtcactgggttgggcacttttaaaagtagagtcttttctgttctgcttagaaactctcatggcatgctacagagaaaagaggagcagaggcccacagagctcccttcaccagagaagggagcgaggaggtcagagggtggaggaggtgggctgggatctcccagggcagcacctgggcggagttctggagccactcccagcctggggagaagccctgcccctactgtttgctaaaagtttggacaaatccttctctgccctgtacctcaggttttccatctgtaaagtgggaagacaaccatcccacagaggtgccatgaaagatttttagggagtacctaaaaggttctttaggtgctagtcaagtcccggggtctcgatgtgtcattaacttgctgtgtggtcttgagcaagttacttaagatttgttaggtctccttcctttctttataacagggtaataacctacctccctatttaacttatgagtaaagcagaatggctgtgagagtgggcctggagccaaagatacctgactgtaaatctgagctctgctccatcatcttgggtagtctgctaaggtttctgtctcctgtccaaaccttcatctgtaaacgggagcaaatcatctctaatttgtagacctgttgtgagaatttaatgataatgcatgtaaaatgcctagcaggggcctgtcacatagaatgtaccctattgatggtagctgcaggtatattacaaggttgtactgaaaaacaaatgaaagaaagcaatctttccttgaaaaatgcacagagctccacaaatctatgacatcatgatgattatgatgattgttgcaaatgtcacatcttcatgtggagtcgaggtgggcattagccacactgttcccattactcaaaccccagatgctccaatgacagagcctctgctgagaggctgacgtcagggagaggtggaggagggcagatctcccaacccttggcttccaccagcttcctctcaccgtggagccctaaggcctcagcagacacgctgacttcttttcagaacaaagcacagcaaaacaaaacacacagcggctgctgaatggaaaacacttgcactctagaaaggctggcaaattccctgcctcgtcccaccctgcacggacagggccctctctgcccagccacctcctggtgcaccccgctgtatctctgaccacactttaaatgtgcaccctaggaggtggatgctctgcagagagtgtgtgtgtctgatctgaggcctgtggtcccctgaagaaagaccaacaggactgggtgccatcctgtgcccaagttgttcccaggaggagaaagcctgtaggaggggagcaagctcccattctgcctccattccttgcaaggtcagccagctacatgctttcttctggctgggcccctgagggcaattgttgctttttcctcttgaggagtctttttattttcagagtggcagggaggatggtttatggtgagtatggacctaaatgagaagggtgagtagtagatggcgtattctctgggctgtgaatcctggtcaggtgggggtggctgggctggggcaggagacactgtaaagagccagtaggcctggattccttccagccgtgctgcttcctgccatttactccatctgacctacttcacaggctgggctgccatgagcggctgctgcaggctgtgcactgcacaaggccaaggcttaccatttgcatggtctgcggaggaatggtgctcctgagagctgttctctgcagcagctttgctcatggggcactggtgagcagcaaacagaatcatcgtcttcatcaccatcagcaggagcagtgactttaccaatgattgatcagctgttatgtgccaggctctgtgctaagtgctttacattttatcctcccctccaccctatatcaggtaagtactgttatatctcatccccattttataagtgagaacactgaggccaaaggaattaagtgatcggtcagaggtcagtcagatcgggagtgatggggctgtaatccaaatgctgggctggctgactcctaagttcacactttgtcttcattcatgatacaaaagagatgtctgttttcctgaggcccacgggcaggggaggcaggactcctaagcctgggccctctgactgcctgggccagtgtttccgtgccagaaaccctgtctcagagggcaggaaagagaatggggagcccttgcagaatgtggttggatccttctctcttggctctgtcatccttgccttgggatgtcctcccaacacaggccattaatctcactcaagggccagtgctggcagcggttatgctggggacatctacataccttgcattcctcccctttcacagaaaggaagaagaaatggaattgtctgtcagattgcttgaactcactctctggaatcactgcgcccatcttttcagagatgttgctaccagaatcattccccccttctcttatttatatacactcacacaattagatataactatattcacacatagacacatattacaacttgaacttagcacctgctcttgatatgtatgcccagaaggctgtcacacaatcttgcacacacccacacatttgcacatgcccatccagctgagcaacatgtatttacacagcacacacatttgcatcatatctgttcatgtgcatgcatgtgcacagctgttccccttaactgcagaatgaagtgagcacagcagcacagaacaacagctggtaggaagcatgtttgtcggggtgtggggagtgcaggagagaggaggtggggtggggccgggaagaagtgagtactagcagaacagaggcttgcaaaagactgcagcaaccagccccagctggctgtaggggctcacagtcttgtcacttagaaggtctgtctgagagaccttggtggagtgcagcttcagcatttggggccacagctctgcaggctttttctctaaaaggctgccctatttgtgttgtgtgtccctgtacacgtgcgtatttggctcaggctgactttccatacacagacagggctctatttttggatgtcttggttctcatgagttgtggctaagtgaggaagtctgagtctctcctgatgcccacgcttccaggatggctcctggctgtctgcgttagcaggtcacttttgggctagctacctataccagtccaaaggcttgatacaggaaccacatcagaattggtgacaaaacaagctggggggctcctaaaggaagatactgggattctcaataggccatcacccaagggaagcagtattctcctcctgcgaccatgccatgggatgaaagcctctgccctgtatgtctggccaccttgctaaaaactgtcagccagctctaggcagctccagagctgtatgacaggagtgggaggactcttgggtcagaactgtatttgtgggtggtaaatttatatcttacccactgaatatagctttttatggctcaagacataggtttggttttcttaaaaaaaggttttcttaattcaaaaaatgtacacatttatagtaagaatacaaacagtacaaagatgtcagtccttttctactcgtgccaaaattataaacagtttatttgcatcattctgcaaattttatatatgtctttgtgatatggtttggaggtttgtcctcttcaaatctcatgttgaaatgtgatccccagtattgaaggtggggcctggtgggaggtgattgggtcatgaggtcggattcctcaggaatggtttggcactaacctcttggtgataagtgagttgttgatcagtttgttcacatgagatctggttgtttaaaagtctgagacctctccttccctctctcttgcaccttctctccccatgtgatgtacctgctcctgcttcaccttctgccatgattggaagcttcctgaggcctcaccagaagctgagaagatactggaaccgtgcttcctgtacagcctgcagaactgtgagccaattaaacctcttttctttataaattatcccacctcagatatttctttatagtaatgtaagaatggtctaacactacgtatgtgcaagtgtatatgtatatgtaatgtatacctatgtgtatgtgcataaatggaaaatgcactgtggtaaattacagatggctacaaacacttagccactcctcccagaaagaggtggaggctacctctcctattttagaactgccatggcactgtgacttgccttgaccactaaaatgttgagaaagtgatgctgcgtaacttctgggaaaaactttaagagatttgctgtttctgcttgcagtcacttagaatgctccttttcagaatctggcccctgtgctgtgagaagcctaccccacatggaaatatacacagaggaaaatggaggcagtggccaaaaacataagtcaagctcctagtcaacagccagtgctgattatcagccatgtgagtgaaccactagggccttctagcccagtcaagccttcagatgactgcagcccccgatgtcactatacggagcaggtgaaccactcaactgaacattgccaagccacagaaccatgaaagttagtacatggtgggttttatttccagtggctatattttgggatagtttgtcacatagaaatagagaactgaaacatgaagatatatttgattcatttaaataaatatttagtaattttctgattggctataccattttctttttaattaataccacacttaataggtaaatgtacagctatgtgtataatggaaagtgtactggggacatgcaaatatcgtttaagtacaattaggtttttatctagttatttgcaaaaatgcagcaatagacatcctgtgtgtggatatttgttcacatgtataaatatatgtctctaggttaaatttctaggaacaaaatgcttaataaatgacatgtaaatttaaaattttaatagacattgacaaattctcttccaaaggtaccatgccaccagtggtatgaatgtgcctgattccccacttccttgtacacaggacatggagatatgctcaaacctttcatcttcggttgtgtaataaatttttaaaaatcatttattttgcttttcttcaataacaattgaagttgttcatcttttgatatgtttatcagctatatttttctttttctgtaaacatcttttgcccatttttctactggttcataagagcttttttctgtattgaattttaataattctttttcctttttgaactgtaagaactcttagatgacaaatgaaagaaattagctctttatcagtcatttgtgctatacatttttttccacagattgttttttgactttttttttttttttaagagatggggtctcactgtacatacatcacacattttaagagatggaatgcaatggtgtgatcatagttcactgtaatctcaacctcctaggctcaagcaatcttcttggctcagcctctcaagcagctgggactacaggtgcatgccaccacattggctaatttttaaattttttgttgagatggggaccttgcccaggctggtcttgaactgctggcctcaggtgatcctcccgcctcagcctctcaaagtgtttggattgcagacataagacaccttgtccatggcttttttttttttttttttggcttttgactgtacatacatcacacatatatacatctgacacattttatttttgtctgattttatggtttcgtctttcatctaggcggaatttgtcttgctacaaggggtgaggaagggatcctgtctaattttttctccacaaatgtctagctagttccccatagctttcattgatcattgatttatcccccactgcttcaaaacactgcttggtcatatactaactgcccaggtatatatttgggcctatgtctatactctatgtcagtccattgttctctctgttcatatgccaatactgaaggctgcttcttagcctttccagtctgcatttcctctgagtctgctgttcgctgttggagccaggggctaaagtactcagcctgtactgtcagtcccggatagaatgcttccatttaaattctcatctaactcattctattccccctgtggattcttctcagcacttctttagaaagtctcctttccctgggtcatttctcccagactagaaaaattccttcccataatagctcttaagtgcttcctcttggtccttgtgatgagcttttttttttttggctttcctaggaatccttccactctgggccaaaacttcacccttcttgcctcccttgagaaagcagttatctttttgtgggccatccccatgcattcattctcctgcctgttcgctcgcttgcagtattacatggggtagcggggtcaagtcggtggagggtgaaacaggcgattggcaatactcccctccgcatccctgaagcaggtgatgatctccataggtcccagggtatccgtgccccgtttgatcagaaagaaacacacccaatcttcctcttccactgacttttcccgtgtgaaaggactccctggtcaggcggtattcatgccgcctggaaactcatctgcctgtgccgctgctttttcctggcagtttacaatgttatattgctaccaaagcgggcaaaatgaggatgtgaagtcgagcatctgagaaggctcagaaagtctgaataagcaatactggaataacaatgtactcctcaccaagggcatttagccagaaaagtgctcctgcttaggaattctatttgtttttctcttggaaaatggggaagtacatctgtaattcagctgtgaataccctattttctttgcaggggaagactggaaatagagtcctttatctcagatatcaaaccctggcccaggatacacaagaccaggagtcatcaccatcagtaacagtaacaacagcttcattaacaagttgctgttccgacgtgggctccggggtggggaaggaaggagggcgttcggctcaacgtccaggagaggcaccggcgaactcgagagccaagagcggcactcccacctgggcactccttgctgatggaccgggacctcctctcccatttctccggggcctccagggccctcccgcacattcagcatgatctctgaggagttcactagctttcctccctccgctctccagctcccgttcctaccaaatgcaccaatcatcactaagccaggtcaaaggccatgggatcagctgtgatctctcccttcctttttcattctcctctcctcatatccaaactgtcattaaactcagtgtttcttccttcaggctgtttcttgaattggtttcttctctatcccactattactgtcctgatccgtgctaatccaacagtttctgcccccaccccaggacagcttgtgttatcacggccaggtggatctttctagaacaccaagctcagcgtatcccttctgatcaacagagaaggagaggagagcctacactgtgctgggtcactgtgttacgctatgtgcttgtttcatttaataccgtcaacgaccatataaagtgtgtttgattatccttaagcaaaaaggtcaagaaattattagatcaatttcaagtcctcttcctggcattcagaactcgccccaaaatatggctgccttgactagttggctttatcatctcctctatcccaagatgacctttggggttccaatcagtcctatctcttccccgggagtaggggtggaggggcagcacccccgggcagaagatgcagccaaacaggaaagacagagttcacacctaactggctaaagtacaggcaaacacctgctaatgagtggtggtggcagtggtagggagtaggttgaactgtgtccccaacattcatatgccccaatacttcagaatgtgtctatatttggagatagggtctttaaaaaggtgattaagttaaaatgaggtcattagggtgcgtcctaatcctgcatgactggtgtccttataaaaagagaaaatttggacacagaggtacagagggaagaccatgtgaagatgagggaaggcagacatctataagccaaggggaggcctcgggagaaaccaaccctgtagacacctccatctcagacctcctgcctgcagaattgtgagaaaataagtttctgttgtttaagccacaagatcgtggtattttgttacagcagcccagggaaactaatacaggaggccgggcaggcattgtccaagggagctggagaggctgagcactggggcacgagggtaggtaatgatgtgagctaccttactgagcatcttctatacagcaagcaccaggctacgctgtgaacattctgcattcattatcactaatccttacacatgccctgccaggaagttactgtcacagccattttagagatataagatccaaagttcagggtggaaagaaatgtccctaggagacacacataatgagtatcaagtctggcattggaatcccaatctcctcctcactaagcccatgcttattctactattctgtcctgtgtccatcagtagatgggctggcatcagtggaccccagatctgtccacaggcagcagggccctgaccaacaggtggcttctcggagcagtgccttgtcttaggggggcatgttcactgaactcatgaggtcagaacacaggacttcacaaagctgaggagagaagggagatagctagctcagtgtggcaccccattcttcccgttgagccctctcctcttcctgttgaagttcagcgtggttctggaagtacctgagtgggaagtagctttagcttcccacgactgttcaatagcattcaagtaacccttcatggcatgccgagattcctaatgagatgagaatacattctttaaagctccagttaacgtgtatgcagatgggagcttggaggactattttgctaaatgatgcaccctgtgaataaccatcacccccatatctactagggcaggcaccccttctctgtcctcagctggggacccctctcatcccacttggactcagagtccctggtgccccgaaggaaagcaaatcagcctcacttataattaagtgtctcaaataaagttttgttttaggctaaataagaaaagtgataccaagtcaaacagatcacaactgattattaagaacagatctactacagtttgacaactgccacaaacacaaatcttatttgggagttgctaaaactcagtaaatatcattttaataattaattaaactttaattaatgtcttgacagtagtctcaacctgataggcctcttcacaatgtgcaggctgtgatgaggatggtggctgctgggacggccaagggcagctaggtttcaggtgtcccctccttggggcaaggagaactaagttcactttcccccaagaaaaatctgtggtctacacaaatcaacctaaccactgaatcatcaaacactctgagaattcaggttaccaacagtgactgcaggagaatctaaagtgcttttgcatccttagagaaaaatctctgctccatctttttatggatccagtgggtggcagaaggaatggagttactgcaacatgacaatctccatcctgcctgatgcgcgagcacataaccgcctaagtttaaagagaattctggatataatttattatataagcctgtaatcccagcactttgggaggccaaggcaagtggatcacctgaggccaggagtttgagaccagcctggccaatatggtgaaccccccacctctactaaaaatacagaaattagctggggggtggtggctcatgcctataatcccagctacttgggaggctgaggcatgagaatcacttgaacccaggaggcagaggttgcatggaactgagatcgcgccactgcactccagcctgggcgacagagcaagactccgtctcaaaaaaacccaaaaaacaacaacaaaaaataatttattacatgagtagctcccaaatagcataattagtatcatgttagctgtaaaattaaacaaaaaagacttctgtccagttccctagaaattctaatttagtaggaatgagctaaaaggtctgatttagtaaggtgagaatttagtaggctcaggaatctatatttttaaccagttcccactgtgcgaggatgctgtgccagcaaagggcttcttcaagccacagagcctcccctcccagctgccctctctccactgagcctgaagcatgggcggcggtgggagccgcttcattataaaaagcagaacatccctaaaaacaggatattctagggacaccaaagagccgacactccattggaaacgcctcctctggggtccaggaaggccactccacagtggcgctgaactactgtttctcagcaaggtggtccgggccttctgccgtcagccagccacgccccactcccagtggtcctcttccgacatgaaagatgccaggaacaggaaaagcaaaacagcgcgcagcgactttcctactctagtagcattttctttctgtgtctctggtgagtcagagtttgtttgaatgtgaattatctgcaatcacgaaagtgacagtacagctggctgccgggcccgaaggaaatgtgtgctccagataagggcgagtgtgtgtgtgtgtgtgtgtgtgcgcgcgtgcatgcattttggggggctggggctgtcctcacttatcaaagcaattcccaaggcggcctctctgagtgaggcagggtctggcagggccgagcccctcagagccctctgccccgttggtgctgtgccggcgaaaggccacgcctcttcaatctggggcacccctgccgcctgctccacctcgcccgtccttgggttctggtcaatgttgggttgcccccttttcctagggatgtgggaggagaagagaaaatggaggtctatattgccacctcattctccgggtgcgggaaactttccctcagaggcaggacgcaggcaggtgaggatcacccgccacggcttttgtccactcatggtgtgagtctcaagaggagggaaagtgggtagggtctttaagtttggtactgtggccctctgaggttggcgacaacctgaaagctaccagcagagaaaagtaggtggagacagtgcttttggccacgacccgtttttgtcatcctcgttcctcctacaaaatgaaaaatggtccagaggccattcagatccccgcaccagtcactgaaaagaaaccagtttaggtgtccaaggctttttggtcatttactagacatttattgagtgccttcgaagctctggcgtggtgctaggtattaggtgctaggtgttaggtgttgagtgttgggtgctaggtgctaggcactgggtgctgggtgctaggttcctcatctcagggagctcaatctctcataggagtggcagataggtaaatagctataacaaagtgtgagaaacctgaaactgaggaagcacagggggctgtggaagcccacattgctgattcctaaccaagagcggaggagttggggctgtgaggatgaatggtctgagaaggccatttagggtacggactgatgctgggatgtgcagaaagggagaaaggaggctccatgcagaggtcacagcccatgcaaaggcctggaagccagagagagcctcatgcatttaggaagtagcagacaataggcagggtagcatcactgaagcaaagcaggtgggccaaggtggggaggggatgagggcagggctaggggcagggccccagatgtgaagcgccttttatgccattcttagaagtttggacgtcctcatggaggtaaaggggagccccaggatgcctcaaggtatgtaggaagatggggcaggaggccattgcagagacccaggtaagaaacgatgaaggcctgggacagggctgcgctgcctgaggtgatgaggagggaaagactccaggcttattaggaagtagacgcaacaggctctggtaactgacaggagtgtacattctgcagagggcgacagacattcaacaacaaatgacacaatcaactatgcaattaccatggtgataagtgtgctgagggagagtggagggtgtggggttccgtagggggatctgacctggccagaagtgggcgagacctccttgaagaggtgatgttcaacctgaggctgacgggcgaggaggaaatatccaggtgaggtgttgagtggggagcacggaacagcatctgaaaatgggttgcagggggagcacagtgcttggaggacctaaaagaccagtctggctagatagggcaggtcagctaaggactgcagaccaaatttgattccctgactgtttttgtaaaggaggttttgttggaacacagccacgccctctgcattcgtattgggtagagcagcttttgcatcacatagggccagggctggggaggggaaagggaggtgcccagggtgcaatactgaaggagaccctcactcccaggctggtgcacaagccacagcccggacagtcagtgcctccctcaattttgtacctagagcaccttacctgccttacacagttctggcctctctgccacaatacaatgacataatcaatggaggagttgcaacagagaccttctggttgcaaagcttaacgtatttactctctggctctttgtagaagcatgtagacccctggcttagagcagcataaagaggggagcgtgtggcccaggccgagccctgatactgttgcagctctggccacagccccttagcattcaactagacatgcagaagaaacctgtgctaatgcctgcgattctctgtgggacagcgggtgtgatggagtcacggagatgtgatggggggcatttgggaacatgctcattctgtcttgggcaaatggcatgtgctggagagtttccgccctgggaggcagccctctacacatgataggtatggggctggtggggataaatgccccaatttcctcacttctccttggggagaatgccacgtcccagagttgcacggtgggctgactgccagttgcacacagtggtatctacatgatgatgaatcctttactggcgtctttccttcctttcctactcactt

SEQ ID NO: 97328 - DNA, 25955 bp, Homo sapiens
tggggcttcagttgatactgaaggacatttgcagtctagcaaggtcattaccaacaatgcccaagccatgtgagggggcagcagaagcaaaggcgaggaggtgagaccccacacggcatgctaccagaaaatgagaaccacaggggggtcacaactggaactcaatgggggttttcaaaaaaaaaaaaaattaaagccaagaaaccctctgtcacagtttcaaaaaaaaattgaagtggaaacgcaatatgtacaaggaataaaagtggagctgttcaggaggaggcaaatgtgggtgaacccctcgctcttccaaagctgtcactccctctcaggacccaagtgagggttccaccgtaggggtacctttcttgggcctcaaataaggagaggactgacatagggattggagctgaggtcaggacctgtctgcagggacctgaaggttactagggaggggtgatgggtagagaaatgtggccagccgaccctgtggtgggtggaatggggcatgcactcctcaggggacaagctcctgcccatcctcacctgggttcctgcctgcctctctgaggtctgaacagagacccccaaggtggcagcacacagatggggccagacctttctctggcaaacagctcaactggcaaaagggaaactttttccctttgccctgggaggaggaagcaaagtaaagatgcagcaaagacaaatcagcatacctgagctgcatttccatcactcatcacacaagaatctattgagtgcttattgtttgctagacatcattccaggcattaagaaaatacaccagtgaacaagacagacacgctcggctgggcacggtggctcacgcctgtaatcccagcactttgggaggctgaggtgggcggatcacaaggtcaggagttcgagaccagcctggccaacatgatgaaaccctgtctctactaaaagtacaaaaattagccaggcgtggtggcgggtgcctgtaatctcagctactcaggaggctgaggcaggagaataacttgaaaccagaagatggaggttgcagttagccgagatcgcgccactgcactccagcctaggaaacaagagcaaaactctgtctcaaaaacaaaacaaaacaaacaaacaaaaaccagcctgggcaacatggcaaaaccctgtatctacaaaaaatagaaaaattagcctagtgtggtggcgcatacccacagtcatgagcaagtcagctgcctcctcgcctgcccagaactccgcggatccctcagcctctgccctcgtcagtcccttgcatgacttccctccaaatgatcagaacccagtgggaacccagggtataccccggctggcccctaattctctcctgccaggaatccctcctcccaacctgagcaacctctaagagacagggagggctgccggtgcggagcttgtctgtgggcaaaacagctcaccatgttggaaggagaattgggtctttgggagcctctctggccttgagccagcccaggacgggcatcaaggagggccaggcagccaaggtgcttctgcctggcaggaatcaggatgccagacgccaggagcagccactttggctgggttccctgtgcttagaccccatagggcccctccccttccccacgtgtggccgtggttgccttgcagccatgtgggcggcagccacatttccaaaggaataggagctgcaggcaggccagatggaagcaattgccaagggaaagcagcagaggtgggggctggggaggctgggagggcccacggggaaggagggaaggagggaaggagggaaggagggagggagaagaaccttgtcctgccccgccccgcccagctgagaaagcggacaagcgtgtgctcagggtacggcccggccgggatgtggggttcgggagagcactcagaggtcagggtttgtgttccacctttgacactaatacactgtggccttgagcaaaccccttcacgcctttgagctgggatctgtttcttcatggggcaaaatgagcaaactccagggggcagttgagaactgggctgaaaagtgaaggttttggaagcaagcctggatttgagtcctagctcagctgcttacgagctgtatgaccttggccaagtaacttaatccttcaatcctccatttcttcatttataaatgggcttaattacagggttgtgtgaagctcacatgaagggacgtaaagtgtctagcacatcttttttttttttttaagtttattgggccaggcttttaataagtgcctgattgctaaatggtaatatttttgttatttgctgaggccattttcattatggggacagatgtacagatgttcacccatgctgcagttggcagaggacgcagagcacaagtagggtcgctgcagaccagcattccttagcactctccaaactggtcccagcactctttggggctgcctcccctaaacaggaaagcaagatcctgaggaccccaacccccatgcacaggcttgaatgagctgcaggtgggacaaaggaactctcctactcaggtgcttctgggcttctgcagccaggccaggccttcctcacaatcaaggcccaggtgggaaactggaggcccagccagacccacacctcacttcagcccgagcagcagcaacctcctccctgctgggccagcagtggcacccagggcttcagtataggcaatcctaccatcttatcacatcctatcacagggcagtgtggggtacaggggaacagagatggggttgtggccaggctgtaggtcccaggtaaagggctcagccaacactaaaaacccacagctctggacacccacaccctctaaccccgaaatgcaacaacccaagcaacctttgggggaattcagcccctgcagggctcaggggctccagtcagaaagctgaccagcacttggctagggcctgggcatcgcacgctgctgctctcacgtgaagctacactgaccacttcctcagtctgtagaataaaggacatcattcacacacctccctccccgaaatgtggcaggggttggggtgattctgaggccagggacagccagtagtccatccagggccactcaggacactcatacagaagcctctgggaagggggcaacaaagaagagggggttaataacaagagtcacccaaatctgcctacactcaccatttcctcccggcaaccaaaagcttcaggtcaaggtcgtgggtcttgagtaggaaggaggatcccagcgtgagggaaacacggagcgggagctaaaccaccagcaggggcctgttgcagggaaacgtccagccggcccagtgcgactgaactgagggggcaggaagcaggggctgtttgctcggggtgtcccaccctgcactgctggactgccccgctctccagcatctaaggtccatctccgaggggccaggagctgggctaggctctagcggctgccttgatggcaatctgtaggcttggacttcagaccccacttggggcccaagctccctctccatcccctgcaggccccccagccagctcctttccctatcggcccagggtctggaacttggcaggcacggaaacatttgtattagtccaagatagagggatcccttccctccaacagatggtgcaaacctttgagccattctgagaagaattcccaattccattgggacaaccccaggagcagcctctctgaggagagacccagagaacgtgcccaagtcagacctggggtagcccccaaagcaagggcagatggtggccagtggggagttaggacagaatgacagctcaagatggagcacagaaagggggtttggtctctctgctcctgctggggaagggagccctttccaggattaaaagtccagaaaggagcagattcttagttctatccagaaaaccggattctaggagtctaacgaggttgggaggctggcgggggcacggcactctcttcctgagaagcagagggccagtcactgcttcccgtagggaaggcagcccagaggcacctcagcctgggccgccagctcacagagaaggcggccctgttgtctctgaacaacaacccatccccaagctaaagacacccactctgcccaaagtccaagctggcaatttccaattcactcttctaactcttccttccatgtgcaccctcacaacctcggttaccatcttggagtctgggggatctggccccaactcctggcaagctccccatgtcttgacagagcccagggcccatggggcagcttaggatcacccacccagcgcaatggggccaggcacaggagcagtctgggagtgggccaggagcagggcagggaacggtcaaggggcattcccagaccagctctcagcaagcaaaacaacctcccgagttcatttctaggccccaaacagcgggcacgtccccggaacccactctagaattatcgggcagctttggagagtaacagcatgggagaaatattaccaatagtgaatatttatacagctctccctccgtgcaggcgcctttcaaagcacttagcatatatcaactcatttaaaatccccctggcagatgccagggccaggacctagaggaggtggagtctgtaggacgggtccggcacagctcaggagacagtgacacgggtgtgtgtctcttgtgagaactcagcctgtaccaggcctgttcccaaagttcaaaaagaatgagtccgcctgagcctggcttccacgcggtacccgcctcctgcggtggaaagtacaggcttccccaagaggcctgtggggggtgccagcttgtgggtggccatgaggtcagacagggcacagctgggcacccgaacactgcctacactcccagccttctggcagcagttcccttaagccaggccctcaggacccaggctggggagcagaggaagcagccacagtaggtcaggcctcaagctgcccagacagagcctccccccaggactgggaatggaggggcagtgctggcagacatgttggcagttctgggctggccgggaggtccctgccagccaggtccccgaggaaacacccacagcagacagctgagcccactccccccatcgcatccctcccactgctcaccacccatgcagccctgaggcacagtggcctaggcctgacgacccccataacgtggccctaggaccctgggcacagccggcctcccactgacaactccacctttgggtcctgctcagcgaccttgcgactcctgcacacaggcggaccccgcaaagcctgtcacctccagcacagtcagctcccaagtgctggacctgaccggggtagttgtgggagaaaccatcgctcgaggatgctggaggtgggggccgccgcttcagtccgggcgcagggctgggggattgggggcggaaactttccgcagaactgtcccgcttgctcactccaagggagcggagaggatccggcttcccgcgaaaatctggtccagggaaagggaccccggaaagcagctccgcagggctgtggcagccccaccccgacccgcgctgcgcccacgtgcagggcccgaccccctccgggaggcgcggcgccggctggggtcaggcggccgaggaccccgcggctccccgccccgccccgccccgcgggcccccgcgcaccgccgccgcgtactcaccctcacgggtggagcggggcggggcagcacggttccgcgcgcagctccgatccgctaggcgcaccgaccggcggcgcagcgctggcgcgacggctcgactcggccgggtccctgtcccgggcgcgggtccggcctgggagcgggcgagtccgcctgcaggggaggcggggacccgggcccgggttgggggcggggaaggggctggacacgcttgcgcacacggcggcccgactcccaggagctcccgggaggggtagaaagggcggggtggaggagggggaagggcgggggtgatgccgcgcggtcgcaggcttgggatggtgttcgcgcctccgagacccggacagaggcaagcaggggcgccgtgggtgccagagaggcggaagasgaggcctgatggggtgagcacagggccagggcaggcactgcctgtgaatggcgccagggtgggtatgcccagcgcagccaaggcgctcgctcccgggaacaatgagaatcaagaaagggtgcagtgctctatcccacggggaacggtgtccttccctcactggggaaactggggcagggtcctgttccgggagcctatgcttcccgtgccccatgcacgcaaggcagccagtcagtcccctgggcccagacgtgggcccttcctctgcttcggttggggcctgctgcccctaaactgctctctctgcacccctcacttgcatactctttatcttggcctcagaaagtttctcagtttcctttccgttattgaaggcgccaggcatcctgtctccaggaagaaacccctgggcccctgaccctggttctttggacccaggcatccccccaaataaacctgggaactgcccaggctgaagaacagttcagaagtcaccctacaggacaatccacagccccttaggccagtccctttcacaggtcagcacagtgtttccggagccccacgtatcaacagcccagtgccgggagcgccaggggctccaaggaaactatcagacccattccctgtccccaggaagcttaccatccagcggcacagagaaggctcaccatggactccattcaagaacgaggcaggataggatgtgaataagtgcaaggtgtgagtgactgacagtaagtgcaagggggttcagagaagtggcagctccaagcctgcttctgctgaagctggagggmttatmtgtcaagaacccccaactcaggaagmtctgctccaagtgagctgagtaaggagagtctgcctccaagttgttcctctgcaggtgactgtgctccatsctaaatcattccttgcacgggcagaagctgtttggcattgcaccagtgtctgattttgtttgaatatggtgcctttggcttaatcagtcagacatgcattcaacaactatttatttatttatttatttatttatttatttattattttgagacagagtctcgctctgtcgccaggctggagtgcactggcgtgatcttggctcactgcaacctctgcctcccgggttcaagtgattctcctgcctcagcctcccgagtagctgggactacaggcgcgtgccaccatgcccagctaatttttgtatttttagtagagacgaggtttcaccatgctggccaggatggtctcgatctcttgaccttatgatccgcccgcctcggcctcccaaagtgttgggattacaggcgtgagccattcaacaactatttattgcatgccatctccaggcctggaattaagctgggtataaagaacacaatgactaagtccctgcctcgggcaagtcgaggaagagggaagagcctccttgttctacagatgggaagactggcccaaagggagtaagcagctgcccttcataactaagtgaatctgacagaactgatccaagcgtcagcccagcctctaaacttggccatttgatgaactagatctaagcacagtttgcagttcttgccgtgaatcacgtaaatgtcactctaccagaaaatggaacttaagaaccagcatttgttcctggagacctgagttccaactcttgtctctgccactaaatagctttagttttcttactggggtggggggaggggaaaggaaataactgcttattcaaagggctattgttggcattaaatcaggcaatggatgcgaatttggtctgaaagcataacctgctatatataagtgtgtgctgttactatgcaggtggcgtgccttttctaacctataagctgtattcaggcctctcccccagcttatcccaagcctggttactaggtgcccagaagctaaccgtaattctgctcccctcaggttaggccacaatgtgcttactcatgatgatcttttccctccagtttcttaacagcatggccacaagcttagctcactgcctagaagccatgtcatctttggggcaggagggaagcaattctggtgcctttctcctcttctcttctctctttttctttctttcttttcttccttccttctttccttccttcctttctctctcttcttgtctttccatctttccttctcctcttctttctttttctttctttcctttcttccttccttctttccttccttcctttctctctctttttcttgtctttccatctttctttctcctcttctttctttttctttcctttcttccttccttctttccttccttcctttctctctcttttcttgtctttccatctttccttctcctcttctctttttctttctttttcttccttctttccttccttgctttctctctctctcttcttgtctttccatctttccttctcttctctttttctttctttcytttcttccttccttctttccttcgttcctttctctctctcttttcttgtctttccatctttccttctcctcttctcttttctttcctttcttccttctttccttccttcctttctctctcttttcttgtctttccatctttcyttctcctcttctttctttttctttctttttttttcttccttcyttctttccttccttcctctctctctctcttttcttgtctttccatctttccttctcctcttctctcctctctcctctccatgtgcttttttggccccaggcccccctttggtgcaactacaacacatgatgagcggctcagcaagaggcagtaggatgggataagcagggctttggcccatggggactgtttcttttggatgttaactgtgccaaagtgggaccaaggcaaccagaggaacaacaggtcttagtccccttccaagccatcagtgctgcctccattcccatttcctttgcctcccaaactctcctgtgtttctgcttggtggaagtggcaggacacctctgtgctggggcaaccagaggggcctcaggagcagagggaggagcaggtgcatctagatctgggaagccctggccctgcggcccctctctggcaggagtgggtgtgagcagcagcgtggaacagctcctgtatcatgtgccacgttagcatcctgcccaccaagaggaggaaacagcaagatgtgtttgaggaagaaatataccccatccagcatctcagatgattttaaaaatagcaactccrggatggtatttcagctcctatttttatcagatttatatggctggaccatggagctgagctgttcccagggttctcagtagcaagggacatcactcttgtagtgttagctgaaatgcattccaggaacctgtaggctgaaagagatcctgagaagtcattgcacacagcccctgcctctgtttaggaccacagtcagttaaccaccaaaagtttacggcttttttccttgaaacctcttggttggccaggagtgttggctcatgcccgtaatctcagcactttgggaggccgaggtgggtggatcaccagaagtcggaatttcgagaccagcctggccaacatggtgaaaccccatctctactaaaaacacaaaaattaactgggcgtggtagtgggtgcctgtaatcccagctactcaggaggctgaggcaggagaatcacttgaacccgggaggcggaggttgcagtgagccgagattgagccactgcactccagcctggcaacagagtgagactgtctcaaaaagtaaataaatagaaactcttggttccatgcgtagtctagcattttgtagcacttctaatcacgaagttatttttaatatttgtttggtctgttatacaaaatgtagactggatggcttataaactacagaaatctctcacagttctgtaggctagaaagtctaagatgaagatgccagcagcctgcttcctggttcatacaaggtcatcttctcactgtaacctcacagtgagaggaagggcctaggggtgactctgggatctcttttatgaggcactaatcccattaatgggggccccccaccctcatggcctaatcacctcccaaaggccccacgattgccttgggtgttaggatttccacatatgaattttaggggaacacagacgttcaggccatagcaaatatcttgcccaaatatctctagttccatccttttggtcactctcagaccagaacatttactgagtgattactatgtcccacaaaattcttatttaaccctcagaaaaaccgtctgggggaagcattgttatcactcctatttcatgagcagttatgtaacttgccccagataagacttggttatggcacagattctgtgttggagscttcagaccactctacttcccaagcaggggaggaacagaacattaaagattttcttggccttggctttcatttcttcatcgtggttctgaaaggaaaattggctacagtcttaaatgtatgtgtgggcccacgctagaagctcagctctcagtgccagccacactgagccctggtctccctaacttccgggcctttactctgcttgtcattgggctgataaccaagatccagcctagagcacaagaagacaaacgctgcgtgatctcgtgtgtagaacctaacaaagtggaactcacagaagcagagagtagaatggtggttgcctgttggaatggggagatggtcagagaatgcaaactttcagttggatgggaggaagaagttccagagatctattgtgccacatggtgacaatagttaataacaatgtactgggcggggggtggtggcctacgcctgtaatcccagcactttgggaagctgaggcagacagatcacttgaggtcaggagttctagaccagcttgtccaacatggtgaaaccccgtctctactataaaactacaaaattagccaggtgtggtggtgtgcgcctgtaatctcagctacttgggaggctgaatcgcttgaacccaggaggtggaggttgcagtgagtcgagactgcgccactgccctccagcctgggtgacacagtgagactctgtttcaaaaaaacaaaaaaagcaatgtactgtatacttgaaaattgctcacagagattttaaatgttctcaccattacaaaatgataaatatgtgacataatgcatatgttaattagcccgatttagtgattccacagtgtatacatataacaaaacatgttgtacaccataaatgtatactatttttatttgccaattaaatatatttttttaaagttttagcctgcaggtttagctttttggggctgaagccccatagccccctccacttcaacacactcatcagcattgtaattactttgtaattaatgcctgtgttcctactaaattgtaagctccacatgagctctgcctccaggtgcttgcaaaaaaaccaaaagggggtgggggtagatgctcaaagcctgtttattaaattgtattgaaattgaaacgcttgaaacagatttcattcctgcttattttctaacagtggttaaaacttggtaacttcaagttgacatgsatttcagaattcaatgtaatttcaataatattataatagaacaaacttagggttgccaacatttattttgctaagcaaggctattttaaaaacaactatcaataattatcttattttaaaaaatacattttaaccttatatatacatgtttggaataaaaacagtccttcctgagaaggaagagttggcagacctacatcaataaaataaatatattcaaatgctttggatatggaagtattacaagagaaacattttcaagtattacttcgtatgtagttgtttcttatttctcagttcggggatctgtattcaacagggacatggaatatggagcctgagatggtatttttctgtttcatgttggtaaatagagaccactcrgcaattttgctctattaggaaagtttgagacaaatggagagaagccaaggaacaatagcagtcatgcctccaactgcttctttccttctccaaccaagccagaaagaatgtaggccaagtgttgagggctaaaagccagtcgtggagccgtccaggatttatctaggaagggtgacatctgccactgctccagcagagcgggggcatggcatgcttctgagggcacacagttcaacacatgaggcactctgcagcacacaggaccaaggtgtcatgctgccagaggggctggcatttgccattttgtcaaggcagggctgcagcttgtggcttgctcaggacagaaggatgttgggctcttacgagatagcaggaagaaagcatgaggtagaggggctggtccttactctccatcccctgcgtgagatccaggaggcctcattcagagcctagctctggtcctccattcgccacatgttttttgagcacttataggtgagtcaccaccctaggttctggggaaatggtgaacaaagggccagaagtctctgcttcctggagctgacgttcactccataatgctggacaagacatcctgagcccatttcttcgtaaaaaggaaggagaatgtgggtcatgaaatgatctgctatatgaatgtagtgttataatgttgctttgtctcaaaggttggtttgctgagccaggtagtgtcttaggggccagggatagagagataactaaaacaaagctcctaccctcaagaccctctcagtctagtgaggaaagcggagaaactcacaaataggaataaaaggaggcactatattgcaaagctatcatcttgagttacctgggagtctgatatgaaggtcaccctaataaagacagactatgcttttggagtctcaacaggacttggcagagcagccaaccctggtgcactctagaccttgagggtgataagcccaaagagggttggattgagggagggagctgcatgggggccgtggccggcagggtccctggagattacagcagcagagcactggctggctctgaaggggaacccttgccaggcctctagcagaggcttgtctttccatgtacaagaaaagttaagtggtgaggcctggagaggggcccccttctgtactgtggtgaagataaacgaggctgggagaggagtgaggggacgctatcccagagaggctcctccccacagagtgggcagaaggaagacagaactggccagcccctcgggggagtcgagaaaccttccagagtgtgggtccctgtctccatgccctgcctctccagacctgagtgcctgccctctgctgtgactgccagcctcgtctgtcctgttgggtgaactctgtcccatctctcttgcccctcaaacatttatttatccggtgtcaaattcctacccaccttcctccaggggccaggcgctacgagatgaggggaaggaacggcaaggtcagcgggagcccgtggagtcagaccctccagcagcaccrctgggggctgggcaggagggcatgggctgaggccacagggaagggctgctccacagggaggcctccctctgctccgtggcagttgtggtgctrgagatggagaccgtgtttgcttgttgggaccacatctgctttcagaggggaagcgggtcacttctttcccctggacctggaatgggcacaactgagacgcagggagcattcctgcaagctggacactgctctgggagaagacctccatccaacctcctgccaagaccccagcagctgccagtgtcactgcccacaaaagtatttgcttagcccaagaaggagtcagtcagatgtgtggtggccatgaaatggatcctgctgattctctgtcagacctccctgcattggtcactacctcaaagttccttggctgcaactccatgttgcctgaatctagggactgttgacgtattgcaggggctgggcgcggtggctcacgcctggaatcccagcactttgggaggccgagatgggtggatcacctgaggccaggagttggagaccagcctggccaacatggtgaaaccccgtctctactaaaaatacaaaaattagctgggcatgggggcgcacccctgtagtcccagctactcaggaggctgaggcaggagaatcacttgaacccaggaggcagaggttgcagtgagtcgagattgtgccactgcactccagcctgggtgatggagcgagattgtctcaaaaaaaaaaaaaaaaaaaagagctgcagggaagaatggctgagtggaggccagtggcttcattgtgcctcatctgaactccctgaaggctgaagcaggtccctgaggctttctgaccacaccctccactccccggctgtttctatttttttaatttttttttctgagagggagtcttgctctgtcacccaggccaaagtgcggtggctcacggcaacctccgcctcccgggttcaagggattctcctgcttcagcctcccaagtaggtgggattataggagcccaccaccacacctggctaatttttctgttttttagtagagatgggtttcaccatgttcgtgattctgctgtttctaaggagtctctcccaggaccatgggggtccacagcaggccctgagaccctgaagcaggttggctgcacctgggctaccacctgcagtaaaggggctaatctctgaatgaggcttcctggttctcaggcaggggatggagagtaaggaccacccactgtgcctcaagcttcccccctgctgtcacttaggagcctgccatcctgccatccctgagagcttcccaagcaaggcacaaaatccacagccctactctgacaaagtggcaaacaccagcccctctggcagcatgatgccttggtcctgtgtgctggagagagcctgtgtgtttacttgtgtgcccgcccatacaagccatgtccctgcgccgcttgagccctgttggctgcctaactgctcatcagcctctgacgctttgaggtcccttcctggtctcaagatcctctgaacatctgcctctgataggccttgaacccgagccgcctccgggcttttgtattcaactgcaaccatatcatttgcccttgctgattcactgttttgcacttgatcttctggctgcttcatgtgagtctgttttgtcttcctgccgagataaaaactcaaggctggggactcgctgaccaaataacagagcaaggcaggcttttcggccttgcataatctgattcttattaaaacccgccgatttccaggcaccaagcccctatcctcgtcaacaagaagtttatcagcagggttgactgactcacagggaggtgtgacctcactgctggaaggaggaagtgccatcagaaacctgtatagataatttcctgaaagcttccaagtttggttttttggggaactcctcaaaggagaggtggatggcaggggaaggaggaggggtgatggggaggagcagaataagaagttgtacaaacaggagaggcacagagtggggagaaggaagccaccacggacrgtgagccctggggcttggaraaggccctcggcacccttccagggcagctcccacctgtcagttgaaaccaccacctggagactttccaccattctcaaggccttcccacaggttctacccacccactgtcccccaccatctgtctgcctcccaggccacgctgtccacactgagtgagcccgctagtttattcaatactaggaataagccrgtataaaatacatttttagaaaattcacttggagataaaaaatcttgtccccactcctcccccaatcccacacatctgtgctcttctgcctgagttaattcagctttgctgagcctcctgcaagagcttgagcagggggtcgtcagccctgagggcgaaggtgagcgtgcgctgctggtagtgcctagggtcacactccaagttctcgatcacctcagccagcaggtgggcccgctccacgcctgagccgggggcctcgaagcccagggcggtgaagtgcacatgcaggtggtagtaggagggcaggtagtgcaggtatactcgcagatggtctcccttcatccggtagcgctgcaggatggcctcctgatgagacaggggcaggcaggtcaggagtcaccgtgctgcctgaggcccggcgccatgtccccacctagaccctcctcccatctgaatcctggattggcctgggacagctcacaaaaaccctccaaacagctctctacctgctgtctgcttcagcttcctctgtcttctagtctaggaaatccacaagtgcaggtgacagcagcaaagctgagactctcccaaaagaagtggggagcggcctcaatcagcattccccaccccaacgtggaaaaaacactggcttcctcaaacagttgctgctgggaatcttggaaggcccagtgtctacagacaggccccagattcccaagactatggggactttcatgatttagaagcatttcatcagtcatgaagtggatgggaggaagcctcattctctcttttagcatagcacagggtggagcttggaaacaatgaagttggggatggggctatgctgagaacttggtgaaagagcagggactgtggaaggggtatgggaggggctgctcccacacagacctggcgaagtctcagcgggctccttgcagaagaggaaagcattgactttggccctggctccctttgcccacctccaccttgctcaggggtgggtctttttctaccaacctccaccttcaggaggctgtgaggcatagaattaagcggagactctcatctccattgtgggcaaatccctgaggtggtcagaggtgaagagaaaagtactagggcctcagtgggctcagtatataccccagaactgtgttctgcatttggagctcaccccaggaatccctgcagcggggcgagaccagggccaaggcacccgaggggcttcctggagtaagtgasgtctgtctgccagggtggagctgtctgagctgctagggcaggtcaaagtgttggcctggcatctccccaagagaaagacaccattctttgccatttgtaatatccagagactgcttcaggatctgaacaagtcaccccacaaagataaaggcagccaaggggtggtgccgtgggtgagcaggagggaagatagatcggggcccagcagcaggggaagctgggtatgggcagagccttgcctccaggtctgcattaacacctcgaagcatcactggtcaaaaaggggcaaacctctctcctggctgggcatcgttgtgactgctagctctgcgtgttaggcagagcatcacatttcagagtggaaaaaagactcagacccagccccttaggatggtggatttagaagggatccatctagataatgtggtttagggaggtgaagtgacctgccccaggccactcagctggttagggtccaaatgtcaggccaggaccacacccaagattctagacactcttcccccatctccccgtgctcctgggctctgtttagagccccgataatttcattcaattcaacaaatatcccagagagaaagtatcccagaacaccaggtgctacagaattcagcctgtcttcaatctagacaaggagacacacgtgtacacacatatcgaagtcatgtgcccatactcccaagaaactctggcatgatgtggttgtcatggttgtcatgagagagacaggtgatcctggagtaggaggggccaggacttaaggaccagagtctatggggtgaggggtggaagtgcatcccagatggagaaaggccgaggaaggcgtgtgagggtgaggaaaggtggcaggaccagggacaaagagccytgctcttcaacytcaagagcctaatggggtccccaagactggcatccagagagaagtctctccaagatggactctgggaarggtgaggaaaggggcccaggaacacactggaatctgagtctaatttctctgagmttccacgtggtttggtgaagccactcacctgcccctggtggaggatgttcctgagcagcggcaagtgctccggagtaaggtcgcgtagggatctgatgycccggcgatggcagatggcgatcaagtacaagtcatcgagctgcgtagagagcaaggggagaccaggctcagcagggaacagacctggggaggctgccaaccctggagttctcacgtaagccaggaagcacccacccctgaggcctacagcaccaggagaaaccccgcagggcatctgcataccccgggcgtgtgggatggtcttaaggagcaggcctactgtgtacgcttcttgctagagaataccatgtgagagtyctttttttttttttttttttgacagagtctcgctctgtcgcccaggctggagtgcagtggcgcaatcttggctcactgcaacctccgcctcctgggttcaagcgattcttctgcctcagcctcccaagtagctgggactacaggtgcgtgccaccatgctctttatatttttagtagagatggggtttcaccatattggccaggctggtctcaaactcctgacttcatgatccgcctgcctcggcctcccaaagtgctgggattacaggcgtgagccaccgcgcccagcagagagttctatatgctcactccccagagctgtcggggcagggagccaggaggttcaagaaagagcaagggcaactctctccctccgagagtttacagtcttatcgcatgtatgcaagtagctctactgtaagacacaaaataatcccagtgcaggaggaaggaaagactctagctacctggatgaacccaggaaggcctcctggaagagaaggcagaggatcaggtctagaaaaaaggtagaatttggagaaagggtattcaggtagaggaaacagagcaaagactcggaggcaagaatgtatagggcatagaatgtatacggaaggggagaggaagcaacttgatttgtttggagtcaaggcccatgaaggggtggagtggggtctgaaggctgagaagggagccaagggccagctcagcagcacacacaacaccagggcagttagcttgtttctctcttcccctatcgcacaggataccttcctgctgtccttcctgagcacaacctggctgaaaacctggaggtcacaacagtacaaagaatcaaagtcaagatcttgtgccagagagcaaatgaactcttcctcttgctgagaaaacccaccctgctcacctaaaccctggccttgcctggtaattccatccatgcgcctggaaggccccagacatcaaggctctgaggggccaggcacggggagaacccagcagtgccctgccctgcagtctgagctaccagattccttgtgaagataatttgaggaccatgactcacccaaccacatttcctggggcctcaaattgaaaattcaggatgggcttttctatatgactggctgatatccaactatgccatggtctttacatgccatgaacattctttcctgccagagttctaagaatctgtgttctctgccttagaccttctgcagatgagcccacaggaagctccacgtgtagctgagctrcatgcaccaggcctcagtttgccccaagtcccctgtgtactctctcatggcctgtggccaagaaatgtattctctcactttggacttaggagtccaaagagaagcccagaaacaaaattgcttgaacttgaatttgtgtgcgtgcgcacgtgtgcacgtggtggtgaaggtgtatgttttcggctgttctatgcgtcactgtcaccraactcccaaataatagtaacatttgtttagatgatgtctgctgacaaatcacaaacacgacgctaactcgcaactctctgctccactggcacagaatagggcatggagcctggtgctgggtgtcagcccatggtgttgggtgtcagttcacaggctgggtaagggagggaaaataatccattctttgatattagacatgacccaaaatttcctgctggcagccaaaggcctcctcgctcagagaagtcatctgaaaaaagctagcccaggggcaggaaagggcctcaggctggcgccccagaaggtggcccatcagtcactctgggaagacagatagacatcgtcagtctctttttacaagtcaagacagtaaaatcaaagtaatagtttcctggcaggaagaaagagaattgctggagcgttggagagccatctcttaacctctggggtgactcaaaggaagagttgcctggtctgagaactttagaccaaagaatttaaatcatgtgaactgaaaatgcatgtgtatccatatatacatgtacatatatgtttatatacccaatatagaaaggttaccagagacaaagaaatagcaacaatagttgttttggggaagggaaaggaagggctgtggggtgaggaagcatactttcactgaatatcctctgtactgtgtgcatttttgccacatgcatgaactaaacctacaagaaaataaacaaataaaaaaaaagaacacacaggtgatcctttaagagaacagaagaagggatgttataacctctaaggaggcacagtctctagcaaacaggcacctgataaatacatgttgaatggatgaaaaaatggattatctctttaattcaggggcatcagtttggagacagtaacttccaggaccagtggcaggaggagattcaaggtggctaggaaagctcctcaaagcaaacaccagggtgcctccctatccccagcccttccctgtcccaaagacaaaggatagaagcccaggcatggcctatcttcctgctggatacattgcctaattcaaagagagctaccaattcagtgctgtcacaagtcaaagatttgagacgctaaaatacagcatcatcaaaagtcaagtaagaattaaggtcgggcgcggtggctcacgcctgtagtcccagctacttgggttgctgaggcacgagaattgcttgaatccaggaggtggaggttgcagtgagctgagatcacaccactacactccagcctgggcaacagagtgagactctgtctcaaaaaaaaaaaaagaattaagcaaatgttaagaaggaccacacctgcatcgctatgaagcaaagtgtgacgtttaagctggccctttcatgacccttgaggacaagtaattccagccctgtggctggcagccagagtgcagctcctaaagtctttcctgtcttaaaggggacagaaaaagggaggttccactggcagctgaagcagagcctggaggcactggggtcagaaggacggcagatttctcttctctgccgtgggctcaaatgcattcagggcttctggaatacagacggacaagtctattgttgtccctccatgaccttaagactgcgatcccctggcaagctcttcagtcttcaagagtctggtgcggcagaaggtcctcctcctaccccacacctctatggccctgctgggattctcattaacggtgggccccgcctcctgtgacccaggctctgaccccggatctctaggtgcagggcagccccacaagacagatgggggtttgcagagccaccactcagtttgagacaagggaccatcaggtcctacctcttcaaatgcctacagagccagtcctggctccctccttcaaggcctgaaggtggcacaggcagagagaagctgcagggaagggcagagtggatgcaggcgtccccttagcctctcactgcagcgccccacacaaggagagccctcttctttgaacttacttggctctagggaatcatcgatcaatgctgcaacttcggaaaatcccttcaaattctttcccaccccttgggtcacatttgggaattcccacaagcctcttgtcaagagacgaattatgctcacttgcctgtgcaaccctgagccacaatcccacccctttaccccacgtcaaaactgaaggtgtcataggcagccacaactgggaaagcacagggagcgagcccgcggaggggcagacgaggctcactccaaggcaccttctctacaagagtctctccagcctttgacgggtgcagaaactagacgggcccaccgaaagcagaacggcacatctgagcctggattactccacaggtgaaagtgcaggagagaatatgtctgtctgctcccagcacccatgcctgcctgcctacctcggccttatccaggcccttcttctgttgcaggctgagcacagccaggttccagtctgtgttaagaacagcactctctgcaacacagtggctctgcctgtttctgaccctgtcagggtataaaagcttctgatactctcaggtataaaagaggtggtggtaagtgataactctggtggtgggctggtctgggagagacagaagaccatagggaactggaaagggatacctgtgagggaggacggctcctcccaaacctgctccttaggaaagtaggagaagcagaggtgcttggaggcagggcacggggccaaggggcctgagtagaagtctgggctaagctactccacagctcgggctgaggaggagatgccttgggttggtcaccatggttcctgcctgccagtgcttcagaacacgggcctgcctggatctgctggtgtcaaggggaatggagaaaatggaaacaccccacccgagggctccagatgcgggtggaagcacaggtggctgcccagaccacttggctggtaaggaatggcctatgtagtcatgggcacaaacatcaccccattttacctcttgggtgggaggacagccagaaagggctttaagctgacccattaaagcaaaagcacttatgtatgacaggtatccacccagtccccacagagagctcaggccaacccttgttggttaattataatctgcttagagacaggccagcgtgagaaagagggcagtcagaaggaccagcacttacagcagggtggccagagatcaggacattccagccagaaacctttacctgctgttggttccacttgaggtcagggatgaggacaaaaccatcagagggatctgggttctcgaaaacaatccggtccgcttcagccttcttgtcgagaatgttatacacccactgaaaggagggggagagagatggttcacaaatccactcatcaccccttgagagataccccaaactgagctcagggcattccctggcctctccaggagacagaaccaagccataaaaggccgccacgctcagaggatctacatccgggctgccctgtccccaagcatctgttcttaggggtccagaagggacttcccccttcccactccagctggcactcagccatgcgtcatcacaagggtctctgcagcttggaaggggccaggctcttcctggtcagcatagtgcacatgctctgcggaggcctccaaacccaggctgtgtctgccctctatagcagtgaccccctccaccgctcacaggactcaggggaagagctgcctccatggatcctatttcactctattcaggactatggggcaaagagaggtaggaggctgagggcaccacggtttccttctgtggaggggccagctacccaccagagcagtgagagcctttgcctctagcagctcatgtgtgcacgtttcccgccgcactgggattctcatcagcagtgggctcagcacctctgcccgcctggagccgctgcagatgccggtttatcagcagtctctgctgacacagaccccgcatggcaaagcagaaacgaaagctatgtagagacacagagacagtgacctcaccaagacctttcagggctacccagggctcccagcccttgtgtcacccttggatcagctgctgtcaacagtctgcagaggacctttcccaggcctgtgttgacccaaggacattactttacagagatggtcctggaggcctgtctgaggttaggaggctgcaggaggttgggctgagaaggcccctgagctcacaggcctcaaaccccagtacccccagctctcctctacttcccccggctctcagggccctttgcaaacatgaactcatgcaggacagtgaactctgccctacatctgggggagagacctgctaggaaaccagagaggggagtggctgaggacatactactgccccttcctcctcacagtcagaatggtctccgagctcactgatgtaggagaaggagccatggacacgaggtgggatggggaggccagggaaccgacactaccaggcagccatccatggtcctccttccactcccagaagtgctggacaggtagcatcaccgaaggctagaggcacggggactgccttatggtccacacaacctcacaccttgagcctggagggctgaacacactgcattgcatcctcgcctctcagctgggatggaccgggggagagggcagctgggcctcgaggtctcctgcaactctctacccacaggaagcatttcagctcagagggccccaaacccctgacaagacccacaggccggtcacaatgtggtccattcacaacaaaagacaggcagttcccaagaaaccgaatgaggccccttcctgggaggggtctggaggacacctggcagccacttcctcatgcagtgccggggccagagcaatgcatggccagtacatccacagaggcatttcctctctgacctgaaatctcctgggaatgtgatgccagaggaagccagcggaaatacaagggagggagggagacggcattccctacagacagccccaacgcaccccataagcaggcctccccacggccagtccctgattcacagaaaaggggcatctgcctgtgactagtataagagtgagagtgaacaggttctgagccaaggagacctggtttcatctcccagctgtcactgggtgagtgactgatgcctcctttgtaaaatggggctgatgatatctacataagggtggtgaaggttttcagagaacacgcacatgaaagcacctagcacagccagtataagggagacccccacgagtggcaaaggtggtgggatggtatgccagaggctacaaaactgactggggacaggaaaagagggaaaggcggtgagagcaaaggaggtggtgagagaggaaataagagcggggctggaggacgagtgactgcaggaaggagtgatgactgtgagagcagctgcactctgcctggcactgctctcagcgtcacagcaaccctgagaggtggctgctatcattgtcgccattttttttttttttttttttgagatggagtcttgctctttcgcccagactagagtgcagtggcgtgatttcggctcactgcaacctccgcctcccaggttcaagcgattctcttgcctcagtagctgggattataggtgcccaccaccacacccgactaatttttatatttttagtagagacaggtttttttgttggtttttgttttttgttttttctgagacggagtttcacacttggctggaatgcaatggcgtgatctcagctcactgcaacctccacctcccaggttcaagtgattctcctgcctcagcctcccaagaagctgggattacaggcgtgtgccaccacacccagctaatttttgtatttttagtagagatgggttgcgtcatgttggccaggctggtctcaaactcctgacctcaagtgaactgcccaccttggcccaaagtgctgggattacaggcataagccaccgcgcctggacattgtccccattttacagttaagaagaatgcaagtgcaaggaagtts

SEQ ID NO: 97329 - DNA, 57200 bp, Homo sapiens
agaaaagctcatcaacactaatcagataaatgcaaatcaaaaccacaatgagatactatctcacaccagtcaggatggcttttgttaaaaagtcaaaaaataacagatgttggcaaggctgtggagaaaaggggacacatatattgttggtgggaatgtaactttgtccagccactgtggaaagtagtttggagatttctctaagaactacagcaatcccattactgggtatatacccaaaggaaaataaatcattctaccaaaaggacacatgcacccgtaggttcattgcagcgccattcacaatagcaaaaacatggaatcaacctaggtgcccatcaacagtgcagtgaataaataaaatgtggtgtgtatatctatatctatatctatatctatatctatatctatatctatatacaccataggatactatgcagctataaaaaaaaaattcatgtcctttgctgcaacatggatgcagctggagaccattatcctaagcaaactaatgcagaaccagcaaatcaaacaccattatgttcttacttataattgggaactaaacactgggtgcacattgggacataaagatgggaacaatagaaactggggactactagaggagggagggaaggagggaggaagggctgcaaactacctgttgggtactgtgctcactatccggatgatgagttcaatcgtaccctagacctcagcatcacacaatatacctttgtaacaaacctgcatgtgtaccacctgcttctaaaacaaaaggtgaaaaagaaaaaaaacaaacacaaataatccttttccaagacttgtatatttaaaggctacaaagctaaaaaataaaataaaaatttacccatttcgttacattgactttcaccagacttaccacactgttttctgcctacattcctcttttatttctagggcaaaatttagagttccacgatacctctgatctggttcccatgtggagtgggcttggggatctggcccattaaagtcagctattttgagggaacactgccatttaggacatcattgtcatttacctggagaagtgtaacagtctgagttagtcctgcggcattgatttttgtccccttctcatctgctctccacactgcagtcagaatgatctttctaagagtacatatactcatgccactcctccgtatctgaggacccttaggataaaatccagagtccttcctgtggcctcccatgccctgtgtgatccaccctctgatgcacccctctgctgcctcacctttccctgtctccccctgcattctgggctctgcctatgctgaacttctttcacttcctccaccacagtgctgtgtcacagaaatagaatgcaactcacataggtaacttaaccacataggtttctaatagcaggccgggtgcagtggctcacacctgtaatcccagcactttgggaggctaggcctccctgatcacactcctggtcacttgaggtcaggagttcaagaccagcgtggccaacatggtgaaaccccatctctactaaaaatacaaacattagctgggcgtggtggtgggcacctgtaatcccagctactcaggaggctgaggcaggagaatcgcttgaacccaggaggcagaggttgcagtgagccaagatcgtgccattgcattccagcctgggggaaaaaaaaaaagagtttctaatagccacatcataaaaaaagaaacaggtgagccgggcgcagtggctcacgcctgtaatcccagcactttgggaggctgaggcaggtggatcacctgaggtcatgagttcaagaccagcctggccaacatggtgaaaccccatctctactaaaaatacaaaaaattagctgggcatggtggcgggcacctgtaatctcagctactcaggaggctgaggtaggagaattgcttgaacctgggaggtagaggttgcagtgagccaagatcacgccattacactccagcctagacaacaagagtgaaactccatctcaaaaaaaaaaaaaggtgagattaattttaataatatttcatttaactcaatatatccaaaataccatttcatgcaatcaatataaaaagttatcgagatattttgcattttgggggcatgtgtgtatgctaagtacatactacacttagagcacatttcatttcagactagtgactttttaagtgcttgatagctacaggtggctaatggttcccatattagatggcatagctctaatatatcatgctctctcccacttcaagaccttcacacctgctgttccctcttcctggaatactctttgtctttctcttgtctaactaatgtgctactcttttgtcaatcaagtctcagtttagaacccacttcctctaggaatccttctctgagccatctagataagatgtctctactctgacctcccaaagaatcctgtacttctcttatcaaaacacatgatcttactttattgtcattgctgttatatattcggtctcccttgttgcccagagctttgtgaggactgagaccctgactgccttgcttacctgtatcactagcaatatgtaataaatgcagaagtcctcagcttttgcctccctcttaggacctcttggtctgttttattcttggtccgttttatccttcagatattgtggatggaaacctgaagtctatcatgaggctggtccttgccttggcagctcatttcaaacctggctccagcaggacggtgaaccaaggacgggactccagagcccctctgcaaagtcaccgaccacactgtgccactgctgttgcccagggagcagctgctgctctggccgatgtgtgtcatgacatgtcccgatcaggacgggatgtctttcgatatagacagaggtaagggtagaaatctgggggtgggaactgatccctctctctgatacttcttctgttagatgatacagtgcagtagatagaaacgtcacccaaacagccccagattgcagaaaagaacatggagtggggaggtaggggagggcactctcaaaagagaaaagccttttcttctgagatgtttatttttattttgcatttagcaaaagtaaaggaatcttatgtgtaagtttttgctctggtgcccaaaatttaaatatacacttttggcacagtgtgttttcttcactgggaggtccgtgggagcagtgttccagttcatctagaggaagctccactctggaatgtacccaaaggtcaggttgtcttgggagtcatggcaggaaatgctttgtgggttgtgtatctgctaagagagagcaggaccctgaggtgttgcacaggttggtgaattacttgttttttgtctgccttccctgctaggtaccaagtgtctttgaggcaggggttttgtcttactcatgtgtgtatactgctcgcagagtggcagtctctctgtacttgttgagttgatctgatctgaaggactgacaccttccctttgctggggtcctttgactttaggaacagcagcatggatgaggaaattgagaatccatactggagtgtgcgggccctagtgcagcagtacgaagggcaacaaaggtccccgtctgaatccagctgctccaggtaactgtggcctctgaaacctgaattctggaggattctcggagttctcggcttcaagtaacaatacaacaagcaaaaaggcacctaagccctttttctcccctcagtttatgtttggctttaaagggataccccttagcagtgctttgtgggtttgtgctagtaggagggtaggaaggtagggtggggtgctggtttatttcccacaaatggaatctgtgcagtcccagtgccagtgcttaactgtgaccacatgggggcatggctggaacctgtcagggcccagtccagtggttctgacatttgcatatgaggtgccagtgtttatgatagccagttccattgtgctgtccttgagcctaagtgtaactcttaaggccggaaaagtctgtgtaaagctcatagaagagaagaaattgagcagagttgtcttagagcattagaatgtttccaactttcctctacaggaactgtggctgattagtatgtgtttgagcaaactaatgatgtttgcgactctagctaaaagttgtgtgtatcctttagagccaagtacagagaccaaaacaggatacagtgccctaataaaaaccttatcagtggcagaaaaaagattactttactggctcatgtaaattgtgcttctataaacactccccagatcatgtttttactaacttcattttgttgctgaatcataatttatgctctaatgaccttttctttcctatcccaaccctgtgtaatctgctctatttagggctaattgttccttgtcttgtatgtatgttatgtgtccttgttttcttcctcctatttttttctcataaaactccatcctattttaatgcacatttcctaatttattgaggtcatatggaactctttctagtattttaatatactggtaaacttgctaactttttaccttttttacatttaatagctgtgctctttcttacttataaaattcacataacataaaattaaccattaaacattataaagtgtacaattcagtggcatttagtatcttcataatgtggtgcgaccatcacctctatccactcagaagacatcttcatcaccccaaaaggaagccctgcgcccattaagcagcaggtgtgcttttaatgagaatctaaatcatttcttccttgcttgctgcttaggttatcacctggagcggaattacaggatgttttgttgtattgcttcctgcacttctgcaggcctttcactcttctgagcctgatagtgcctgctagagttggtggtaggaggaagagtggatttcttcctgagggcacctgctttctcctccaaggcaggaggactgaggggagggctgtgagactgtgaatgtgtgaatgaggggcccaccggctatcaggctgcagtgagctaatggtgacagttttctaggagaggggccagaggagaattgtttgctttaccctgtttttcactactggattttgacattttcttctaatgctgacccctcatccagctctttggcatgctgggttagtagctgccttttcctcagtgagtccctggggaaggagagggcttcttgtggctatctggaacccagcaggttcccgcacattctgagccctcgcccccagggagcccacttagtggctctgtgacccatgaagagcccaggagcccccagatgtggcttgctcaggacgggagtggctcagaaggaaggatagcccctgggtgtctcattccctgccactgctcctccggagacgccctggggaagccctgccagcctgttgctccgaaaaccgcataccagcctcacattgtagccaagcaaaatgatccttagttggttaaaaagaacacacgaaacgccagaggggaaggtgggaggggataggtgctcggcgaattttcctggggagcgtcagagtctccaccccgaggagcggccagagccccatgcgggcctgacctgtccgaccgacccctcgtccaccaagggagggctcagagtggagaaggcaaggtttttggtgcggggctccccagcactcagaccactagagccctcctcgtgattctgccgatacgcggctcttcccctgcctatcctgaggctcccaatctcctctcctcgcatcccccaacccctcgtcgacgtccccacccccacctccaccccgcccagccccgcccctggcccgcaccctcaacctccgtccagagcggtcggttggccagcggagctggcttgggtcggagcccggctgcctcgccgcgtgtgacagcccagggagggagcagagggtggggcggggagggatccggaaggtggcacggagtgggatcgccgctggggactcgaggcgcagcctgcgccgccgggagcctccctcccagtgggagatgggttgagatgcccccgccaggggggatgcccggcaccgtgcgtccgcggaggccaagatgcagcggccaggggccggcagcctgcgaggggaggcagcttccgccggggccgggctgctgcacagtctgagcggccgggactgcgcgcttcagagcctggagcatcccagtcgctggggccgagacgccgccgccgccgccgttcccgctttctcccgcgagccgggccagtagctttgctaggctggccttcccgtggaggcgttttccagccccagcgcggggagacatgcctgaatttgggagcgatgtgactctcagcctcccacttcacccggggacgcaggcttgctgaagcccgagacaggagggggaccatgggagggacgcaagtcaaatggtgagctgaagccactctggctttggaagtggggggcctgggtgggaacaggggcagggctggaggatgctgttggccggagacaggcggggtggtgggagcattatgttgggaggaccggctgctgaccaggggttatcactataaaatacggtgggcgtaggaagtggagccagcatggggggaggatgagtagcccttgcgcctgccagggtctttggtgggggagggcacttcatgaggatatagaactcttccttattgcctattacccgtttaaaaaaattaatttgagtgggatttggaagtatctttgctgcaggattgcttgtctgataaattaagatagaagagctattagacctgtgggaattaagaaatgtatcagccagacctgatcagtcattctctgacctcagagaggattatgatgctaagtaggggattgtttataaaataggacttttaagctaatcagggaggagcctgtcatatacataattaattagcattaaaatatttttttctgacctggggcagaggatataatgcatattccttgtccatgaggtacttctttagggaggcagcagggtgcctgctctgacatgtgcctcgggagtttcctgcctgaggtcctttatctctccacttggccatcgagtttcatggtctcacctctcggtggcctcacattggcagcctcaattcaagaaagagaaatgttgttttcctttggctgctctgccactcccccagcggggatggatatccagacatccgcctccttctgcccttatatgggagataactcttaggaaggagaaggagctgagcatgcgtctgtgcttttaggaaagcagttttctagcatcctaggttcacactgcaccctcctccccgattttgtctcacacttaccaactgtggtccagcaaagtcagaggatggaacatgtcatccatagcaccttgtcagatgagaaagtgttttcttgtttctcaaagatgagcagctcttgcaggcygctttctacacttggattcccatttctgtaagaaggtaaatgctgaggcctgagcaggcacaaatctattctccttgtgaatgacatagtacacttggatgagagcttttcaagcagctaattcatgttggcctggaagtcaagattgcctaagcggtgaaagatgaataagaaagttctagaaagcaattgctatttcggaatatcacttcttgccactccctacccytcctgcctgtttggttatagatctatagatatggttaagcaactttctttaatttgatatttcaatttaaaagctttaaaatgttttctgtggttctaagaaggaagagaatgtatttctagttgaggtcattcccagcaaagcccctaaaatacggacagtgaggaggatgagacactagtcytcaggctgcctcactgcttttgacgtgcctggctacctccaccatgcctggctcttgttttttactggattctaggaggacaaaatgttaactcctgatcgtggttgtgaggattcgcctgggagacttcaggggcacattaagtgggtcagtgaatcctagccactttcactgttgtctgggtgatagatttggaaagaattcctgagagggggctgggcccggagacccctcagcccctgagattctttcagtgctgatgttctcaaggtgcagtgcaaagagagatggctcgagactccttttccctgtcacatggaagcaccagcctcacattcccatcttgtcttgtagatttgctgtttttttggagatttaaaattccacttccctgaaaaatctgcatagttccttccaaggctagtagttatatcagaacttaagggccaggtacggtggcccacgcctgtaatcccagtacagaggctgaggagagaggatcacttgagcccaggagtttgagaccagcctgggtaacacggggagaacttgttctacaaaatgatttaaaaattagcttggcatcatatgcacctgtagtcctagctgctcaggaggctgaggcaggagatttgctcaagcccatgagcttgaggctgccatgagttatgatggagccactgcactccaacctgggcaacagagtgagaccctgtctcaaaaaaataaaacaaaacaaaatcttaagaattgttgagaagattctgaggacaatttgaaagtattgtgtcagaaatataaataactttttgataggaataaatcaagtaaacccttactccactattcctagcaggtctttccccttttgacatattatcttccccttgtcatgctctagctcaattactgatatataaccgctcctctgcccagcctggcaatgtacgccctccagcaacttttccccttgaaccacccccaccctgtactctcctttgtgatcagctcagagctgatctgccatgataacttggctggtattgcctgtatctgtgagagatcagtgttttggaaataaaatttccttctagctccaaaagctactagacacagactggcatcagtctttgaacgtgggcccagggatggtgatggaggaggtggtgggaggtaaaacaaagcaaaacttggagttctttgaatgctagattacccatcattttggtaaatctcttctcaatgaattaggcttaaaggcatccttgttgtgggagagactttgtaggactrggtcattcctttattcaatattaatttcattcattcaaaaagttaatcattaaataaatattttattttctgtgggccaagtactgtgttacccatggaggagtaagatgaataagaacatgtccctgttctcaggaataaattatgaaagctgctttctgaacaactcttcataataatcgtttttcttcctttttcttcaatcacagcctgacttcacccagtccaatccacagtgcaaagagcgagtccattataacccagtcagaagagaaggcagattttgtgattattcccgctgaaggaatagagaacagaacaggtactatctctacgcctgcctgggctggttcaaggaacagtcagcttgaagaatttagaggtccccatcaccaataagctccctggccttccccatctccatggtctgtgcgtgcagggtcagcactagagggctctaatgactttgagccaattaatgtggttatcctcttgcagaatgccatttctgatatcctagctgtcaaaaatcttgcagcagcatagataggccctttctcagctggctgcctatgaattaggaaatgactttggggcagtcaaaagccttactcaagtaaacacttttattattcctatcttatacaaataattgcaggacttacataacttaaattgggaccagaaatgcattgtatgagctgaggtgtctgtgagggcacagagaatagagagcaggtctatatcaggcttggtatgaagctacagaaaggaccacaaagagttccctttgtttagacttccatactctgtctcagttgctctttattttttcttacatagagagaaaaacatgcaagaagcaaagtgcaagacttagaattgtatttacccacaagagttgtaatgaaacasaggccctcagaagaaaaactggaattgaattcttctgtattctgctccccatctaaccctggcattagtaccaaagagtcagtcatgttactgagtcaaaactcctgaggccttagagagagagggagagcatttactgagtgccgctctgggccaggcaccagcaggccctgcacataagttacctcatttaatctttgcagcaacccagaggggttattatattcgtctcttgaatgaagaaactcactgaaagagtttatgcctttctgaattctagaatgcattttaaatggctgtacatacaattagatagtataaaatagacaaggaaaccagagcaaagagaccttaaagctaggaaaataaaagtgatattaaacagtttgtgcaggtatgtttttattggtttgtttgctgtgtgactcacacagtattctacatgaaagtggtccacttatgagtgagtgctgaaaggaatattgaattgaagtctcccctctaaagcttcagagtaaccagtaagattttgttttcattgcatctgacagctcctctttttgtacctggcaaagtcaggctcttggaatgccagttctaagaattaagggtgaagtctgtgtggcgcataccaaggctcccgtggagggaatcttaatacttcctaagagttttaaaagaggatagattgttctagcaccaagtgagcctgaggcctgagctcacagccaattctttaggcctcacaaccccacctggtggagagtccagtctgtgctatgagaacaggttcagaacgcaggtgacctgaacctgtgaacgctaccctgtgaacgctgtctgctggaaatcagttttcttcaacatgaactgtactccctcttttcattttttagaagggacagattctccattatctcgagactggcggccagggagccctggaacctatctggagacctcatgggaagaacagctgttggaacaacaagaatatttagaaaaagaaatggaggaagcaaagaaratgatatcaggactacaggtagctctctcccttgtagtttgcccttgttataccaattgattattaagtcagtattatcaatggaaaataaactgattttagttttctaggaggtcagaactgaatgaggagtttagatatagggaatagcacagaaagagcagaaaattccttatatttgaatactttaaatggactttgtgggctaccgttcatagcacagcgcttaagatttcagcaagcccaggagccattactgacccttatcaagtccttattgttgactctgtgctacataggtgggcttctaccctgtatgtggctgcagacctgcaattgcagctttcaccaaagaatggcactgtgaatagtctgggattttcttctaggaattctctagcaggaagagtgtaagagccagtaatgctgccaggtttccatttgaatttagctaagggatttagctcactcctaatacatgtgcaaatggatgccaaggcataatggtcaggtagaagaggtttactttgagcaacaaagcccttcagtttttcctatacctgtagtgccagctcggcaaatctacccgagactgacccacttgacatagttcccaccctgagtgaccccctcattcttgtctttgtgtgtctgtctctgtttgggggagcgcttatagtgtgctgatgaccctgaaattgcctaggaatattcctttctgtttgtgctgggaactgcagtgcttctgaattgtcaaatatttatggacacgtaaacaaagcccacattatgtgtgtggctctggcagccggcaggcggtggagggcgtgctcccagctagcctgcaacagggtggggacacaaaagattcctaaagaagaaaggagattggtgctgtggcaaagcaatttgcataacgtatgccccaggaactgagaagtgtgggaggaatgttgcctgcgtaaacattcccaaagaaagttgttggttttccttcatttgctctgtatttttaaaatggctggcttatgaggccttttagatctcttttctgccactccattaacaaataccttaatggaatgtttttgtgtgtgttttacttgcataggaagtatgtcatggagaactttgagattatacccaaccaggttgttcccaggataatttgcattatatgaacatagatattcatcagtttggctcaaagtttgtttgcattttcttagtctgggwgaaattcgatggcagattagacagaaaaagaagagaaatgacaggcagaaagtcagcatcttaatatttcctgcaaacagaagagttttaattcacagccacatgatcacaatgagaatttggttccattgtagaatacaaaagggctcacagcatccactgggcttcttaactcttttcagtgattaacaagttgcttgctaagccacatccaagatttctgacttattagtattccttagttagaaccctttgaacagtttgctgttatagttgatatttccataatgttgaatgcccttagctccccgcggscctggcttcttatatatgtctgtacctgttgccatgactggtgagatagcaaaattcatttgacttactcaaattttattataaaatggggtcacatttttcagtctttcactgacctgatagatactcacctgcagggacagatccaagttttgtgagtcctcacatatataatttgtgtgtgtgcaggggggcttcttaaagaataagattacaaaattatgaatataataattaggtataggcaacgcatggtgggccacacctgtaaccccagcactttgggaggctgaggcgggtggattgcttgaactcacaggtttgagaccagcctgggcaatatggcaaaacccttgtctttactaaaaatacaaaaattagccgggtgtggtggcgcatgcctctaatcccagctactaggaggctgagacatgagacttgcttgaaccctggattgcagtgagccaaaatcgggccaccgcactccaacctgggtgacaaagtgagactctgtctccaaatattataataataacaataataattaggtataggaccttgggagaggcaatgcatgcggggggcctacagctggagctttcttagcttcatggtaaatctgcctccctattccacctacgtatattctaatgaaaaccacctgggtcaggagctgaaatgaatgaggacatctctctgcaaatgtgttttccttcttgttcaatagaggttgctttagggagtaaaaatgcagaatcagtaaaacaaagaaaaatcaaacaaacccaagtgagtgctccaaatgtattccaaataattcattataatactcatttctaagccgtgatgattctacactgcttttagatcattttctccctggtaaaattgagtttgagcagctccagtttgaaatgtgttgtgtctcttttgaaaaaaaggtttgtttttagattttcttctggggccaaggcaccttgaagcagagcagtcaggtgtccagagagctgaaagagccagagcatggacctaacgaaaggaactagtcccagggtgagcaatgggaagtatctaaggagcaaaaattaccaacgaaatgtcttgaggaggctgagttgtgattttaacttggggtgagcttaccaagttcaactctggactaagtcatctgaaggagagttaagtttctttctgcctttgtggttattcaggccttactgctcaatggatccttacctgaagatgaacaggagaggcccttggccctctgtgaaccaggtgtcaatccygaggaacaactggtgagctccatcttttgtgattggacactaaatctgtatgtattttacttgtatttagcatttgacactgctgttcatgccttcttgaaatgctgtcttccttgaccagttctggttttcctcctacatttttgaccattgtttccttcttcattcatttaataaacaaatatttattgagtgctgactatatgccagaccctatttcaacatgctggagatatggtagtaacaaaacagatctaagacccgacccttatggagtttacattcaaggtctctttgaagcttctcgttttctgcttgtgcctttaatgttggtgttcctcagcattccagtctaggccctcatgtgtcttaaacattmacctgggcggtagtatctgcctccagttcttcactcacttccctcttgcttctcatgtatttatttccagctcagctcttgctatggatttctagatttatgtatgcaatatgcaactgcctacttattatctccacttgtaagtcccataagcatctcaatttcagtgagtcctaaattaaagtgtttctgtcctctgcccaaccaccaaagctacttgtccttttggatatctgttttggataccaaaatgcgccaaacagaaatctgaatgttgtccttgaatcctttccctctacatacttccctgtacatccagtcagtcaccaagttttaccagtttacatttctaatttctttatccagttttctccattctcacagccacttgaaaatcaagcctccatccagtattctaacagccttctcactggttttcctgattcctctcctgtcttcccctaattaagtttttgtaaaacagcaagaataatttgccttaaagacaaacttcattttgtaacccttctgcatacaacttttcattgattccccattgccctcactggcctttcttgatctcgccctgatatttctctccaaattcatctcttgccatttcttcttccctttaccccaccccctcccctgcacccaacccccmccccawacttawtctttttttttttttttgagacagagtcttgctctgttgcccaggctggagtgcagtggcacgatcttggctcactgcaacctctgcctcccgggttcaagtgattctcctgcctcagcctcccaagyagctgggattacaggtgtgcaccaccacacctggctaatttttgtgtttttagtagagatgggtttcaccatgttggccaggctggtctctaacacctgacctcaagtgatctgcctgcctcggcctcccaaagtgctgggattacagatgtgagccaccacgcctggcccacccatacttattctaagctttatccatatagatctacttgctacttgatgcatatacttacatcagagagcaggaactgtttcctgttctttgtatccacagtacagagctggcatctagtagtgctcaataaatatttgttgaatgagtggctctgtacttcacagcataggtgcttagccatctctgtttgtcttatattcagattataatccaaagtcgtctggatcagagtatggaggagaatcaggacttaaaggtatgtcaagacatgtacattttaccccttaaaaacattatgggggccaggcacggtggctcgcgcctgtaatcccagcactttgagaggccgaggcgggcagatcacaaggtcaggagatcgagaccatcctggctaacatggtgaaaccccgtctctaccaaaaatacgaaaaattagctggatgtgctggcacacgtctgtagtcccagctactcgggaggctgaggcaggagaattgcttgaacctgggaggaggaggttgcagtgagcagagatcgtgccactacaccccagcctgggcaacaaagtgagactccatctcaaaaaaaaaaaacaccattatgggactattacacaacttcaagagggaaagggatttcagaattggaatctttcctgtatctgtattatgtctttacttgaaagagagagatacatcccaaatatgtcaggaaggtaataactttttaatcctggtggtaggtaatagaatttcggtgtcattattggttgtaccattctatatgtttgaaatatttcatggtttttattctttaattaaaagaaaaaatgtatctaataccagtacagtctttttttataaatacttctcagaattcttttaggtcagtgattcctagcttttcttttggtcataagtctatgagtaaagacattaaccctctccctagaagtatgcatgtatgtttgcactcatactcatagacatgaattttttttttttttttttgagacagagtttggctctgtcacccaggccggagtgcaatggtgcagcctcagctcactgcaacctctgcctcctgggttcaagcgattctcctgcctcagcctcccaagtagctgggactacaggcgcccgccaccatacctggctaatttttgtatttttagtagagatggggtttcactatgttggccaggcttgtcttgaacggctgacttcgtggtccgcctgccttggcctcccaaagtgctgggattacagcgtgagccactgtgcctggccgacatgaatttttaatagagcaacttttatttatttgttttgttttgtttgtttgttttttgagacagagtctcactctgtcacccaggctgagtgccatggcacgatcatggctaactgcagcttcgaccccccagtctcaagcgatcctcccacctcagcctccctagtagctggggcttcaggaacacaccaccatacctggctaatttttgtgttttttgtatagattgctctcgccttgttgcctaggctggtcttgaactcctggacccaagtgattctcccatcttggcctcccaaagtgctgggattataggcatgaaccactgtgcccagcctaatagagcaacttttgagcccatctgtggagtccaagttacagatccccattttagatatgttaattgcaaaatcttgatgtgatacaataggaagagaagagattggggtctgtgttatggttgttccccttctaaaatctatttcctagtgacaatcgtatacatatattttatctattgtaagggaatgttaattactcagtatttcattattaggctaaatgtgtttttgtttggcccacaaagaacaataccctcttggatcagaaacactccaaccctttgctaaacattaaaaatagggataattatttaatgacattgggggtaggcatatttagatatgatcatatattcagtgagaaggatttagattattataattaggttttcctgttggtgaagattgctaaatatagaaatgagagcctatgggaattatggggtatcttctttcttggcaactcttctctacctgagcagttaagcctgggtgccaacagggaagaacggaatggttctcttcttgtttctgtggatcagcctgtactgctcactgaaccagagctgttttctgccttagtagagggttaatttttcacggaatgatcaactgggttttgtcctcttgccgacagaatgaggtaatgcattctgaagcaacccagatgtcaccatctgatctaactatatttggtttgcagaaggaactgctgaaatgtaaacaagaagccagaaacttacaggggataaaggtaaaaaagaagacatttaattctttaaataaagtctctgcaatgtaaagtagtctgttggtgagtggtgagagttggaattttctgtggacctttaatagctctgtgctattggtaaagaaagggctttgtgggagggaagtgagacatgtcgaggaatatacctttgttttgctgaggcttatttctagtagttatgattcatgttgctaccatttccatctgttccaccctgattgtctctatatgtaaaagaatcctcttcagtgtgaaagaatgtcctctagggccgggcgcggtggctcacgcctgtaatcccagcactttgggaggccgaggcaggcggatcacgaggtcaggagttcgagaccagcctggccaacatggtgaaaccccatctctactaaaaatacaaaaaattagtcgggcgtggtggcaggcacctgtaatcccagctacttgggaggctgaggcaggagaatcgcttgaacccaggaggcagaggttgcagtgagctgagatcatgccattgcactccagcctaggtgacagggtgagactccgtctcgaaaaaaaaaaaaaaaaaggaatgtcctttaaaaaaattgttatttactttgtttttgaatagttaactaacattcaaatcattttaaaggtataaaaagataaaccatgaagtgtctgcctgccagccctgtcccatcagtcatctagttctctttcctagaggcatcttttttttttttttgaaagggagcctcgctctgttgcccaggctggagtgcaggggcgcaatcttggctcactgcaagctctgcctcctgggttcatgccattctcctgcctcagcctcccaagtagctgggtctacaggtgcccgccaccacgcccggctaattttttgtatttttttagtagagacggggtttcaccgtgttagccaggatggtctccatctcctgaccttgtgatctgcccgccttggcctcccaaagtgctgggattacaggtgtgagccaccgcgcccggcctttttttttttttaatgttgacatggagtctcactctgtcgcccaagctggagtgcagtggcgtgatcttggcttactgcaatctccgcctcctgggttcaagcgattctcctgcctcagcctcccgagtagctgggattacaggtgcgcaccatcacacccagctaatttttgtattttgagtagagactgggttttagcatgttggccaggctggtcttgaactcctgacctcaggtgatccacctgcctcggcctctctaagtgctgggattacaggtgtgagccaccacgcccgacctcctagaggcatcttaacagttatcagcacatttgtgtctayatcgctttcccccacggttttacccaaatggtartatactagaaataaaacttgacaycttgctttttttcacttagtagtatatcttmgagctcattctatgtcagtagtacataaagactttcctaggtcttttttatggctgcatagtattccattgtattccactgtatacatacatatatatgctaaatgatttattatacatgataatttctagtcttttgctaatataaacaatgatctaacagccttgaatatatggtttttttgtgttgttttgttttttctgagatggagtcttgctctgtcgcccagagctggagtgcaatggtatgatctcagctcactgcaacctccacctcccgagttcaagcaattctcctgactcagcctcccgagtagctaggattacaggcgtgtgccaccatgcccagctaatttttgtgtttttggtagagacggggtttcaccatgttggccaggctggtctcgaactcctgacctcgtgatccgcctgccttggcctccaaaagtgctgggattacaggtgtgagccaccatgccgagcctgaatatatgttatttcacccaaatgggagtatatctgtgcaataatacctagaagtagaagaggatgtttttaagtggctgcttttcccctcttccttgcacatccgttcatgggctagactattcactcagcaacattttccaaggtatattccgtaggcttagtacttttgaaacactttaaaaaacaaatgtgttccacggtcagataagtttgagaaatgctctgctgtcctgaagactcactgtgaataataacatgtaaaggatctgaaaaggtctgtcataaagaggttggcctaaaaatgatttagaattaataaccacagaagtgtcttttctcccatgtaacatcatgtggcacattaatgtcccatggagcacattttgggaaatattcctttgaactactgatgccaagggcatcttagacttcctttaccatgtactgtcatggcagagtgtataattaagaatgggctcccacattcttcagagtctgtaccctttctttgcagtctgtaaagagagaaaagtcaggacaaatatattagaatgcagccctagtccattagttccatttgaagtcaccatggttgatggaatatgtcataactgtccttataagcaaggatatccagctcaccttttgttaggcttgataggaaccaagagggttcaagctgagggaaagaaagcctaatgctattaagatcataggaaattgggaagagggatcatgaatcaaagaacagttatgctcagtggaaatataattctaatcctggtccagactaggcattggaagccattggaagcaggatagcagcaaggctctggaagccagcatgggagtgatttcagggattctttaacaacagagtggcgggcatgaatagggcccatctctccaggaaatggggactgggcagagaggtagaaggaaaaacagctaatctagattgagtatttatatgcccaagatataaatgagaaagcccaggtgggagaaagtagagtgcattgtccaaggctgacatcacaaaagtagtaagtggtaggtttataatttgaatctacgtctatctgatcccaaagtccagtctttctctctcgaatacaccatgctgtcaggattgagggtggggacaaatagtaagcagagaaaaaaaatcaggcttcagtaagtttcatagaacagtggataggattttgctctggatgctagtttcctagagggggacagaaaaacccctcctcagcaactcgtggcaagaccctttaccccatttgtcttccagtctgccataacgaatgctggaaacacattaaaggctttagtaatttgtaataataactggctgattgatgaactgagacaacaataattagtatgctttttcccctaggatgccttgcagcagagattgactcagcaggacacatctgttcttcagctcaaacaagagctactgagggcaaatatggacaaagatgagctgcacaaccagaatgtgagttaaatgaatgagccttgacctcagtgagccccattagcagaacaggctactgcacgaagaactattagactggccatcctaatctcttatcttgcttctgggatgcctgccttaagtgtctgcagttatttttattccccattagactcatctctgttcctaggtgaaagcccacatcatactgggcaggaaggtccttgatctcctcttcaactttgaggacactgagatacagaggcaaaattgtggttctacagtctaattacttcactaaaaatgtggagagcagctgtgtatttttaccatcataccctctctgtgctgcatactgtaactgccaacattaactggttactaagtagctggtttccttgagggttagcaggcagtacctgcgtgccatgaattctttcttattcttgcaggtggatctgcagaggaagctagatgagaggaaccggctcttgggrgaatataaagtaagaatgaatatcagtttggaaatgacttccactgacttttcatgaacagcccgttattgttgctcaaaaagcacttaagtattctattttcatcctttttgatttttttttatccttgctttttagaaggaagcatttttctgtgtcccctgatgcactagctctgaagaatagatggcacagctaggagaaggagtacaggactaggggtctagaaacttcagttctagtcttacctttatctctgactagtatgaatggctcatagtggtcctcctacaaatgccagttcccttcttcattactcttgaagaatcctttgcactatgtaagattattatggtgtgtaaagtcttcctggtatatttgaggaaaggactttttttcctgaggctctactttacttgagtggaagttacactgcagagggtgaacttttcagtgtccctggttttgccgctcatcttaaagctctatctttattgcagaaagagctggggcagaaggatcgccttcttcagcagcaccaggccaagttagaagaagcactccggaaactctctgatgtcagttaccaccaggtcagaacatattcagccactgacttccctgcctctttggcccaaagaaatcattttctgatttagtgtctattttgcaggtggatctagagcgagagctagaacacaaagatgtcctcttggctcactgtatgaaaagagaggcagatgaggtaacctagaccccgtgttctccctcccacatttatgaagcaaacggggagattgtgtttctgactcagagctgaaccaaggccacaggcttgtttgttaggaggctctatgatgagctagttaaaagtgcaggttccagaataagaaaatctggtttcacgttccacctttatcactcctacattctgtggccttcagttgcttatcttctgagccttagaaatagggcttatttggaaaatggaaataatagtgattcagtctgtcattatgaagagtatatgagataatccacataaataactaaacacagttctgttggagccacttggcatagagtcaggctcaaaaaatattcaccatggcctggcacagtggctcacatctgtaatcctagcactttgggaggccaaggcaggtggctaacttgaggtcaggagtttgagaccagcctggccaatgtggtgaaacctcgtctctactaaaaattacaaaaattagccaggcgtggtggtggatgcctgtagtcccagctactcaggaggctgaggcaggagaatagcttgaacccggtgggtagaggttgccatgagctgagatcatgccactgcactccagcctgggtgacagatcaaaaaacaaaacaaaacaaaacatacatatatatatatattcatacatacatatatatacactcacacatatatatacatacacacatatacacatatatacatatatatacacacacatatatacatacatatataaccatacatatatatgtatatgtgtgtatatgtatatgtatgtatatatgtatatgtatgtatgtatgtgtatattatgtatgtatatgtatgtatgtatatgtatgtgtatatatatgtatgaatatatatatatgtgtgtgtgtatatatatatattcaccattatttttaaattactgaagcaaagccaggcagtgctggagcagcattctgaggctctccagtgctgtggcagaggctaggttggggcctccaggtggaggttagcatttcctttattcamatccaacaatgcgtactaagtgtcaagtgctgggcatacagcagtgaccaaaaggggaaaaaaaatctatacttaagaaagatacattctaataaagagagccattaaacagacaattatatacttcatcaggaagtgataaatgtaaagaagaaaaataagatagcacatctggtttacaattctccctttaasaagcaacatttcttcatgctgctgtaggcgaccaactacaacagtcacaactctcaaagcaatggttttctccttccaacggcaggaaaaggagctacttcagtcagcaacagaggggtacgtacctggagttttgatggagtcctgccacttctcactgaaaccrgaagagtgccaaagccatggccagtggatgaggccttttatattccagttccctaattcctggatctgtggagtgtgtaaagatgtgaggcacttgctatccawaattaagaattagtgggcaaaccataggcstgcttctgtgggggaaaaatcttctggaaacttctctcctatatccttttaagcccagtggttgggaagtggcaccgtgccatgccagcaacaccttatttttgcccacagaccagcgacctgcagcttgttcgagatgctctccgcagcctgcgcaacagcttcagtggccacgatcctcagcaccacactattgacagcttggagcagggcatttctagcctcatggagcgcctgcatgttatggagacgcagaagaaacaagaaagaaaggtaaccctcttgctgtggtatctstcttaggcaagctcctgagaaagctgggttttaagaattttaattgagatgaaggcagtgtgaagagatacaagaccctgttaaaggttagagttgtttttmtctattgttttttctctcagtggaactgactattcatcatggtatgacaatccagagaagaagttcatggtcatacttgctcccagcaactgtagctgtgtaaagattgtggctcttgaccccacagggtctccctttacgcttcttcccctcccacctacccctgattgagcttggccttggatgagaaaatatacggaaaatgcactggaaaccagaaagcctttcatatatattattattgttaggataaatatattagattttatatgttgtggaagagatggtagaaaagtatgtagtattttaagcacacttttatgatttaaatttcttggttaagttctctcattsatcataactcttgtgatttttgtgtggctccccaggttcgggtcaagtcacccagaactcaagtaggtagtgaataccgggagtcctggccccctaactcaagtaagtacccatttttgctcagtagggactcctagcatattagaccagaaatttagtatttttcacactacattttggggatgtaatttttcttgtagtacttcacttttatactattttgtttctgtagcaatactgcaattgagttagttctaagactatgaagacatatgccatcaccacccccagtgccatttagccacgtgcaggcaggatgctgttgactcagagaggctaaaatatctttgaagaacacagaagctcaaaagatttatgctgaaaaagcaaaatataaaacaacaaaaacacatacatacgtaaatttttctacactcccaaacagcacaaaaaaaatttccacttcttccttgaagcaaggcgtttaatttctttggagatattcttaaaactttgagtgctcaggccgggcgcggtggctcacgcctgtaatcccagcactttgggaggctgaggtgggtggatcacctgaggtcaggagttcaagaccagcctggccaacatggtgaaccccatctctattaaaaatacaaaaattagccaggtgtggtggcacacgcctgtaatcccagctactcatgaggctgaggcaagagaatcacttgaacccaggaggtggaggttgtggtgaacccagattgcgccattgcactccagcgtgggtgacagagtaagactccatctcaaaataaaataaaaactttgagtgcttaaggcgtttagtttaagtcctgcaaaatgtttgcaccatctaatggccatggctaggaagtgtattttaacctgctccgtgcccactctatattttttcccatttgttcaaacttgttggaaagctaccctgcctggtaatttctattttagtttgtattttgccttttgtggcttagtaatgttcatgttttcttatcttttaatcaggcctaatcaaaaggtatctaataatttataaaaaccaaatagtaaaaagctgactagaaacagttttgtatgttacatataaatttttaaaagcacattaagaaacctaaagtaaaaatctgaaaatacttgcaaaaatatgaaatgtaaaatttttttgtggagtaaataaaatagcatttcaaacctctgatcccagatatcttttcctcttggatgaggttatctatgctgggaatgaaacaaattttttttttttagcggcgggggatggagtttcactcttgttgcccaggctggagtgcagtggcgcaatctctgttcactgcaacctctgtctcccgggttcaagcaattcttctgcctcaggctccccagtagctgggattacagacgtgcactaccacgcctggctaatttttgtatttttagtagagatggggtttcgccatgttggcaatgaattattttattaccagaattagtttcagtttccttttctagcagtgtttcaaaatagtcatttctattgtttgtagaggattattattattattttattcattgatttcttcagattagtgtaaactgccaatataaataggtgtaaatacttagaaatttcttttttaagtacaataaattcccccccaaaaaattactttgtgcatatatagtatttatttaaagtactacaaataaatctatagctgcttgaaaactaagatgttaatctaatgcttccagtgataactgtattcacaaataagctgaaatatctcttatctgaaaatacaaaaatctgtgtaacttctgccagctctctagctactgacttatttctcttactcctgtacatcaaaattcttaaaagaagagtctatatttgctctcttttcttcctcacttcctgttcactactcagcccactacagtcttttatctgttactttgcttagtgttcttcttgttgggtctctgttgactttcttgtcgcctaatcaagtggttactttttaaaccttatctttcattgtcttttcaaaagcatttactattctctaaaagtctcctggaaactttcttcttcttcagtttcagtgtcattcagatattcatttaacatatttactaagcatccattattcaccatcaatgttagatgctggagatatagagatgaagaggttagacttggcacttgcaggtagtgaagtaaatacctgagttttccttctagtccctcttgaatctccttttattctgctctaattcttgaatgttgatgtgtcctgggattccatccaattgaagcctaaacctaagccttttcatattgtctttggcgtcaggtgacctcttccactcccctggctttaactacacttgtgtgccgataatttttatgttttatctcaaatctcagttattttctgagcttcagtactattttttatttttatttttatttactttgagacagagtctcgctctgttgcccaggctggagtgcaatggcgtgatctcgactcactgcaagctctgcctccagggttcaagtgattctcctgcctcagcctcctgattacaggcgcccgccaccacgcccggctaattttttgtattttagtagagacagggtttcactgtgttgcccaggctggtcttgaactcttgagctcaggcaatccacccaccccggcctcccaaagtgctgggattacaggcgtgagccaccgcscctggcctagtactatatttttaaatgtaaactagatatctctctctgtaggtcccaaggcactgtaaagtcatgtccaaaactggacacaaaacaatagagagggaaaaatacagaatatacaatcaaacagatctagggtacaatttgggctgcaccattcagcacagtgtgtgaccatgggcaagaatgttaatgtcactgaatcttagtttccttttttatggaaccaaagtaatattgaagaatttgagcattaaatgaaatacatagaaatcatctagtgtactgtggagcatatgagagatgcaaggcaaatgtttctcattcccctctggctgtgccctttctctttcaatataattaaatttcctgaaagagtattgtactttctgaacccacttcctttcttgccatttactcttaagggaaaacaataattatttcagatttaaaataaaacagtagattagtgaaatcaaattgagagttcagataaaaacccatataaccagagaatgttcttttcaaccaatggtgcttgggacaactggatatttccatgaaatgggaccccctacttcacaccatatacaaaagttaactcagactatagatcagtgacttaaatgtaagagcttaaagctataaagttcttagaagaaaacatagagaaaaatattcatgaccttggatttggcagtggattcttaggacatcaaaagcatgagcaacaaaagaaaaaagataaaattgggctgggcgcagtgccttatgcctgtaatcccagcactttgggaggctgatgtgggtgtatcacctgaggttgggagtttgagaccagcctggccaacatggtgaaaccctgtctctgctaaaaatacaaaaattaggtgggcgtgatagtgggcacctgtaatcccagctacttgggaggctgaggcaggagaatcacttgaaaccgggaggcagaagttgcggtgagctgctccagcctgggtgatagagtgaaactccatctcaaaaaaataaataggccaggttcacgcctgtaatcccagcactttgggaggctgaagcaggcggatcacctgaggtcaggagttcgaaaccagcctggccaacctggcgaaaccctgtctctactaaaaatacaaaaattagctgggggtggtggcaggagtctgtaatcccagctactcgggggctgaggcacaagaatcacttgaacctgggaggtggaggttgcagctagctgagattgcgccactgcactccagcctaggctacagagggagacttcgtctcaaaaataataataataaaataaaataaataaatagataaaagataaaattggacttcatcaaaattaaaaacttttgtgtataaaagaacactatcgagaaagtaagtagacaacctacagaataggagaaaatatttgcaaatcatattgtctgataagggtctaggatccagaatatataaagaactcttacaactcaacagcaaaaggacaaacaacccaagagaaaataggcaaaatacttgaatagacatttctccaaagaagataaagaaatggccagccaggtgcggtggctcacacttgtaatcttagtactttgggaggctgaggtgggcagatcatgaggtcaggagatcgagaccaccctggccaatgtggtgaaaccccgtctctactagaaatacaaaaattagctgggcgtggtggtacgcacctgtagtcccagctactcggggggctgaggcagaagaatcacttgaatctgggaggcggaggttgcagtgagctgagattgtgccattgcactccagcctggcaccagggcaagattctgtctaaaaaaaaaaaaaagggccaataaacccaagaaaagatgcccaaaatcattagtcattaggggaatgcaaatcaaaaccacagtgagataccaytttacacctactaaatggtgtcaaaaatggagaataataagtattggtgagaatgtggagaagttggaactgtcatacattgctctggggatgtgaatggtgcagctgctgtggaagacagtttggcacttcctcaaaaagttaaacatggagttaccatatgacccaaaagaattgaaaacaggagttcaaaaaaacttgtacatctatgttcctagcagccatattcacaatattcgaaaggtagaaacaccccagatgtccatcaactgatgaatggatagacaaattctggtatatgcatacagtggaatattattcacctataaagaggaatgaagcactgatccatgctacaacgtggatgaacttggaaaacattatgctaagtggaagatgccagacacaaaagggcacatattgtgtaagtccatttatataaaatgtccagaataggcaaatccatagagaccaaaagtagagtgggttagccagatgccagggtcaggagcgagggaggaatagggaataaccactcagtgcatacaggttttcttttgggatgatgacagtgttctggaactggataatggtggttgtttgcacatcattttaaatgtactaaatgccattgaattgcacaccttaaaatggttaaaatggtgaattttactacaatttttaaaaagtgagattttgtaaaaaatagcagttctgccttctgcctaggatgtagaaagccagaaagagccttgcttctacccaaaaaacaagaaaaagttggataatctaaaaaatcgtaactttcttgaacccatcagagagatgaaatcatagtgcagtcaactagcctgaaaaagaaacaggcacctacaaggagagataggatacaagtactggctcacttgtggtagaccctgggaggaagatggggccactatacaacagataagaattcagctgagatttttttttttttttttttgagacggagtcttggttttgttgcccaggctggagtgcaatgacacgatctcagctcactgcagcctctgcctcccaggttcaagcaattctcctgcctcagcctcccaagtagctgggattatacatgcccaccaccacacctggctaatttttgtatttttggtagagacgggttttcaccatgttggccagactggtctcgaactcctgaccttaggtgatctgcccgcctcggcctcccaaagtgttgggattacaggggtgagccactgcgcctggcttgagatttttaattatttgctaaaggctgagaagacagtataggaaccttgggagccacagacacgaggaatttgcacccacttgcagacactttttcatgactaccaggtgcttatgaaaatgttggttgtgacagtgagatatcatcttaccccagttaaaatgccttttatcagaaagacatttgacacagcaggcatgtgaaaaaaaaaaaarggatgctagcaaggatgcagagaaaggggaatgcttattatgcaccattggtgggcatgtaaatgagtatagttaaatagaaarcaatgtggacattcctcaaaaaaatacaaatagagctaccatgtgatccagcaattccactgctgggtatgtatccaaaagaaaggaaatcagtatatcaaaraggtatctgcattctcatgtttattgcagtactatttccaatagccaaggctggtcacagtggctcgtgcctgtaatcccagcactttgggaggctgaggcaggaagatcgcttgagctcaggagttcgagatcagcctgggcaacagagcaagaccttgtctctactaaaaataaaattaggtggacatggtggcacacacttgtagtcccagctattcagggggctgcggtggaaggacagctttagcctgggagataaaggctgtggtgagctgtgattgtgccactgcattccagagtgagatcctgtctcaaaaacaaaacaaaacaccaaataaacaaaaacacaatagccaagatatggaattcatcgaagtgtccatcaacagatgagtgggtatagaaaaaaatatatatatgcaaaggaatattattattcagctataacgaagcataaaatcctttcttttgcagcaacatggatggagctggatattattatgtgaagtgaaataagccaggcacagaaagacaagtaccacatgttctctaccagtatgtgggagctaaaaaaaatgttatctcatggagatagagagttgattggtggtaaccagaggctgggaaggcttggggagggtgacagagaggttggttaatggatacaaaaatacagttagatagaaggagtaagatctagtgtttgataagaagtagggtgactatagtagaatttattgtatartttgaaatagctaggctgggcgtggtggctcatgcctgtaatcccagcactttgggaggctgaggtgggcaaaaccttgtctctactaaaaatacaaaaattagcggrcgggtggcaagtacctgtaatcccagccacttgaggcacaagaatagcttgaacccaggaggcagaggttgcagtgagctgagatcgcaccactgcactccagcctgggagacagagtgagactgtctcaaaaaggaaaaacaaaaaaataaaatagctagaagaattgggatgttttaacgtaaagaaaagataaatgtaggacaggcgcagtggctcacgtctgaaatcccagcatgttgggaggccaaggcaggtggatcacctgaggttaggggttcaagaccagcctgaccaacatggagaaaccctgtctctactaaaagtacaaaaattagccaggcgtggtggtgcatgcctgtaatccagctactygggaggctgaggcaggagaatcgcttgaacccgggaggtggaggttgcggtgagccgagatcatgccattgcactccagcctgggaaacaagagtgaagctctgtctcaaaaaaaaaggagaaaagataaatgtttgaggtgatggatatcccagttactctgacttgatcattacacattgtatgcacgtatcaaaataacacgagccaggcatggtgggcttatgcctgtaatctcaactacttgggaggctgatgtgggagtattacttgtgtccagggatttgagaccagcctgggcaacataaaaaaaccccatcttaaaaaaaaaaaaattatatatatatatatatatatgtatgtatatatatgtgtatatatatgtgtgtgtatatgtgtatatatatgtgtgtgtrtatgtgtatatatatatgtgtgtgtatatatatatatcacatgtaacctaaaaatacgtagaactgatatgtatcaatttaaaaattaataaaatatgcttttggttaaaaaaaggttggctgtggggatagagtctaaagaaaccctccctccctccttcatggagcaagggagcagctgccactgcaggaaaggcatgaagccacatccagaccattctcgcttacggagcaaagccttaagccactgtggaagcgaagtaaatcctgttgacccctccgtccctgctctaggcaaaggtgaagacccattacagctagtggggatggaaaggaaaaggaacactaccttggcagaggggcaggaaactatcttggactcagattgtaagaggtcgcctaccactgggggagggacaggatcactgagaaaaccccacttaaaaactggggctgcgtcaggacaacagagaagcactgctcatcccccaccaccaggggagcaagcactgttcaattaggagcagtggactgcttctgaggcaggaaacagcatacagagactgactgaggcacaggcatatgaggaaagcctacagctgagggaggggaaggaacattgaggaacgaccctccaacaagcagctgtccctaaacctaactctagaagacttggaaaatggtggtgcactgaaggtaaccttaacaaaaatctcaatcccagctcagcttctgaccaaattaactcaactgtccctaccgatggcctggaagaacaaacagtgtgcccatttctaaacagatacttttacctctgtctctcctgtcttaacatatgtctggcattcaataagaaattatgaggcatccacaagagcaagagaaaaacgaagccactgtgaagagcgaaagcagtcaacagaatcaaactcatatatgayaaggatgtcgaaaccatcagacaaggaatttaaagtaactgattcatatgttaaaggctgtagtgaaaatgttgataacatgcacatacaggtgaggaagactcaactactgtttataggaaacccactataaatataatgatataaatggatttaaaagtaaaaagatggataaagatataccatggaaacactaatcaaaaggaagtgtggttatattagtatctgataaagtatacttgagaacaaggaatcattccaggtataaagatgatacataataataaaaaggtcaattcaccgagaagacataataatcctaaatgtgtgtatacccaataacagctttgaaatacctgaagcagcccaggcactgtggctcatgcctgtaatcccagcattttgggaggctgagacaggaggatcacttgtgcccagaagtttgagacaagcctgggcaacatggtgagaccctgactcaacaaaaaaataaaaaaaattagccaggtgtggtggcatatgcctgaagtcctagctacttgggaggctgaggcaggaggatcacttgagtctgggagttggaggctgcagtgagctgtgatcacaccactgcactccagtctgggcagctgggtgacagacagagtgagacactgtcctctcccgtccccccctcaaaaaatacatgaaacaaaaactgaaaggagaaatagataaatctagttacaattggaggctttaatatttcttctttgcagtaatcagtagaagtagygtacagaacatcaataagaatatagaaaacctgggccgggtgtggtggcttatgactataatcccagcactttgggaggccaaggcrggcagattacttgaggtcaggaggacagtgggtgtagcccacggagggtgaaccaaagcagggcagggcgtcgcctcacccaggaagcgcaaggcgttgggagatttccctttcctagacaaaggaagccctgacagactgtacctggaaaaaacggaacactcctcccccaaatactgcgygttttcaacagtcttagcaaatgcagaccaggagctactatccagtgcctggctcggtggttcccacacccacagagccttgctcacagctagtgcagcagtcagagattgaactgcgaggcaacagcctggcagggggaggggcacctgccattgctgaggcttgagtaggtaaacaaagctgcctggaagctcaaactgggcggagcccaccacagctcagctaggcctgctgattctgtagcccccacctctgggagcagggcatagctgaacaaaaggcagcagaaacttctgcatacttaaacgtccctgtctgacagctctgaagagagcagtggttctaccagcatggcgtttgagctctgagaacggacagactgcctcctcaagtgggtccctgacccctgtgtagcctaactgggagacacctcccagtaggggatgacttacatctcatacaggcaagtgcccctctgggacaaagcttacagaggaaggatcaggcaatatttgctgttctgcaatatttgctgttctgcagcctccactggtgatacccaggcaaacagggtctggagtggacctccagcaaactccaacagacctgcagctgagggacctgactgttagaaggaaaactaacgaacagaaaggaatagcatcagcatccacaaaaaggacatccacaccaaaacctcatctctaggtcaccaacatcaaagaccaaaggtagataaaaccacaaagatggggagaaaccagagcagaaaagctgaagattctaaaaacgagagtacctcttctcctccaaaggatcgcagctcctcaccagcaagggaacaaagttggacggagaatgactttgatgagttgacagaagtcggcttcagaaggtcggtaataaacttctccgagctagaggaggatgtttgaacccattgcaaggaagctagaaaccttgaaaaaagattagatgaatggctaactagaataaacagtgtagagaagaccttaaatgacctgrtggagctgaaaaccatggcatgagaactttgtgatgcacgcacaagcttcaatagccaatgcgatcaagtggaagaaagggtatcagtgattgaagatcaaattaatgaaataaagtgagaagagaagtttagagagaaaagagtaaaaagcaacgaacaaagcctccaagaaacatgggactatgtgaaaagaccaaatctacgtttgattggtgtacctgaaagtgacagggagaatggaaccaagttggaaaacactgttcaggatattatccaggaatacttacccaatctagcaaggcaggccaacatccaaatctaggaaatacagagaacaccacaaagatactcctcaagaagagcaaccccaagacacataattatcagattcaccaaggtggaaatgaaggaaaaaatgttaagggcagccagagagaaaggtcaggttacccacaaagggaaacccatcagactaacagcggatctctcgacagaaactctacaagccagaagagagtgggggccaatattcaacattcttaaagaaaagagttttcaacgcaaaatttcatatccagccaaactaagcttcataagtgaaggagaaataaaatccttaacagacaagcaaatgctaagagattctgtcaccaccaggactgccttacaagagctcctgaaggaagcactaaacatggaaaggaacaaccggtaccagccactgcaaaaacatgccaaattgtcaagaccatcgatgctatgatgaaacttgcatcaattaatgggcaaaataagcagctaacatcataatgacaggatcaaattcacacataacaatattaaccttaaatgtaaatgggctaaatgccccaatgaaaagtgacagactggcaaattggatagagtcaaacccatcggtgtgctgtactcaggagacccatatcacgtgcagagacacacataggctcaaataaagggatggagcaagatctaccaagcaaatgcaaagcaaaaaaaaaaaaaaaagaaaagcagggattgaaatcctactctctgataaaacagactttaaaccaacaaagatcaaaagagacaaggccattacataatggtaaagggatcaattcaacaagaagagctaactatcctaaatttatatgcacccaatacaggagcaccaagattcataaaccaagtccttagagacctacaaagagacttagactcccacacaataataatgggagacttttacaccccactgtcaatattagatcaacgagacagattaacaaggatatccatgacttgaactcagctctgcaccaagcagacctaatagacatctacagaactctccaccccaaatcaacagaatatacattcttcttagcaccacatcacacttattctaaaattgatcatacagttggaagtaaagcactcttcagcaaatgtaaaaaacagaaatcacaacaaactgtctctcagaccacagcacaatcaaattagaactcaggattaagaaactcactcaaaactgcacaactacatggaaactgaacaacctgctcctgaatgactactggctaaataacgaaatgaagggagaaataaagatgttctttgaaaccaatgagaacaaagacacaacgtaccagaatacctgagacacatttaaagcagtgtgtagagggaaatttttagcactaaatgcccacaggagaaagcaggaaagatctaaaatcgacaccttaacatcacaattaaaagaaatcgagaatcaagagcaaagaaattcaaacgctagcaaaaggcaagaaataactaagattggagcagaactgaaggagatagagacacaagaaacctttaaaaaaatcaatgaatccaggagctggttttttgaagggatcaacaaaactgatagaccgctagcaagactaataaagaagaaaagagagaggcatcaaattgacacaataaaaaatgataaaggggatattaccaccgatcccacagaaatacaaactaccatcagagaatactataaacacctctacgcaaataaactagaaaatctagaagaaatggataaattcctggacacatacaccctcccaagactaaaccaggaagaagttgaatctctgaatagaccaataacaggttctgaaattgaggcaataattaatagcctaccaaccaaaaaaagtccaggaccagatggatttacagccaaattctaccacaggtagaaaagaggagctagtaccattccttctgaaactattccaatcaacagaaaaggagggactcctccctaactcattttatgaggccaacatcatcctgataccaaaacctggcagagacataacaaaaaaaagagaattttagaccaatatccctgatgaacatcaatgcgaaaatcttcaataaaatactggcaaaccgaatccagcagcacatcaaaaagcttatccaccacaatcaagtcagcttcatccctgggatgcaaggctggttcaacatactcaaatcaataaatgtaatccatcacataaacagaaccaaagagaaaaaccacatgattatctcaatagatgcagaaaaggccttcaacaaaattcaacagcccttcatgctaaaatctctcaataaactgggtattgatggaacgtatctcaaaataataagagctatttacaacaaacccacagccaatatcatattgaatgggcaaaaactggaagcatttcttttgaaaactggcacaagacagggatgccctctctcaccactcctattcaacatagtgttggaagttctggccagggcaatcaggcaagagaaagaaataaagggtattcaatttggaaaagaggaagtaaaattgtctatgtttgcagatgacatgactatatatttagaaaaccccatcatctcagcccaaaatctccttaagctgataagcaacttcagcaaagtctcaggatacaaagtcaatgtgcaaaaatcacaagcattcctgtacaccaataacagacaaacagccaaatcatgagtgaactcccaatcacaattgctacgaagagaataaaatacctaggaatccaacttacaagggatgtgaaggacctcttcatggagaactacaaaccactgcccagggaaataaaagaggacacaaacaaatggaagaacattccatgctcatggataggaagaataaatatcatgaaaatggccacactgcccaaggtaatttatagattcaatgccattcccatcaagctaccaatgtcttcttcacagaattggaaaaaactactttaaagttcatatggaaccaaaaaagagcccacattgccaaggcaatcctaagcaaaggaacaaaactggaggcatcatgctacctgacttcaaactatcctacaaggctacagtaaccaaaacagcatggtactggtactaaaacagatatatagaccaatgaatcagaacagaggcctcagaaataacaccacacatttacaaccatctgatctttgacaaacctgacaaaaacaagaaatggggaaaggattccctgtttaataaatggtgctgggaaaactggctagccatatgtagaaagttgaaactggatcccttccttacaccttatacaaaaattaattcaagatggattaaagacttaaacgttagacctaaaaccataaaaaccctagaagaaaaccgaggcaataccattcaggacataggcatggacaaggacttcatgactaaaacaccaaaagcaatgacaacaaaagccaaaatagacaagtgggatctaattaaactaaagagcttctgcacagcaaaagaaactatcatcagagtgaacaggcaacctacagaatgggagaaaatttttgcaatctgcccatctgacaaagggctaatatctagagtctacaaagaacttaaacaaatttacaagaaaaaaatcaaacaaccccatcaaaaagtgggcaaaggatatgaatagacacttctcaaaagaagacatttctgcagccaacagacacatgaaaaaatgctcatcatcactggtcatcagagaaatgcaaatcagaaccacaatgagataccatctcacaccagttagagtggcgatcattaaaaagtcaggaaaccacagatgctggagaggatgtggagaaataggaatgcttttacactgttgatggaagtgtaaattagttcaaccattgtggaagacagtgtggcgattcctcaaggatctagactagaaataccatttgacccagagatcctattactggatatatacccaaaggattataaatcatgctactataaagacacatgcacacgcatgtttattgcagcactattcacaattgcaaagacttggaaccaacccaaatgtccatcaatgatagactggattaagaaaatgtggcacatatacaccatggaatactatgcagccataaaaaaggatgagttcatgtcctttgcagggacatggatgaaactggagttcatcattctcagcaaactatcacaaggaccaaaaaccaaacaccgcatgtcctcactcataggtgggaattgaacaatgagaacacatggacacagggcggggaacatcacacactggagcctgtcgtggagggggggacggggggagggatagcattaggagaaatacctaatgtaaatgacaagttgatgggtgcagcaaacccacatggcacatgtatacctatgtaacaaacctgcacgttgtgcacatgcaccctagaacttaaagtatagtaaaaaaggaaaaaggaaaagaaaaaccctcatgaaaatcttaggtataaacttcataaaatatgtgcaatgactatactgacaagtataaaataaggatgaaataaagatttaaataaacggagagatatactgtttatggattggagtactcaacattgttaagatggcctattcttccacaaatgatctatagcttcaatgcagttccagtgaaaatcctaccaggcttttgtagatataaacaagccaattctaaaatttataggaaagaataaggggactagaattaactgccctcccaacccaaatggtgaaaaagatgaacagtgcagttggtggaccatactgtctgatatcaaaattaactgtaaagttagggtaatcaagacagtgtagtattggtgaattggtagatacatagatgagtggaacagcatagagttaaaaatagacacattttaccagttgattttctacaatagtgcaaagacaattgaatgataaagggataggcttttcaaaaacggtgctagaaaagttaaagatctatttttttaagtgagtttgacctatacttcataccatatgcaaaaatcaactccaaatggataagcctaaacttataagctataactrttaatcacctgttttgtggtacttttcaaaatcatgtattaaatttgtagatatacacaaggatatgtttctgagccacttatcctgcatgagtttttttgtacgtgttttttatagtaatgccataatactgtaataactatcattttgtcatacggctttatgttgggtgagacaagttctccctcattactcttattttgcttttttacttgaaaagtctatgcaatccaactcattcttcattagtcatctgaatcgacttttcactagtatcatcaatgatatttttaccaaagcagtctttgcctattagacccctgtgtagcatttgacatcatgattactctctctttgacattctccccaaatgtgtacataacatttgtattagtcagcttgggctgccattgcaaaataccttcaactctcttaaacgacgtaaattaattttctcacagttctggaggctagaagtacaagatcaggttgccagcatggccaggttttggtgagggctccttgcctggcttgtagaaggcacgttgtctctgtgtcctcacatgggggagagaaagctctggtatctcttataaggactagttctgttggatcagggctccacccgtatgacctcatttaatcttaattacctccttaaaggccctatctccaaaacagtcaaatagcagataagggcttcaacatatgaagttgacgggtcggggggtgggggtggggtggggggggggaacaaattcagtccatagcaatattattttcatatttattttattgtatggtaactgttttgctatttcactccactagacttttgagctccttaagggtggggattatatctaatttatttgtgtatctctaatacttgatacataataaggcaccctataaacatttaaaatgaataatgagatgacgtaattcatcttgtgttcccctgtcttaggtaatggtattaccatgtatctgtcttcccaggttgtaaatctcagtcattgtttacttttcccttttatataccctatgttcaactatatccctagtactaagactttgactttctaaaggtctttcaaattcatcccttctctggctccagggctacatctttcctatcatcatgtgtcagattgtttttattgcctcttaacaggatgtcttagtcagttgagtgttgccataaaggaatacctgaggctaggtaacttaggaggaaaagaggtttgtttggctcacaattcggctggctggaaagttgggcatctggtgaaagcctcaatcggctttcactcacggcagaaggcaaatgggagttggcatgtgctgagattacatggagagaggaagcaagagagtggagggaggtgccaggctctttttaacaagcagttttgtgggaactaatgggtgagtactcactcctcctccccaaggagggcattaatctagtcttgaggaatctgcctccatgacccaaacacttcccattaggccccacctccaacattggggatcaactttcaacatgaggtgttgggggacaaacacccaaactactgcacaggatttctggcttccagtttgtcccatccaatccatactttgctgcgagatcaacttttctaaaatgccagtctaatcatatcactaccttttagtaactttccatagcttaagactaacatcttgaactcttaccctgtcagagtcttttgtgatctggctgctgcctacttaattacctcacaacttcccaatgtattcattatgctccagccttactaattcacctacagttttgtaaatatatgatcccatttcatgcttctgcacctgtccttccctcttcttggaatactcttttcaactttagtatctcgtgatttttaaaaggtgcttttaaaaaggactctccaaccatgggcccttcctgacctgttccaggtggaattaacctcgccatcttcagtcttccaatacagcttgtagaaatctgattttagtgtattgtaattatttgtaattgtatccatcatccatactaaatgataaactcttgggaggttggagaccacatatagtttatttttatattctcaaatcgaacacacagtaggtaataaatgtttgttgaatgaatgaataaattaaatatatagctttaatgttaaaagtgagtattttatttattcaacaaccactgtgtgctgggcactgtgctagatgctggggcaaaggagaattatggcatgtaggttacaataattggcattcttttttttttttgggagacagagtttcactttgtcaccaaggctggagtgcagtggctcgatctcggctcactgcaacctctgcctcccaggttcaagcgattctcctgcctcagcctcccaggtagctgggactacaggcacatgccaccacgcctggctaattttctgtattttagtagagacggggtttcaccatgttgcccaggctggtctcaaactcctgagctcaggcaatccgcccacctcggcctcccaaagtgctaggattacaggcatgagccaccgcgcctggccaattagcattctttgaagaaaaactctgaaaacagactgaatgccatttgtgttcaaagaggggacgttcctttgtctttttcccctctattaattcatccttcatattccttattttaaaccccctcccagaactactgttctgtggctgccaatatgaatgcctagaataagttaagaggaagatcagtacaggtggaatagcaggagatattttagtaacagtttaattattaatttttgataaaaggttctgattggtcatttctcctacgaaagtcataattacaaggacttatacttttccaaaagtacctttttaaaaggtagagacagtccaggtgcagtggcccatgcctgtaatcccaacagtttgagaggccaaggtgggtggattacttgaggcagggagttcaagaccagcctggccaacatggcaaaaccttgtctctactaaaaatacaaaaattagctgggcgtggtggcacacacctgttatcccagctactcgggaggctgaggcacgagaatgacttaaacctgggaggtggaggttgcagtgagctgagattgcaccactgcactccagcctgggcgacagagcgagaccctgtctttttttttttttttttttttttgcggcagggacagagtctcactctgtcacccaggctggagtgcagtgtcacgatctcggctcactgcaacctccacctcccgggttcaagcagttctttgcctcagcctcccaagtaactgggattacaggcatgtgccaccacgcccagctaatttttgtatttttagtagagatggggtttcaccatgttggccaggctgttcttgaactcctgacctcgtgatccacccccctcggcctcccaaagtgttgggaaatacaggcgtgagccaccgcgcccggcgagaccctgtcttaaaaaaaaaaaaaagtttatcaacaaacctgtgttaaagaccatggcatcaacactatagatcttaagttgctaaggttctgtaccttttagactgggagcataagccccttgggatctgagtttctaaggttgctttgcttctgtggttcttgttcctatcggtttttctttctatgagtcacatgagtattcyctactacggacctccaaaacctaaatattggcagagtctacagcttctgctgtgtgtctaccctgcctggctgaaatcttcccatgcttctctgtccttttttgatctttaacaatgatacctgtcatatcagttgctgttcccctactatgagtgaggagtgatgagtcctcgcgatcgtgtccatgtctgaagcaagtcttgtcctcgtggtcctaggcaaccatagcatatggacattgtgtttggcaagggtgtgagagctgtgggctgtgacctcaggcagctttgttctcccgggacactttgaataactgcagatggctggtttagagcaaatgaatgttctaaccacagtctctttctgattgtagagttgcctcactcacagagctctccaactgtcagcagcacctgtactaaagtgctctatttcactgaccggtcacttacgcccttcatggtcaatataccaaagaggtgagattctgggatcattgtatttcactgtaaagaaggaaaggaaggcagaacctcattagttactgcccacatgagcagctgaaaggtgtttgagaagcagtatagtgagatctcactatagtgagataagccagagagacagattctagtttcagctttgccactattcagtggtattataaaggacaagtcatgatctactactagatacaggtacaataatagtacttccaatcctgataactatgcaaatatggctctgcatttgggaaaatcttttttttttyttttaagtgttcaaaatagctcctgctgatacaatggattgcagcctggcactcactccaggactatgactaattgatctttgttactattcaatgactgcagctaatccctattgagaaattatgtcaaaaaccttccagaaagttaatgtgcttccttttaagggaaatggttttgaaatagaaatatttaaactctgcaaccaactattgagagaggttataggatttttcttacttagtctgcttatttagtctgggttagaagccagcttcctaaagatagagggataaagatcatgatacttgatttgattctaccatcctagagaattgggatattgtagcaaagaagaaaatcaagagaactttgatatatttatggttattcaacaaattttatttcagggactttatatcttatttccagagaaaagtgatttggcttctgaagcaataagtcaattttaaattctcacatcaccccatatttaatactgttttcattccctagtgatgactggttctccagcctctgctgttttagtcatctgggttatcggggcagtgacctaacaaggggctatttctgcttattgactttggcagggggctgtgtttaaagttaacatcttatctttccagctattgatcaacagtctattttagtgctctctccttgtgttgcaggttggaggaggtgacgttaaaggattttaaagcagctattgatcgggaaggaaatcaccggtatcacttcaaagcactggatcctgagtttggcactgtcaaagaggaggtaaagaatctgtggggagtctgtatggtattattggtcctttctgaaccctgaagcctcctgttcaagcactagtgtccagaagtacatgagttccctgactaggtcagaagaatttgccagagcctcagaccatggtctgattactctagacaagtggtcatagaatagtccaagatgctgataggttctttagttgtaggacttcatcatttgactgagaacttggatataatttttattttaaattattttgttagggaaaataaagaacctaagacaataaataattttccatctgcagccaaatcttagaaaacttcttgcttcctatgtagagcaaaataaacacgcatggatatatggaactgtgtatttctcataatgaaatcaaggaacttctagggagttatgtatgcttatgcccaactccttgagtaagtattttcttagcctacgygtctctttataatccatttgtcaaagatagacttttgggggaatacagttctgggttatatagtattacaagtggattcactgcagttacagaatgaaaaaagttattatagagaaagtaaaattttattttgtaaacatttcctcagtgaaatgttttagtaaccctgttttattagtggcttaggaaatgagttgaatgaattaatgaaaataactgcatctgagaaatgtgttaaaatgagtcttttttccccaccctttctttacattgcctggtaactaaattttccactttctcatttttaaaatacttaacactacatctttcctctaagaagcccaaagtactttgtgattggtaatttattaattcttacaaatctctatgagcaaagtagtatcaggcattttttaaaaccatttcatagatgtggatctaagaaaaaaataaaatatcagttgcagttctagggacaagaccaaaaggacatagactcttaactcaaggctttcttctacatggttgaggtcttatttttattagcagcaattgtttagtgaatsagattccctgttttttcaytgtggctttttgtttttttctctagattttccatgatgatgatgccatccctggatgggaagggaaaattgtagcttgggtggaagaagaccatggagagaattaatgccaagtatcagattgagggcttatggaacctggtcactccctggctgcttcactcaggaaagggaactaaaaccagaatacactaagaagtttctagtttgtgtgccaaaacagaagcttctccaagcatgatggccacaggtcagtcctctttctgtgcctggcatatctggtacttaaaattctgtccaaatgtagaccatgggttcatctggagttccttgtccgtgggaacacagtgttctattctactctgaggacaacaaaccgaaggccttaaacgatggggatggatgatcccgcctctgtaggggcatggctgctattatctggaaattaggaattggatgcatcattcctgtgtgttacagtattattttaattggcctcaatggttgcagcaatcagagtcccagcgtttgtactcacagacaaggcaaaggtaccagcttttctgtttctttgaacctactgcaaaccaagaataactcatgaggtggtaccaaagatgaaagcccagacttcagtaatcttttgaaccagacgtggatggtgctgaattgttgcttggatggaaaaagggctgcccatgttgtgctacactatgctaaaactgtaatttagtaagaccttgggctgcctcttctgtcttaactggttctgcagcttgtccttttgcccacatagggcctatttcatgtactgttagttttctctggggactctttaactttagagccatttctttttcttcaaactgatgaacttttgtttgaaaggcataaggagtgaaaagctccttgaaaatccaggcgggtatggaaaggtgctgctacccatatctttttgactttctttgtttcatgactttaactcatggcatctcctttgtagtaaaaggagacagaccattaatttcagcatttctttgtgatttataagtactgagcatgaagtacttgtctgcccctcatttcaaggccagagttattttctatttatgtattagtctaggctgatcttttagggcacaatagaaaccatggggcgtggagcatgagttgtgaatggcagggatcattctgggtaaaaaaaacctagaatcatttctgatgtgcaacattgtcaagtgaagaagctaacagttcaactaccgagattatttgataacctgggttttctcattcatccatcaagcaccatcaaccagtcagccattattatttatatatgtattaccaaaagcagtctatctgcctgtgacctccaatgtacactgccaaacacaagagtaggacacatctgttctgggttcttgacctatctgtctccaattcatctccccttttcagccatttcaacaaactactctttggagctctgagatgacatcttgttgttttatatagatgtatcttttaaaaatagttcacgtttggagaattcttttgtactcatttgctttttgtctgagaaccatgtctatttttataactggagtgtgagttctgtatcttctcacattctgtatactgtatccattttctagagaacccagtagcttttatacagtctcttcttaccaccccttgtggtttcagaacaagctttattttattacgagtatattaatgacaactaattcctgttccaattctacctgttttagttgtgaaggtagttttgtgtaatccagttgattgctcctctggcagagagaaggagctcaaaagatacttgatgtctttcatgtaagtttacctggtcttttcctattgaagaatttttcatcagaaacgactgggaaagtttgggaaagtcagcaaaagaaagaatgcatttcraaagcaaacagaagaaaaaagtatattctcacagtttttccccaggaagtctggagaaaaagtcctcatgtcaccaatttctctgttgcatgaattttagtgttttgctataagacagcatgagggctatcaggccaaaattcattattgtatttccaatacagtttgtcttgaatgtctgtctcttaaaccagtttttacttgtcagttttctctcagcaaacagtcttactattatgtggaatttaacttttcagagaaaatttccaaagtcctctaccttatttggcttttatctgtgtcttttggaaaaggagctgcatggcctcagtgcctccataaaaagcttaagttgagttcatgggagaacattaagatcgttttttttcccttttagctcggtaatctcatgtaccacaggtaatgaccaagcatctctgctagaggatgtamctctcataactcctgtgtaaaatgaggatcctgttggtgatcctcattccagtttccaaagcgagaggagccttctgagcagaagtatgcaagactgattctgtttggaacagtttcctatttggctgcattctaggaggcctcctgacttattcatagtattgtcgcctggtggcattggtgtggsgtagcttgtcctgctacttgctaaagttctctttctttgagaaaactgaggaaccagaatgcttagagttcataaaataatctctaaaccatgttaggttaaaacaaaatgaccatctcacaaaaacgagtttagttgaatgctcaattccttacaaaatcttcatttaaggctgagtgtggtggctcatgcctgtaattccagcactttgggaggccgaggcaggaagactgcttgagcccaggagttcaagaccagcctgggcaacrtaggaagactcygtctctacatagaaattttattataaaagtagctggggatggtggcacacacctgtagtcccagctactcaggaggttgaggtgggaagattgcttgagcccaggagtttgaggttgcagtgagctgatcatgccactgcactctagcctaggctacagagcaggaccccatctccaaaaaaaaaaaaaaaaaaagtcatttaaaaactgaagaatgttctcttcttgctcagttccctaaattagctggggggattgggatactttacaatttttacatttttaaatttgaagaatttgttttaaacttacttggtaatggcacttctacttactgaccaacttttcagctctttttgaccaggatggttgcaaattagggaaaatatctttatactatacatccaattcaagaggactttaattacttaaaagcatttaggtcataattaaaattattttcactgtttccataaaataagcattatgattgcacactccttctactgtctgaatttatgtragaggtatagcttgcttaaaatacatatatatgtaaagttatattttcttagaaacatggatgtttacagccattgctttcaaagagattattacygtgtattctccctgttttacaatatgttttcatgaagactatgttacaccagaggcttctgattatcaaagtgataaccagttttaactgcyggtatgtaccagatttgtgaactaatttaaaaaaccacaaactatgaataaaatggggtttgcaaactaaatatcattaatgattttcacttgcgtttactgatgagattaatcaataaagccatttacatttagtgaaagcaaatttcctcaagtgatctccctggtagcatgtttactcactatgtggagtggagataagaattactttattgctacagatattttacaattagtatttctatgtaagcacataggctattatcaaggacaatttatttagcacttattttgaaattatatgtaaacatgcaaacaaataagaacccaagagtataaactctatgacaaaagtcagtatgcaagcattaagaactctttcagaaatgtgtatttaaaatgaccagaattcccagatcatttgaaagctgcctcttaaatgcctcttatcaattcatcttaaatgtttgctatattaaattctttatccctgagtgccttcatttgacttccaattacgtattttcaactattaattggctatcccattatgttaaaattaaatatgtacataactcaaaatctttcactaccaactaatttctgtttctctcaatatcagtgatatcaccattctcttaagtatctctatttcaaacctttgagtcttgagtctccttttccataatttcctttatccagtctgtttagtggaattcaagcttgttctctcaggactgatttgagaaacctaagcattcctagcccacctctggggtaagctcgccatctctggactgtttgagctatgcattcctataatttaactacacttaagtcaaaagtatattcaagacacaaactcgctattctttgaaaaatgcaaaacagggtttaagcaagcatacctaagtgcacaacagatccggaagatcacctcatactttataccaaagtctaatttagatccagttattaagttcaaatgcagcaaaagcagcaagatattttagccaactcaaaaacatttttataataatttataagtcctgggcgggcatggtggctcgcgcctgtaatctcagcactttgggaggccgaggcaggtggatcacctgaagtcaggagtttgagaccagcatgactaacatggtgaaaccccgtatctactaaaaacacaaaattagctgggcatggtggcacgtgcctgtaatcccagcactcgggaggctgaggcaggagaatcgcttgaacctgggaggtggaggttgcagtgagccgggatcatgccactgcactccagcctgggcgacagagtgagactccatccccaaataatagtaataagtcctttcagtaattacaattattctttcattgcttcttccaattgttaattcataagttgtacataattgtaacaatataattgctctcttcatattatttaaaatatgccttttcattcaatctagaaattttatatttctcaattatattgcttacatattattctgatagacagctgtacctgcttaaacattccaatttaagtaggcatgaaatagtacatccaatctgttttagttttccaaattaattgttagcaagattagcccccatttttttttttttttaacagatgggagtctcattatgttgcccaggctggtctcaaactcttgggctcaagtgattcccccacctcagcctctcaagcattgctgggactacaggcatgcaccaccgctcctggctaaaatcttgttttaagtttcttccctccaacttcctcttgcgttcttggtgttctctaaccatctctacaggggggaggtggtgatacacagcacatgcttcctccttatctaatgtcaccttcagttcagaaacgatatgttttctaattaaaagacaactttacaagagaagcgtgcctaacaaaatgtgtagatgactttttattcattgattcaaaagacatacattcagcccccgctatttactggatattaagctctggggctacatggaaggaccacgcagacactcttcatgccttcaacggcttacagttaagtttttcaaacatttgaaacataacgaagcttttggttacttaaaagaattctatggtattagggagcaacacctgttttgtaaacctatatcttcatacagggaatatgcttaatcttgctacagtatacatgaatgcgggaatgtatcttcctctgggctgcctttcgttaccacttggctgggtggaacacctgttcactccactttccacttgggctacaaacctgaaacgaaatctttgcaaccagtacagcctgcgcggggcgcggcccagtccatcccccttcggatgcgcagaagcagaggtcaccacgccggacccctcgattccctcgcgggcgattcctggctccttcaccaccccagcactccaagacccccgccctttggcctgaggctcccactgccctagccagttcccgggctcacttccagcttttccagaaagcttggccacgcccctcggcccagactctcaggccactcggccgcaattaacccgcgtctctgcgcctttttaggcccctccccctcggtcgtgcccttgtcatctcttaggccccgtctcaccctttcggatgcctcccctagaaccctaccactttccacccctttccgtctgttatttctcccaaacttgcgcccgcacaggcccctctggaacactcctgccccgtagtgcccctcgtccccgctccgtagagaaagagcgtgcgtgccgcgcatttctggcctggggagcgggtggagtaaacctgcgggaaccattttacgacaacgtgcggctgtgcggtgtggctgacggcaacgccgctgctcttggagaggtcactccggagacggcgttggttttggggtgtggggggttggtggcactatgtggcgcgtctgtgcgcgacgggctcagaatgtagccccatgggcgggactcgaggctcggtggacggccttgcaggaggtacccggaactccacgagtgacctcgcgatctggcccggctcccgctcgtcgcaacagcgtgactacagggtatggcggggtccgggcactgtgcggctggacccccagttctggggccacgccgcggaaccgcttactgctgcagcttttggggtcgcccggccgccgctattacagtcttcccccgcatcagaaggtgagccctagaccccccttctcgggaccccgttgtccttcagagctgactggatgcctgcaagatcctccttgagaggcctcactgatcctccacccattcccagtatctgctttggccctttgtccaatagttggctttgctgtagctccttagtgtccctctcatgatctatttcattgaaaggagagcttcaagactggggctgtatgcagaatatctgccgaggttcatgctttgtcagacccacaggactgtggaggagaaagcctgtcactggaaattactaacttctcatggacaggaactcccttggcatccctagttcccaatgtgcaatggaactgtatacactttgcatgaaattgaattgaatgaaatcttaagccagactgagagttaggtagtccttaaaaattttaatgtttcttcttttccttttccaggttccattgccttctctttcccccacaatgcaggcaggcaccatagcccgttgggaaaaaaaagagggggacaaaatcaatgaaggtgacctaattgcagaggtaagtttttttttttttttttaattaatttatttattttttttattgatcattcttgggtgtttctcgcagagggggatttggcagggtcataggacaatagtggagggaaggtcagcagataaacaagtgaacaaaggtctctggttttcctaggcagaggatcctgcggccttccgcagtgtttgtgtccctgggtacttgagattagggagtggtgatgactcttaaggagcatgctgccttcaagcatctgtttaacaaagcacatcttgcactgcccttaatccatttaaccctgagtggacacagcacatgtttcagagagcacagggttgggggtaaggtcacagatcaacaggataagaatttttcttagtaccgagcaaaatgaaaagtctcccatgtctacctctttctacacagacacggcaaccatccgatttctcaatcttttccccacctttcccccctttctattccacaaaaccgccattgtcatcatggcccgttctcaatgagctgttgggtacacctcccagacagggtggtggccgggcagaggggctcctcacttcccagtaggggcggctgggcagaggcgcccctcacctcccgggcggggcagctggccaggcgggggctgacccccccacttccctcccggacggggcggctggctgggcggggggctggccccaccacctccctcccagacggggcggctggcctggcgggggctgacccccacctccctcccggacggggtggctgccgggcggagacgctcctcacttcccagacggggtggctgccgggcggaggggctcctcacttctcagacggggtggctgccgggcggaggggctcctcacttctcagacggggcggttgccaggcggagggtctcttcacttctcagacggggcggccgggaagagacgctcctcacctcccggacggggtcgcggccgggtagaggcgctcctcacatcccagacggggcggcggggcagaggcgctccccacatctcagacgatgggcggccgggcagaggcgctcctcacttcctagatgggatggcagccgggcagagacgctcctcactttccagactgggcagccaggcagtggggctcctcacgtcccagacgatgggcggccaggcagagacgctcctcacttcccagacggggtggcagccgggcagaggctgcaatctcggcactttgggaggccaaggcaggcggctgggaggtggaggttgtagcgagccgagatcacgccactgcactccagcctgggcaccattgagcactgagtgaaccagactccgtctgcaatcccggcacctcgggaggccaaggctggcggatcactcgcggttaggagctggagaccagcccggccaacacagcgaaaccccgtctccaccaaaaaaatacgaaaaccagtcaggcgtggcggcgcgtgcctgcaatcgcaggcactcagcaggctgaggcaggagaatcaggcagggaggttgcagtgagccgagaaggcagcagtacagtccagcttcggctcagcatcagagggagaccgtggaaagagagggagagggagaccgtggggagagggagagggagacggagagggagagggagagggtaagttgttttaaagtaacggagatgagttcgaagagactggctttgcctaattgactgaacattgactttctggatgtgtagctacccctttgtttaagaaactgaagtgtttttcacaacttgatgttagacaagattggttggataagttgtcagcagctggccaaactgattttaaccaaggcgtttctaaagtaatttcttctttgaaatctgtcgtagtggccttatcttcacatgaactgtataattctagacacaaaggccaggctggccaacatggtgaaaccccgtctctgctaaaaatacaaaaatcagccgggcatggcagcctgttcctgtaatcccagctactcgggaggctgaggcaggataatcgcttgaacctgggagggggaggttgcaatgagccgagattgcaccactgcactccagccttggtgacagaatgagactctgtgtctcaaaaaaaaaaaaaaaaaaaaaaaaattctagacacaagctaataaattacataccaacagtacaaacctgagctactgctttttgtgttaaaaggttgaaactgataaagccactgttggattt

SEQ ID NO: 97330 - DNA, 57073 bp, Homo sapiens
taaggtggaaggattgcctgagcctgggaggtggcagttacagtgagccaagattatgccattgcactccagcctgggtgacagagcaagaccctgtctaaaaaaaaaaaaaaggatgaagaacggctctgcccttggcaccctctagagcagatacgacagtggtaccaggcccttagtcagtgaccctgtttcagaggttagagtggaaataacttgccctccgttgcaatcatttttaaggtcagcaattagcagaactctatttttaaacattccttctagttttaaaggttaaaagaaaaaacaaaaaccctttaaccaacaagtcagccaccagtgaccagaaacaatgaagtgaccagcaaaacagaaatacagtatcttgagtcacactcattctaagtacctttacttgactcttgaaaggtttatatttctgtgtgtcccgaatcttcttttttggatgatcaagaaatagtacctagaaaaataaaatataatgataatcattttcatttttggtttgtagtagcagaaccccctccccccgccaccttttgcaagtaacatctttgtgtgtgtgtgtgtgtgtgtgtgtgtgtgtgtgtgtgtgtgtgtgtgtgtgacagagtcttgctctgtcacccaggctggaatgcagtggctcaatctttgctgactgcaacctccgaccccaggtttcaagtgattctcctgcctcagcctcccgagtagctgggattacaagtgcccgccaccatgcctggctaatttttgtattttttagtagagacagggttttgccatgttggccaggctggtctcgaactcctgacctcaggtgatccacccgcctcggcctcccaaagtgctgggattacaggtgtgagccaacgcggctgccctgcaagtaacatcttgtagggaatccaagtgtgtcacacacacatggaaacaaggcactgatatgaatttcaactccagaaggaaatttattgcactgacttaagctgatgcccaacagtcagagacaataaaaacaaaatcttgaaatcaaggaagtaggagaaaaacagtcaacagttaaccagcaaccaacttattcctatattatacttgtattttgagttggttctacacatcaggaagttgcaaataacacattttaacagctcatcttgcaatcttagcatgcaattttttgttttgttttgttttttgataggatctcactctgtcacctgggctgcagtgctatagggtaatcatggctcactgcagccttaacctcctgggctcaactgatcctcctaccccagtctcctgagtagctgggacaacaggcacacgccaccacacctggctaattttaaaattttttatagagatggggtctcccctatgttactcaggctggtctctaactcccggcctcaagcaatcctccagcctcagcctcccaaaaagctgcgattacaggcataagccactgtgtctggtccttagcatcatcttcaagaaagacttgaacatgtgctgcgcaaggtgccagggatggagtcagagtcaggagggaaggacgagtccccacggcagcagtctctgagggggtacagcaggagcacacagaagacctttctgtgaggacactgcccggggggttctcacctcagtttcaccctctgtaaacaagcatgaacacctccagcatcttcaatggattcaagggatctctacagtgccgtcacgggagcaccatagcaaaggctgctgcctgaacattagcatctctgtcacttccttctgaacggcttcaagttcctcaccacacccaagtgcttcaagccggtgggcagaggtgacaacttaagtgtctctcccatctagcagactggcctccccgctgttcccactgtgtcctttaaaccaacatccaggcatttgcccataaactcaaagtgacccccaccctgttctcctgtaaatacacacgtactcgctctgcctgactcttcattcctgcctcgggtgaccaggagatggcaggctgccctccccacccatgacgccttccctgcccagggtctgtatatgtctttgaacttgtttcccacggtggtggtgtctgaatttgcactttccatctgaagaaccaggggctgccccaggcgggattttcctcgggacgccagaaagaaggcaaaggcaagctcccagggccagggtgatggttaggcaagcgtaacctgaacatgggccacagggcatctgccaggataaacttgtttcctgtggagggaccctggtcacggatgggacaactggacattaggccttcctccaggtaaaaggggtatcagcaccttcatttctcattagggcggggttgccagctgctctggtatgggtaccccagtttcgctgggggctctcaaaacaagagcctggcatggctcctaaaacacagtaagaactcagcacgcggtatctgatattattaccaaagtattcccaacatagagcacaaacccacacattgttaaaactccccaacacagcaagggcgtgagtgtaacacccacggagcaggggcaggctgagtccccaggagagagcccagtacctttaggtcattatgcagagcgtgccccactagaattctgcccttcagcatctctgccacttccttctgaacaacttcaagctcttctcctggaaaatcaacacaaagaagcggttttttgcaacacacacatcaccatcattctgtgaggaggcagccccgctcctacccctggtcagacctaagacaaatggtcaggcctgcaatgccactacggagggtgactcgaagccaccacatccacccacccccctgggagaagtgccttgtgggcccctggcaggggtggctgcgagaaccacctctgaggagaggaataaagtgctccacacagtctgcaaagtcggctcatggctggaggagagcatatgttgagtgtaggcactgagaaacttttagagccgcctggcagcgtggttctgcctattcaacctcatgatttacttgacaatttcccaaatggaaataaaaacaaaactgcccccacaaaaatgggtagagatgtgttgccctaggccctgggctccagaggcagccttgcctgcttctggggaccaccccaccaccaaccccacttgtaccccccgaacaggggtgattagaccaagggtggcccgagccaagtgggaccagctaattttttaaaaatattttttagaaggccaggtgcagtgggtcatgcctgtaattccagcactttgggaggcggaggcaggcggatcacctgagttcgggagttcaagaccagcctgaccaatgtggagaaaccctgtctctacttaaaatacaaaattagtcgggtgtggtggcatatgcctgtaatcccagctactcgggaggctgaggcaggagaatcgcttgaacccaggaggcggaggttgcagtgagcccagattgtgccattgcacttcagcctgggcaacaagagcaaaactccatctcaaaaaaaaataataattttttttagaaatgaggtctcgctatgttgtccaggctggacttgaactcctgggttcaagcaatcctccctcctcagcctcctgagtagctgggactacaggcatgagccaccgtgcccagctactggcctggtcttgaagtcagcggacaggaggcaatgaagtgcaaggcataaatgggtgtaaagccgtctaaggatgccttttgtattttaaaacccatcgccccaaaaggagacaagacgcatcaaaaccagctgcagtgagtggtctcagacagaaaagggaacaaaagggagaaaacgaatccagttactactttcccttctaagttcctgagctgtggatgacataccctgcttgaggttctcaggccgaatcccactgaccgctgtcctatagtccgtcacgggctcggttggtttgacgtacttgtcataaacgcacttcccatactggttcacgatggacacacgggcggccatgctctcctcccccttagggcccacgcccaccatctcacagtccaaggctaaggctcttgtcaggctgaagggtaaccaaaggctgtagtttaataaacacggcaggccacagggctccaggtcagagccccagggatccatggactaagtgtcagcagagaaaagctctctgcccctcactcatttgcacccacgtgacaagctctgtgtggtcctggttcttagcaggaccctgggaggtgcttgcctcattcacctcagggagaggaaagcatcctcttccttgaagaagccccgccctccacggctaagcatccccagcagaccccactccctgagaccagcgtacccgccgaaggcctgctctttcacgaggctgaggctgacgctgccctcgctctgacccaactgtttcctcgctatcttggccgcctctggacctatggcagcttcgatatccgctgggtccacgtcgtcaaaccagatgtcttccctaaaaggcaaagataacaggctgatcaccagaagaccctagtgcaactggtggggtggggctgtggggctgactgtgcaggtgagtggagcgatggcacagcctgcctctcccacaggctggccccagacaccccgactgctggccctgctgcttctgctattttgatcatcttggcattttccttttttttttgagatggagtctcactgggtcacccaacctggagtgcagtggcatgatcttggctcactgcaacctttgcctcccaggttcaagtgattctcttgtctcagcctccctagtagctgggattttacaggcgcccactgccacgcctggctaattttttgtattttcagtagatacggggtttcgtcatgttggccaggctggtcttgaactcctgacctcaagtgatccacctgcctcggcctcccaaagagctgggattacaggtgtgagtcacagcacctggcctcatctcttttctttttaattagaaaatacactcattattcaagatttaggaacacagacaaacacaaagaatataaaacagaaacacataacccaccacccaagtgtaatgagtgctaacattttaattatgaaggtaacacgttcattattgaacacttaggaaacagacagacagaatgcctgtaagatggaaacacagaaccccttgccctccgtactaggaagctcacacaggcacgtaacacctgcctggggaatctgtctcttgggctaaggttaaatgtcatttccttagaaaagccattcctggccccactgaatggacacgtccctcttgttccaggcgcccaataccttctcctcactagatttatcctgaccacacttaatcaacagctgcagtttacagtctgtctactgcacttgacaataagcctcaagagggaggagcaggcccacctcactgaactctatcccagacagcctgcctagcacaacacagggaggcccccaaatggctcattcctcagccatcagcgactgtgtcctgaacacccaggcaacatgaagccagctgtaacttatgaacacgtcacctccagctgaaccattcagagaaggccactgactcccggtccaccccacgtgggtggccagcacagggtttattcttttcacttgtttttttgagagtcttgctccgtcacccgggctggaggcagtagtgcaatcacagctcactgcagcctcaacctcctgggatcaagtgatcctcccaccttggcctcccaaggagctgggatcacaggcaacagccaccacacctggctccatcacagggttgaagtaatcaccaggcactgagccaagagtgccaacctcacaatctccttatgatgccaccatgactaccacaaggcacagaggacgtcagaaacttgccccaaaccacccaactggcgagaagcagggacaggcctcatacttgggtctttctggcttcagcacgctttccttccacacacgtgtactggcacccactaaatgctgagctctgctcaacgctcggaagaagcaggccctgccttatcatgcgcacactctaggggaaaacaagtaacagcgagtaaacaaaggaacagacgacatcagggtaaagtgatggagagactgcggtgaggccaccagcctccataaggagacaggccttggtgaagtcgctgtgcctcggttctcagtggtgaggtggcccatacttactcggtgggtggggctggggctgcctccttagctttccgcttcttatgctcgatgtcccctcgttctggaacaatatcaccatttgtcctttccttggttcctttcttattgtgctctgttccactggccttggtgcgaggtactggcgccytcctgtccatcttggaacctgaaggaacagagcccctgctggcctcctggtcttttcctgccggcatctcctctcccttcacttgaggcgaggtctcttttttgttttgctggataattttgggcttctttttggaacccatctgagagatgacaagaggcttttctggggcctgagatttttgtttcagcagccactgggacccaaaataaaatacatgctgcatttgaatttggaaattacacacagcagattgaaaaaacttacgtgtgtatgtatatacacacatatacaccaaacacatctatacaattcccatccgcatcactgaaattcattttcaaacggtttggaaaaagctctttttcattctcatgggtcacttgtggtgaaatgctgtttctttgcttatcttattataatgcattttgcacctgctccttcatgcatacaaaatgtcaaactcattctacaccttgggtacctgttgagtggctggacaccacagaccacttcccttttcagcttatctagaaagaattttggagttaacttccctcacagcttgggccaacatcctgctacacagaaatcgctttttttttttttacaagattccctggtttgctactgctgtgaagatctcaggaaggtggggggtgtcataaatgaaaagaaaagcttctgtcaaactggagtggctgaagaactgctagcagccacacaccttggctgtcacccaagcagaggctcctgtagtcttagagcccagcttcctccctgtgttcaaatccccagtgggagtgggcgccaccacagtgcgatgatgaggcgggtgctacttacctgttctgtgataggtaaagaactgaagggctgactttcttggatgaattagaaaacactccaaagtttccctatagcacacatcccttccattcacttattttgcttttctttcttgggagaaggaagaagagttggtgttcaagaaatcccacagaaccctggggctgcccacgggaatttgactggtcctgtgtgttaagacaggaatgtctgcactgagatactgtgcagagtattaggaggttcaagaagcrctcggggaggctgaggtgggaggattgcttgaggtcaggagttgaagaccagcctgggcaacaaagtgaaaccccatctgtattagttcattgtgcactgctataaaggaatacctgtgtttggtaatttataaagaaaaaacrtttatgtagctcatggttttgcaggttgtacaagaagcatggtgccagcatctgcttctggtgaggccgaaggaagcttcccatcatggtgtaaggtgaagggggagcaggtgtgttgcgtggtgagagagcaagcaaaaaaggtgctaggctctttttaaacaaccagctctcaaatgaaccagcagagtgagaacttactcgttactgaggggagggcaccaagtcattcatgagggatctacccccatgacccaatacctcctatgggccccatctccaccactggggatcacatttcttttttaaaaaaactactttttacttttatttagagatggaatctcaccatgttgcccaggctggacttgaactcctgagctcaagtgatcctcctgcctgggcctcccaaagtgctgggattacacgtgtgggctactcgggaggctgaggcaggagaatcactggagcccaggcagcagtgagctatgatcctaacaggaggtagctccaagggagctccaagggatgtggtaagaatgtatgagtgacgcacgtggaagagtgtctrggagagagcaggcaacctctacagaagtgcaggtcactagggagacagcaggtacaacacagccttaaaagcatggactccagagtcagccacctggttcccagccgcaatcttagatgatctatttaaactyttccagcctatttcctcatctgtacaatagmgatgatgraagtgtccacctcacagtcttattgtggggattgcaacacrcatggcatagagcacatggcagagtgcacatttttaggagctcaattagtatttacttcaagaccgtaagtgtcgctagaaccccatcacatgtctgctatctgcttttcacttctacacaggaatcttctttctccctgtcttgctacacagaccagtgtgttctttcgttgttgttgtttgagatggagtctcgctctgtcgcccaggctggagtgcagtggcgcgatttcggcttactactgcctctgcctcccgggttcaagcgattcttctgcctcaggctccccgagtagctgcgactaccggcgcgcgccatcacgcccggctaatattttttgtacttttttagtagacacggggtttcaccatgttggccgggctggtcttgaactcttgacctcaggggatctgcccgcctcggcctcccaaagtgctgggatcacaggcgtgaggccccgcgcccggcctggtttcgggattttaagctaaatttctctttgtaaaatccattctagttagttcattatgcaaaaggtacaagggtttatctttgcttttttgtacttgaaataattctttcatcaatttctttcaagcaaacaagttcgagacctccctcaacaggccacctttcttgtgaaaagctgtttacaagatttcgattcaaatctgcctttacaggtcttttggggctacccaagtctttccctccgtcgcgttctgcgggaatgagctgcgcagcgctccgcccgggccccctcaagcctcacctcttgcagcgccttccagttttgagaaaagtcttctggtgcctttggaggtcgcaccacagcaccggggccgcttgctggcttcttgcttacttcccgcgccttgcttttccaaaacctttttttcttcttgtttttcttccgagtgagcgtcttgacaggacccggcttagccacggggctgctcggggcgcgcttggaggcggggaccttcgccttccccatcctgctgccgtccagcgcmtgggccggcggccacccgagaccccggcctccccgggcccggcgccctggcagcacaagcgcctgcccaggccaggccgaaacacacccaccgcagggaccccgtccagkaaaagactccggaagagaccccgcacgcgttgcgcatacctcagcacgcacgctccagtccccggaagcgctcgtctctccacaaccggctggaaaccggatccctgcctctggttccgcgcagcctgggcggttcacccgcacgggacttgggccgccgccttagccagcggcatccggggtcatcgacctcgagtttgactggggcaagccgaggacctccccaagatccgggatggggatgrgagatgcgaacgccggaagggaactggggggccgctgtgtgtgtagcaccyggtagggcagctgagctgggggcactgggcggtggggctagtgagagccgggctaggtcgctcgcctgcgtcctggactctcgagcctttcccgccttgggctgctccttgctcagcctcacagcggctcatcttccacgtacagtggggaaactgaggcccaggcaccgggaggagttcctgccagttcactctgtagcaggacgagccgcagacaagaacccctcagacaccgaattgtagaaggaaagggctttatttagtggggagcatcggcagactcacgtctccaaaaaccgagctctctgagtgagcaattcctgtcccttttaagggcttacaaccctaagggggtctgtgtgagagggtcgtgatcgattgagcaagcagggggtacgtgactgggggctgcatgcaccggtaatcagaacgcaacagaacaggacagggattttcacaatgcttttccatacaatgtctgaaatctatagataacataaccggttaggtcaaggattgatctttaaccaggcccagggcgcggcgccgggctgtctgcctgtggattttatttctgccttttagtttttacttctttatttggaagcagaaattgggcataagacaatatgaggggtggtctcctcccttacttctgcckcctgggttcaagcgattctcctgcctcagcctcctgagtagctgggaytataggtgcacgccaccactctctgccaatttttgtatttttagtagacctggggtttcgccacgttggccaggctgtcttgaactcctgacctccagtgatccatccgcctcggcctcccaaagcgctgggattacaggtgtgagccaccgtgcccggccgggagtgggtagatttgatgtgcgtgtgtaacaggcagaggttgatggagtaacagggaagtgaggctcctaggattttggtctgagcaattgggtgtggccatttatcatctcaataaatgtctgcggggagcagggtgaagtatgggggtggagccatgagctccttttcacacttgctgagtttgaaygggccgtcagtcaccaaggagagacgtctaatcagcagcaggatataagattcctaagcttagggaagggtcagtgctggagatgtaatttggaaatcgtcagcacataattagtgttgaaacatgaacctgggttagttcatccaaagagagagtaccaatatagggagtgaagggttaagaccagatagcaggtgctgggggctctccaggggcgaagcagcagaggaggctgagggggagcagtcagtgcagtgggaggagaagcggatgtgagtggcatyagagaatccagggggagaataaaccacatcagatgctgctgagaggctgagaaggacgaggacagagagatgggaaccagatatggcactgagattgtcagcaagtccaccgaaaagggttttctttttttttgtttgttttgagacggagtcttgctctgctgcccaggctggagtgcagtggcgtgatatcggctcaccacaatctccacctcccgggttcaagcgattctcctgcctcagcctcctgggtagctggaactacaggtgcacgccaccatgcccagctaattttttttttttttttgagacgaagttatgctcttgtcgcccaggctggagtgcaatggcgcaatctcggctcaccgcaacctccacctcccgggttcaagtgattcttctgcctcagcctcccgagtagctgggattacaggcatgtgccaccacgcccggctaattttgtacttttagtagagatggggtttctccatgttggccaggctggtatggatctccagacatcaggtgatcctctcgcctcagcctcccaaagtgttgggattacaggcgtgagccaccgcacctagcctaatttttgtatttttgaaaagagacggggtttcactatgctggccaggctgatctcgaactcctgacctcatgatccgcgtgcctcgtgatccacctgcctcggcctcccaaagtgctgggattaaaggcgtgagccaccacacctggcccaggttttctttttaaaaaaggaaaaaaactttgttccagcagtttgtaaaccagggcaatgcagccttctgtacaaaggtgcattccagggaacaaagagaacaaagaaagaggtcgtcttttgtagagaacttcctgcccaggttcccactttggtccacttatgcaaatgaggaaggcacacttgcttagttctgattggttaatacttgctgagttcagattggtcgatgcaggtcacagtcgatgggttgattctggcgrcataaacaggaacagatagctgtgaaaccatcccagagttaagtgagagtgggggctttccaggaacgcagaatgtgtgtgtgaccctagtcagcaaatggctgctaggtcctactttgaatttaggcccagttagtaacttgggatccatcaagaaggattggctctttcagggttcacaaagttattggtgaccttttaaagatcaatttcaatggtatgtgggaattgaaggcaaggaagtggagatagccactgaaaataatgtttctaagttcttaaagacagccagaaacagggctatggcaggaggacagtgtgggtcaagggaaggttgttgattgtaatcaagagacaccagagtgtctgggcttggtggctcatgcctgtratcccagcactttgggaggccgaggcagtcagctcacctgaggtcaggagtttgagaccagcttggccaacatggcgaaaccccacctctactaaaaatacaaaaactagccaggcgtgatggcgggtgcctgtaatcccagccacaagggaggctgaggcaggagaatcacttgaacctgggtggcggaggttgcagtgagccgagatcgtgccactgcactccagcctgggtgacacagcaagactctgtctcaaaaaacaaacaaaaaccaaaaagagacaggagagtcattcatgctgatggagtgagccaggtaccaggatctcgatatctaagcatgcccccttctccaacagcctccttaccttcctgcatgaaagcacacccttccctccagtcccccattcctttattctgctgtatttttctccataacacttaccacctttgaacatactacatatacaacatgtgtctgtctagcaactttgctgtctggctctcttccctagaatttaagctgtgagaggccgaggctgctgtctgcctggcttggggctgctttcctggtgtctagcacagagcctggcctgtttcaggggctcagtgaaacatttgttggctgaaggaatgaatgaatggctctagcagaggggcagaaactaacgatgcaggaggagagagctgggaagggatccagagccagggcctggcaggaagtgtaggtgtgtcctccctgatcgcagargaggagagaggctgcactttgaggggtggaaagacaaggtgaatccccctgctggtcatcagcttgtgcggctctgtgggtgtaaaagagtggtttggagcatgtgaagtgagtcttccaggagatgaaggggattgccaggccgtttgtgatgatgctgagatctggtgccgtgcagcctgcttctgcgactctcctcatcaggcgcaggcacagagtaggtggagagttgagccagaaccacgatgtctttggcacagcctctcatctgtcagatgggagcggggaccccggagagggagtcagccgaggtcctggcattcctygtgaacccccgtctgtgggtttctggtccagtgtcccttctccagattagatggcttaggcctcctctaagggggtgggcgtgcacatccggagagctgtctggtgtgcaggactgggctgcaggttaccctgaactgcaaccatcttagagcaaggcccagcttgcagcaggaggagctgcaggccgcccaccctagccacggcccctgccctggcaggaagcttccaagagtaaacactgcctaatcgtcccgcccagtagtgagcaggcctgtcccattccatactgaccagattcccagtcaccaaggccccctctcactccgctccactcctcgggctggctctcctgaggatgcaccagcgtcaccccygggcaagatgccctcccctctgtgtggccggaatccttgcctgtggctttctcctgggctgctggggaccctcccatttccagcaggtgggctcatttgcaggagcgggggtattctgggagcctctgggtggggtattctgagctacctggggcgaggggagtgccaaatagctgactacatcagctttggggtttgcgctgggcaggggagtctgtacttggggctttgggggatgaagtgtgctcactgaagagggagttggtgtctcagtacgacctgctcattcggtgaagctgaacagacagatactagtttgtcccaaactgtgtaggttgctcttctctgcctctcccttcctctccctgtctctgatttccccctctccttcttggttggcctcacccacctcctgcctcctgtctccctcttcatccatctctttttgttcttttttctttctctctctctctttttttttttttttttttttttaagacatggggtcttgttatgttgccccagctggtctcaaactcctggactcaagtgatcctcccacctcggtctccccaagtgttaggattacaggccagagccactatgcccggccccatccatctctttttgtcttgcagagttgtcttcaggctttggagccacaggccgtgtcttcttacttgagccctggtgctcccttaaaaggtacttgtcctggtgtcttctctcccggggggagtttctcaggactttcaaggggtatctcaccactgagtcagtggtctgggatttttggtggatctggaaggagaaggtcagagaagctgctgtcaaccctgttaattaactctgttacttcctgccaagttgatataagctggtctgggtgttccagccaggccagggttctcaccctagcttctgttaaatatcacaagggaacggtcaccgattggctggcccctcctgccccatggcctctgctgagctggctgattttcaggagctcttgtggtttctgaccgtggatgtaaatatttattccttctgtgggaaacaagataggtactggctcaggctacctcctaaggccatggatttccttatgataaaggcctgtccccattgcccacaggcccatgtctgtgaccttctccggtgcgagcccccttcccagtagggccattggcaacttgactaatggctgatggggrccagaggcaggtgggctagtggtcaggggcaacaggagggcaaggcccactttgtgacctggttctttgtggtctaggccagaggcacactgaccagtgcctggggccacgctgggggctggatgcagccgacgctgtctgggtatcccatagcctgggtccttccagcgctgccgctcctgaaaggctgggagatcattgcccagggtccctgaccctctaagggctcccttgggagaggacagtgagggctggcctgggcccctgcttcccaagagaccactgggctccactcgtgttcagtttcctgtcggggtccatgatgttacttgtgaaacacctgtgcccagagcagggtccaggaggcagggcaggggctttcccctttgggcagagccaccagggcagtgggaatcttgtcttgatggggtgacccaaagcacacaatagcccaacagctcctcctgggccctgccctttgcgtgcctagtcactaatggggtctggctcttggggtgggggtgacacgcaatgtcttgacttcggaaggccatccttccaagacctgccagcccctytcctgttagctttccactrcttgctctctagaaccatcgccctctgctytccctctccccctccaggccgccctccttcccctggcttccagaggcagaggcagaggcagaggcgggctgcaggcggcatcctacacctggagctgctggtggccgtgggccccgatgtcttccaggctsaccaggaggacacagagcgctatgtgctcaccaacctcaacatcgtgagtgccccacgctggactgtgcaggtccccacggccagggctggtgaccaatgtctgtgggctggtgtatctggtagtctgaatacagtgggttaaactcaggtagaatggctcggggttcttcctcttctccctccctcccmtgggtggaggtgggtgaggtcccacaccctctctaggctccatggcacatgcacaccctgcagcctctcactactcaagtcccttcacctggggccaccctcaagcctggcctcttccccagtatccatttgacccccacaaagctcagctaaagcaaccctggcaaatgggatacgggctgctcacactgccctctgcaccccgaccctgccctctctccattctcttgtccccygctcagagtggcgaggacaggtcacccgtctgaagtctaaacagagactgctggcaaaggagatgcccaccttcatttcttgctagcacctgaatccctgcagccccccttcacttgaaagctggggaagggcgggcagggaagcactcccccactagccgccgtctcagaaagacaaacaaggccaggcgcggtggctcatgcctataatcccagcactttgggaggccaaggcgggtggatcacccgaagtcaggagttcaagaccagcctggccaacatggtgaaaccccgtagctactaaaaatacaaaacttagctgggcatggtggcaggcgcctgtaatctgagaggagcctgcgatctgagaggagcagcgtttgaccggaatatccgactcgtgaccatctgtgtgctctcatccccttgctttggagtttgttttccttgcgttagttggccttcctgagccatgagctgaggagcaacagaggcacggctgactgtgcagcacattttaggagccccccgccccgcccggttcccacacatgctggtggagtagcctctccagctcttcacactccgggggcccctgggagtcagcagctgcctggggctggcaaygcccacccgacgggttacctctctcatctgcccttgcacagggggcagaactgcttcgggacccrtccctgggggctcagtttcgggtgcacctggtgaagatggtcattctgacagagcctgaggtaggcatggagctggaactcagcacaccatacagagcgggaagcccaagtcatcgcatctycatcctctttaacctcttgtcccggatgccccaagcagcatggatcacagaatgcattcagccagacagaccagctgccctcccagctctacccagcactcagcacaggctgcctgactacttctctgagcctcagttgtctcatccctaacacgggctagtcatagggttgttaggaggactaactgggaaacaaaccgaccgcagtcagcaccgtgcctggttggggtgtcctaaatgcaggctttgctgtgggtccgcagggtgcyccaaatatcacagccaacctcacctcgtccctgctgagcgtctgtgggtggagccagaccatcaaccctgaggacgacacggatcctggccatgctgacctggtcctctatatcactaggtagccgagctttctgatgggtgctggccagccagcctgggaaggctgctccctcagcctcctgccctctgcaaaggtgaccccagggcaggcacgtgccttgrcaccacccaagtgactgttttctctcaccgaggtttgacctggagttgcctgatggtaaccggcaggtgcggggygtcayccagctgggcggtgcctgctccccaacctggagctgcctcattaccgaggacactggcttcgacctgggagtcaccattgcccatgagattgggcacaggtakgtagccccaccagctgtccccaggatctggcaaggagctgacctgggtacccagggtggaggtggtcttggcaagcagtgggtccttgtagagtttctccagaggagcctgtacccctcaccccracagactcaggtgtgaggacaggggawcctgatactgtttgattaaaagaactttttttccaaaagacgagcaagacacctttagcaggtagaaaataacttctgtagaaaattcaggtaaagaaagagcaggctgtaaaaattatctcaaatcccaccatttagagataatgtctcttcacattttgtatttaatttcagtcttttctttacatacacacacatatttcttatttgcaaaattgggatttagtttggatccctgaaaaaaaggaaaattgtgattatgctgtgcattgctttgttacctgctatttctttttcttttcttttcttttttttttttgagatgaagtttcgctcttgttgcccaggctggagggcaatgacgtgatctcagctcattgcaacctccacctcctgggtgcaagtgattctcccacctcagcctcccaagtagctgggattacaggcatgtgccaccacgcccagctaattttgtatttttagtagagacagggtttctccatgttggtcaggctggtctcgaactcccaacctcaggtgatccacctgcctcggtctcccacagtgctgggattacaggcgtgagccactgcatccagcctttcttttttcttcctagggtaagtgcaggatttacctgttctttatgtaataatatatcccaaacattatcccaggtatcttagaggtgtgcaccgtaatttatttaatcagtcccctcttcttggatgtctaggttgtctgaacacgtcttcctgttgtgaatgttatgcattcttgtgggcaaaccttcactcttacctataaccatttacctagagtgatgggtttcttttcatttctttagttttttaagtatgaaaataatacccaattgttgtaaaaattcaaacagtgcagagatttctaaagtaaaaagtgaatttccacattccttgcccaccaacccccacccgacccctttcaacccctctgagcctgggagggttgaggcagggttcctgggtgtgggacaaggcagggctccttctccctcagagggagcatagttcccttctgctcctgtgatgcagaagacgtgagcccccaaactggggcttagcctgggagggttcttggcttcaccgaggaaagaattcaagagggagcaggtggtgttagacagcaactttgattgatgtggcagtgggcagagtgtacagccctgtgactgtatacagcacagcatagccccttttgaagccaggctaccccatagacactgtgcccaaaagagcagctcaaaggcagggctgcagtcctagttaatacccacttctaattatatgcaaattaaggggccagatkatgcagaaatttctagaaaaagggcagtaacttctaggttttcgtcatggaaaaggggcagtaacttctgggttttgccatggcaatggcaaactggyatggcacactggtgggcgtgtcttatggaaaggggcttcccacccctccctgttttagctagtcctctggtccagtgtccaagcggggcctccagagtggagtccacctcctacctcaccggtgcctggcctctcccaccccattaggagtcctccatcagttccgctttgggtaaagcaagctctgttgtgacagtttggaaacggttcaccttcctggcctaggaatgcaaacaatggccaagggcaagcacgttttaactgaactttaaaatcgtgctttcctcacagtaggtgaatttcacgctcaacacatccatgtaaacagtccccagagcagcccttcaaggccccggccagtccccacctccccacagactcctaacaccatgatttaatgtggcttgcacatttttaaaggcttttgatatttattagcaaaagatgcgagagccaccctgctgggctagcgctcccttctgggggaaactgaggcagggcgcacgcgaccctctccactgcgcccagttagcagatggcggcgtcaggggtcgacccgggtcggaaaactcgctggcgctgcggcactagggcgccgggccgctgactcgccgacccccgtcccgcccccacccccgcccccgccctgccggccgccttagcgcaactccccgccccccgaccagcttcggcctggagcacgacggcgcgcccggcagcggctgcggccccagcggacacgtgatggcttcggaacggcgccgccccgcgccggcctcgcctggtccccctgcagccgccsgcagctgctgagcctgctcaggtagcggccgccccgtgggaggggcgcgcgagcctccagtccagcccgctgggcgcgccagcgccacctctctctacgtccgtccccacgtccgtcattgcaggcccttccttcctgtcccaacccctcccgtccaacccagcccctccgtccaaccccgcgcccaccgcctccgtccgtggaggggcgggcgcgcgacgcctggcagccagcccgctgggccgccccgcgccacccctccctacgtccgtccccacctctccctacgtccgtccccactccgcattcagccctccttccggtcctacctctccatcctgacccactcctccgtccaaccccgcgcccacagttccgtcccaccccgctgcgcccaatcctgcgcccacccctccgtcccaacccgtgcacccacccccccgtcccacccacctgccccaccccctgcacctccccccgtgctgtcccactgtgcggccacccttgtgtccaacccctgcgcccaccgctccgttccaccccctccctgcggcccacccctgcgtcctccctcgcccccttgcgcccacactttcgttccagccaatgctgggcacgcacccctccgtccatccccatcccgccccttgactccacatacactccctggttctctcccacttgcctacacccacccctgcatcctaccctcctccatccacccctccatctcagccccctgcacccaccccgttcctgggcccaccctgttcctgcacccaccccctcacttcacccccttacccttcgtctgcctccacccgcccctacccctccgtccactctccacgctccatcagtcccacacccctatctcccccacccgcgtacatgtatccctgcgtccccttcccgccgaccgcaccgctcccgggcctaacctgcatctgctccatcccactcagacccgtccctccgtcgccgctccctctgctggccacccacctctgcgccggcaggagccttagtcttggtcccagccaagagccggctcctggtggggggcgcgggccgagaactcctgttcccactcacaaaaggccacgcttccaaacgcttccatcctcgtgcccactcctccgtcccgcctcctcccggtgtacaccccgggactgagccgggcctgagccgggccttgtcgcagcgcaggacgggcgcgctgcgtgtgggacccgccgcggcctcaacccgggtccgcggggcacccgccggatgcgcagcctggcctctactacagcgccaacgagcagtgccgcgtggccttcggccccaaggctgtcgcctgcaccttcgccagggagcacctggtgagtctgcyggcggtggcctgggattggctgtgaggtccctccgcatcacccagctcacgtcccccmaaacgtgcatggtgagaacctgctgggtgccgtgctaggctgaggtactaagccagggcggcttagtttaatgctgtctgtgccctctagaaattatttaaaatgtttgaacaaaagctccaacakttttgtttgactgggccccacaaattatgtagctagtcctgsgagggcccctgtgcccaaggactcctggctgagtgaggacaccaatcttaaacagttaccaaggacttccccatckattgtggctggagtcagactggagggcttcctggaggaagtggcctctaaactgaacccacagcagaagtggggctggtagggggaggggagatgaaggagagcaggcaccccaaaagacagacttcctcgcaggattgcataggacattcatgggctccaggcacttttgccttgatgggccccttcctccacaaaaaaattgagaattatgttttaatattcttatacaatgtataaagttttatgtgttactataaatacaagtctttttttttcctttttttttttttttgagacagagtctccctctctgctcactgcaggctccgcctgccagattcacaccattctsctgcctcagcctcccgagtagctgggactacaggcgcccgccaccacgcctggctaattttttgtatttttagtagagacggggtttcactgtgttagccaggatggtctcgatctcctgacctcgtgatccgcccgccctggcctcacaaagtgctgggattacaggcatgagccacagcgccccgccaagtctttttttttaaattcttttgagacagggcctcgttctgttgcccagggtggagtgcagtagcacaatcatagctcactgttgcctcaacttcttgggcacaaacgatcctcccacctcggccttggagtagctgggactacaggcacatgccacaatgcccagctaatttttaaattttttgtagagatggggtctccctttgttacccaggcttgtctaggactcctggcttcaagccatcctcccaccttggcgtcccaaagcactgggattacagacatgagccaccacccacgcctgatcagcaaatctattaatattatatattacaacattaattttgacctggaagttcattttttcatttttttttttttttgagacagagtctcactctgtcacccaggctggagtgcagtggcacaatcttggcttactgcaacctccgcctcccaggttcaagtgattcccgggcctacgcctcccgagtagctgggactacaggcatgtgccaccatgcccagctaagttttgtattttttagtagagacagggtttcatcatgttggccgggctggtctcgaattctgacctcaggtgatccgcccgccttggcctcccaaagtgctgggattacaggataagccaccacacccagcctagttcatttttttcttctgattttattttatttatttatttattttgagacggagtctcgctctgtcacccaggctggaatgcagtggctcaatcttggctcactgcaagctctgccttcagggttcaagccattctcctgcatcagcctcccgaatagctgggactacaggtgcctgccaccacacccggctaattttttgtatttttagtagagatggggtttcactgtgttagccaggatggtctcgctctcctgacctcatgatttgcccgcctcggccttccaaattgctgggattacaggcgtgagccacagtgcccggcctttttccttctgattttaaaagaaattaggccaggtgtggtggctcacgcctgtaatcccagcactttgggaagccaaggcaggcggatcacctgaggtcgggagtttgagaccagcctgaccaacatggagaaatgccatctgtgctaaaaatacaaaaaattagccgggcgtggtggcgcatgcctgtaatcccagctactcggaaggctgaggtaggagaattgcttgaacccaggaggcagaggttgaggtgagccaagatcgcgccattgccctccagcctgggcaacaagagcgaaactgtctcaaaaaaaaacaagaaagaaaaagaaattaaaacatttgcctcttragcttcaagtcagtgacaagttaagaaggaaaaaaagaaaaaagacacaaaaaacacatttccatgggcccccaaaagtgtgacaggacctggtcatggtcccggttccccatcgatgggtcagtcatgccttgtcctctgagggcaccagtgcccacggtgcagagtgttggctgtgtcagtgtgtcctgcagtctgggagggacagttaaggttggacactggcctggaaggccctggtggcccctgagctcgccacccacctgtccaccctcctaggatatgtgccaggccctctcctgccacacagacccgctggaccaaagcagctgcagccgcctcctcgttcctctcctggatgggacagaatgtggcgtggagaaggtcagagccaagagtgaatgagtgggctcctgtgagcacgtgcacgtgggtgcctccagccaggccrccctattcctaggtcaggagrcaggaccagtatggggcagagagtcttggagttggccttggggactgtcctttgggttggtggtctgacctctttcctttagcatttgctcccatgcagaatgggaatgtgggctgcctgttgtatggggggtgcccatgggtgtggggttcctttgggtggggtccctgtgtgaaggtccttgtggatatggggtgtctcgggggggatccctgtgtaaggggtccctgtgagtgtagagtccctgtgggtggggtccttatgtgtgtgttggaggatccctgtgtgttgaggggtccctggggggttctgtgtgtatgttggggggtctctgggtgttggaggatccctgtgggtctgggggatccatgtggctggggtacctgtgtgttggggggtctctgtgtgtgttggagatccctgtgtgttgggggatccctatgggtgagttccttgtgtgtgtttgggggtcgctgtgggtggggtccctgtgtgtgttggggatccctgaggatgttgggggactctctgtgtgtgttgggagtcctgtggtggggtcactgtgggatgggagatgaagccatccttgccttgcagtggtgctccaagggtcgctgccgctccctggtggagctgacccccatagcagcagtgcatgggcgctggtctagctggggtccccgaagtccttgctcccrctcctgcggaggaggtgtggtcaccaggaggcggcagtgcaacaaccccaggtaccgcagggagggtgcttttctgtcagggagtgtggccataccatagtccctagttgaaggcagtggtcaccctgctstctcaccctcctgtctgctgggcattttcagacctgcctttggggggcgtgcatgtgttggtgctgacctccaggccgagatgtgcaacactcaggtaggcctgcttcctggggtaggagggggcagctggtggcaccgggccctgggggagccaaagtgaccatctgtggttcacaccaggacacatttgagaaggacattggggccaggtgaggtggcttatgcctgtaatcccagcactttgggaggccaaggcaggtggatcacctgaggtcaggggttcaagaccagcctggccaacatggtgaaatctcgtctctacagaaaatacaaaaattagccgggygtggtggtgggcgcctgtagtcccagctactcgggaagctgaggcaggagaatcacttgaacccaggaggtagagcttgcagtgagccgagattgggccattgcactccagcctgggcgacagagtgagactctgtctcaaaaaaaaaataaaaattaaaaaagagagagaaggacattgggaccccagttcataaaccaggccagtcctgctgatgcccacagagcccctgaagcgtcccgcctccctccctgagtgccactttgccctccagagcgcatctctgcagggagaacctccccactaggaatacagtgygctgctgcatgcctgcaaaggaattttttaaatattatttttatttttttagacagagtctctccctgtcacccagactggagtgcagtggtgctatctcagctcactgcaacctctgcctcccaggttcaagcgattctcctgcctcagtctcctgagtagctgggactacaggtgcccgccaccacgcccggctaattttttgtatttttagtagaggmggggtttcaccgtgttagccaggatggccttgatctcctgacctcgtgatccgcctgcctcggcctcccaaagtgctgggattacaggtgtcactgcgcctggccgaaggagtcttttatttataaattgaggtgacattcatgtagcatgaaatcaagcattttaaagtggcaactcagtggcctttagtacactcacaaggttgggcaagtactgcctctgtctagtttcagaacgtttccagtactctggagtactctggagtgaaccccatatggtaggctgtcactccccatttctcctccgccactcagcggccattggtttcccttctgtctctgtggattgacctgttctagacatgccacgtacctgaggccagacaacaggtgtgcttcctgcctgccttcctcccccagcggcacgtccccaaggctcacctgtgttgtagcctgtgtcagcgcctcattcctctttctggctgaatcatattccactgcagggatagaccacattttcatccagtcgtctgctgatggacatctgaggtgttttcaccttttggctcctgtgaacagagccgctgcsaatgtgcttgtacatgtttgaatccctgttttcaattcttttggcagtatgctgaagagcggagttactggatcgtatgggaattgtatgtttgacttttttttttcttttttttttttttgagacagagtcttgctctgtcgccaggctggagtgcagtggtgcaatctcagctccctgcaaccttcgcctcctgggttcaagcgattcccctgcctcaccttccggagtagctgggattacaggcacgcgccaccatgcctggctaattttttgtatttttagtagagatggagtttccaccacgtcagccaggatggtctggatctcctgacctcaggtgatctgcccgccttggcctcccaaactgttgggattacaggcatgagccaccgctcccggcctatgtttgactttttttttttcttatttttttctttctttctttatttttttttttttagagatggagtctcgctctgtcgcccaagctggagtgcggtggcgygatctcggctcactctaagctccgcctcccaggttcaccccattctcctgcctcagcttcccgaatagctgggactacagacgcccgccaccacgcccggctaatttttttttgtatttttagtagaggcggggtttcaccatgttagccgggatggtcttgatctcctgacctcgtgatctgcctgcctcggcctcccaaagggctgagatcacaggcgtgagccaccgcgcccagcatgtttggcttttaaagaaactgccaaaccgttttccacagtgcctgaactgtttcacattcccaccagcattgygccagggttccagtttccccacatccgctgcagcacttgctgttttctgttgttgttttttcttttctcttcttttttttttttttttttttaatagagatggggttttgtcatgttggccaggctggtcttgaactccgaccccaggtgatccgcccaccttagcctcccaaagtgctgggattacacgygtgagccatggcgcccggcctgttttctgttttttgattttggccatctcggtggtatgaaatggtagaaagattctttttacattgagttaaattctatctcctgcttcgatggccctgggtgtgggtttgtccctggctgtattacagttctgcatgtggtgagaccctccctttcctccttctccaaatggaccaccaagacctccccagaccgtgaggggagggtctttggctggagcacagggtggtgggatttcgtggaggcagtgtggtcagtgtggctgtccagggagtcaactccggttatcttctgtcagcccataaaagtccaagacgcctgcctgagtgcagaggcttcggtggtgaggtctttgctccatgctttggttacctgcctctaggtgcactacctaaagaatacacatccccgtccctgttttattgagttcaggccttggaagcagaggctctgagcgtaatgctctttcctggctttcttcttcgttgctgccctgtgttctttacggattccccggggttttcccatcaatagagagaggcaggcacttttgtcaccccagtttacagagcagggaaccgaggcacggcctggagctgaggccacacccacatcttgatcctgtactgtagggtgccatgtagtctcccagtgacaacacccgccccccgccccaccgccatccccctcctctgcctcctcctggccaggcctgcgagaagacccagctggagttcatgtcgsaacagtgcgccaggaccgacggccagccgctgcgctcctcccctggcggcgcctccttctaccactggggtgctgctgtaycacacagccaaggtggggcctgcggagtgtggggttgggggaggagccagccctggagaccctcggacagggcagagtcataggggggttggcctactatccctccagcactgggcaaagtggttcaggctctggcatcccacaraccatggatgacatagtggccaggcctcgctggtagatcaggcactgacatcccatctctgagtctcaatttcccatctgtgaaatggagataatagcagtaggtccctccctgggcgctacaaggattcagggagataatcggaaaatgccaagtgtgttccttggttcatgatactttttttgtgagacagagtcttgctctgtcgcccaggctggagtgcagkggcgtaatctcagctyactgtaacctccgcctctgggattcaagggattcttgcccctcagcctctcgaatagctgggactacaggcttgcactaccatgccggctaatttttttgtatttttagtagagatggggtttcgccatgttggctaggctggtttcaaactcctgacgtcaggtgatccgcctgcctcggcttcccaaagttctgggattacaggcatgaaccattgcgcccagccttggtycctaattcaataccattaattattagattagattaggatcgtgattaggattattgccttaggaggtgggatgtggggaagatagaaacccttgccccagatgcaaaggatgaagctgggtgggggctgggggacttgcccctcctgctcggttcaggacaccctttttcactctgccctcccaggggatgctctgtgcagacacatgtgccgggccattggcgagagcttcatcatgaagcgtggagacagcttcctcgatgggacccggtrtatgccaagtggcccccgggaggacgggaccctgagcctgtgtgtgtcgggcagctgcrgggtaggcgtgtgtggacattggcgatggccctggggcctacctgtcctatcggaaggctcctgggggcaggttggtgggtgctggccctgatggagctgcagtgccstctgcaggggagtggtgctggggaaaaggatctggacttggagtcagcctgggttaagggctgcagtgtgaccttgggcaagtcactgagccctctaagcttgcttcctgtgtagatggtggggtgctayagaagtgttgctggttttgtggatcccagaatctcagagctggcagggctgcagagtcattgaggccagcaccctccagtgacacgggccctctgtccttccctttgcatagacatttggctgtgatggtaggatggactcccagcaggtatgggacaggtgccaggtgtgtggtggggacaacagcacgtgcagcccacggaagggctctttcacagctggcagagcgagaggtaggcggcctccctcggggcagaggctgggcttcccccagcctccaagatggccacagcccagagcgttggtgcaggggctgctcaggtcacagggcctgcacactcactcagccctggatgcctcctgtggtgtcagcgtctccctcttccacttcgccacccttctgtggcaggctcaggttttggccttgatgctgctgggactgtggtgcctcagtaatggtcactcactgtagccgtgctgcaaaaaaaacacagacattggccgggcgctgtgctcacgcctgtactcccrgcactttgggaggctgaggcgggtggatcacctgtagtcgggagatcacctacagcctggccagtatggtgaaaccccatctctactaaaaatacaaaaattasctgggcatgatggcgggcgcctgtagtcctagctactcaggaggctgaggcaggagaattgcttgaacccaggaggcagaggttgcagtgagccgagatccctctgcactccagcccgggcaacagagtgagacactgtctcaaaaaaaaaaaaaaaaaaagtatggacgttgtgcattctgtggcagctaccctcttctctcctgctcaagaaatcccactgagagggacacaagtgaatgagagggwtggtagttacatttggaaaatctttgactttggtgtatatatgaggtcaaaaaccatttgcaaatgccagtgcttctatggagagcagagacttsagccctgcctccctctggcttgccccactgtgctggagaaccttggacccggtcccttctcccagccagggcagagccttggcaggtggtcctccagcctgcttttaattgcccccatgacaggggactcactgctgctggagccagccccatggcattgttcaatttttcccgaccagctaagatcagctccctttgtctgtggtgtggtggctgtgaggtccacgcatctctccttcttttcttctttctagaatatgtcacrtttctgacagttacccccaacctgaccagtgtctacattgccaaccacaggcctctcttcacacacttgggtgagttgactggaggactcccacccagttagctagactgcaaaggtgcagagcactgttgccaagatgccctcacttctgacatcacccgcaagttcagggggttccccaaaccaccctcaggcttgatagttgactaggaagactcccagagctcactsagagctgtggcacatggctgcggctccttccagaagaacacaggttagaattgtccaagggaagagatgtaggcagagtctgggagggtccaaccaggaggcctgatgtctcagggatgtgacacccttctagcattggagcgtggccatacgcatggagtattgcccacacagaaagcccactgagtgggagttgagagtttttcctggggtttgagtgcaaagacatgattgactaattggccaggtggatactctcagtctcttggtgacccagcccctaycctaaatcacatagttggtctttctggtacagccagcccctgccctaaaggaggacacttctgcctggtgtgacccgtgtttcctcttggaagccaacagcaaaagctggacttctctttgggcaaggcccgcttctttgctattgagggccacagtgggtctttctggagtgtgtctgcacctaacctttgaagccttggttgccggcacttgccatggggtccctgagccctgagcctgttgagttctgtgcgtgagtgcrcttggtcatagcactcaccaggttgtggaaagaggcctagagcctccgctgtggggaagcctctagctcagatgcctgtggctccttagaggagggctggggaccccgggaaggagagtcactgacatgtgcctgtgaggaggatgggtgctcagctccacacrgctaacagggctggttccycgacagcggtgaggatcggagggcgctatrtcgtggctgggaagatgagcatctcccctaacaccacctacscctccctcctggaggatggtcrtgtcgagtacagagtggccctcaccraggaccggctgccccgcctggaggagatccgcatctggggacccctccaggaagatgctgacatccaggtcagcaggagagcctgggggaggccagtgggggcttcttctygggggctatggctgcttgctcgtttgtctatccatccattccctgattcgttcatttattcattcagcggtcacttacaggggacccactatgtgttgggccctgtgctaggcaaaatgtagctagctcctccaggggcttagggtcccacaaatatccaaatgtgyctgtgcccagagcccgtgggagaaggccctgcagttctgggatcaggtaaggttggagggcccaatgcaggggtccagggctccctgggaaagagtgatggagctgaggtgtcagatgagcagatgttgctgggccaagcagggaaggaagcgtatggctgagggaacagtgtcagtgtgggagggatgaaggaaggtcctactgtgtgggtttgtggggagatgaaggcatggacgcaggtgcagtggcatctggggagtaggccttggtgctgaggaagctgagaacagatgctggctctcactgcttctttggtgcagtgtgtgtgggaaccggaaggccttgttcaggcgtgtcctcagtgacgtgtgctcgcccatgtatgtccccattggtgcttcgctgaggaaggcacgtggagggtggagagacataagcgcaggctgaaacagacctgagaaccttgggagaggggcccagtctcagcggccggagcagcgtcctctgcccctacagcagccagagacaggagggcctcccacagatcaggccaggccgggccaaagcaagcccctgtgagcggcttatcccttctcttcccctgatatggttcccttcctcccctccccttgcctgggacattgtatccagatgctagctgccgagtggctctcccatcatcctctgcagtgtgtaaaaaagcagattcccgggtcctctgcatattccctgaatcaggacttccctgtgttgggcctgagaaaccgcaccgtaaccaacacaggcttgcggcactggccagatgtgggcatcgagggggcaggtgcggaatgtcacctcgccctgggctctggcctycaggctggcctctttcttgggctggtcttgggcacaggacccagttaccctcctgaagagccttaggcccaggaacctgctgaagttcttcctagtgctctccgggccagtcccaagccagtagctggccacaggtccccagggatccagtttcttcctgccgaccctaccacaggtccccagggatccagtttcttcctgccgaccctacgggcctcagctctggctccagaagcactttctgtgctggccctgccctagcccttcttgggctccttagcccagcctaaggtgggcctgcctcctccactgcactttatcctctacccagccagcttagggaaccttctctgtgctgcccaaataccctatcrtgtaacccaccaatgacttggtaattacctccccgagccctctatcccaacccactgagagctccttgcagctcagccagtgtcctgtgcactgtgctatccccagagcctggtacaggtcagtgttggtgattgcttcccgttatttttgtctttgttgtttttttagagagggtctcactgttggccaggctggagtgctatgttgcccaggctgctctgaaactcctgggctcaagtgatctgcctgcctcaggctcccaaagttttgggtttacaggcatgagctaccgtgcctggccagtgattgcttgctgarcgaaagattatagggatgcaagaagaagttggaaggcttcccaggggaggtggccatgacagtgaccctcagggaacccactggacaaggcctgaagctctttgtctgcaggtttacaggcggtatggcgaggagtatggcaacctcacccgcccagacatcaccttcacctacttccagcctaagccacggcaggcctgggtgtgggccgctgtgcgtgggccctgctcggtgagctgtggggcaggtgagacctggggaaggctcatccacagcacggcttgcccctgcagggaggcggcctagccctccctcttccctcccagggctgcgctgggtaaactacagctgcctggaccaggccaggaaggagttggtggagactgtccagtgccaagggagccagcagccaccagcgtggccagaggcctgcgtgctcgaaccctgccctccctagtgagtgtggtgctgtctgcgcagctccaagggggagagagggttccgctggggctgctgggctctgtccctggcctatggggcccatgtggcagggccgggctgagctgctcctgtgcaggctctcattacccctgcccacagccctgcaaggggggctctgtgagtgcccccattctgcaggtgaggacactgaggcttggggcagacatggtgacaatgtcagcccagtgggacccacacctgctgccaccttgtctgggccaccgaggcctctcttgagctcaggtactcatggtgagatggaggtgattgcctacctggagggttgtagggagacttgcggagctcctggtgcaaagcccctggctgtcaccacacctgacggggcacactgttagggacgaggccattcctgctgggtgcaggacagggcagctgctcaccagcctgtgattcggttgtcctcaggctcagccgtctggcagcctgggaacacctggagaggctaggctggccgtagtgcccattgcttgtcccagaccgggggagtacatcagcacctgccaccccatcaccccaggccagcctgggacctggccagggtcccgacgctctgtctccttcctcagctgggcggtgggagacttcggcccatgcagcgcctcctgtgggggyggcctgcgggagcggccagtgcgctgcgtggaggcccagggcagcctcctgaagacattgcccccagcccggtgcagagcaggggcccagcagccagctgtggcgctggaaacctgcaacccccagccctgccctgccaggtgagcccagggctaggtggggctgggagagggccttcctggcagagctcgtccctgcgctgagcccccatccttctgagaatcccctcctcctgaggcctccggcggggcctcaccatccagggtgatgggcagtgtcacctggcggttgtaagtgctgctgtcagagttccttactacccaggagagcctgggcccattgtttccctctctgagcttccgagcccctgctctgaaatggggatgccgacctgcctggggagggggggcttcgaggatgaggtcaaactgaacggagtgggagatgtcactttctcatcaccaccatctcccccgtgcccacgtggctgcatctcatcccctcagtgtccaagttgacagtggcttatcatcctgccctgccactaacgagctgagtgacagggcaagtcccctcctctgtgggcttcagttttgcgacctgtccggtgggaggggattggtctggattgttggtggcccactcatagctctggactcctttccccgcctcgtcatccgtggcagacaaaacagtcaccactcttccccgctgaggccagatagggcctcagaatccttctcacacagctctccaggcagccactttagcgcagggctgactcacagctgaaacccattggccacccttgaacctggtgatccaattccatgtggcacctgtttctctgcacctgctatggtgcatggagtcagtgattacctggctggaggtcggcctctgcctctggagagtaggagggatgggttctcttttttttttttattaaaagacagagtcttgttctctcacccaggctggtatgcagtggcatgatcttggctcactgcaacctcctgcctcagcaagtgtgcgccaccaagcccaactaatttttgtattttttgtagaaacagggttttgccatgttgcccaggctggtctccaactcccgggctcaagcagtctgctcacctcagcctcctaaagtgctgagctaccgtgcctggccagggataggttctgtctctgcaccctgggtgcaggtggggtgcctgactgttgmgcagcgagtgcttgttgaatgggaacctgctggctgatgaatggggaacccggtgcttcagggagagaccctgwgcttcacttctctgtggggctcctctttgggctcctggatgttggggagcaggtccccttcctccctgcccctagcagctgggctataccttcccctgggtggcagaggcagggcctgatgactgtctcatgccatcctcaggtgggaggtgtcagagcccagctcatgcacatcagctggtggagcaggcctggccttggagaacgagacctgtrtgccaggggcagatggcctggaggctccagtgactgaggggcctggctccgtagatgagaagctgcctgcccctgagccctgtgtcgggatgtcatgtcctccaggctggggccatgtgagtgccctgggcatgagggtggctggggctgttgagtcctttacctggctgggagaacraggagcacccattgccaccgtcctccaggccagagcaagaacaccatccttctgtgggaatgctgtctgagggccacccctgctcagaaaagaagcttagaaagagggctcagggcccctgggaaggctcccattccccttgcaagccgggctgagggaagcatctgaggagagtgtaatgcagctgctgtgcagagaaatgctgccaggctcccgcctggcgtccaggggctggaggctgactggccttgctctctggcctgggtgctggcaaccctcgcccctcatggctggggggattgcagggccaggcatgctcccatgtcccactcttggtccccagctctcggccaggcccacagtgagcactcatgctgctgaggagcctgcaaaggtggggtgtgcagcaaggatacccgctgcgagaccggggagccgatctcgccaagggaggaggggagggagcccctggtgcacacacgccacttcctggtctctctgctgctgcctgagaagatcgagacggggatcgctgggtcctcagaggaggcccagacccaccagcttgttgctattccccacagctggatgccacctctgcaggggagaaggctccctccccatggggcagcatcaggacgggggctcaagctgcacacgtgtggacccctgyggcagggtcgtgctccgtctcctgcgggcgaggtgagggcccccgggatgctcctggggaccagcactcatggtaactctcctgtccacttgcatcttgcctcgttctraaaagcatttgaggtggattgcagaaaatccagactatatgggaacacgtggtaatacacaaggagactaagcatagtagctgacagccacttcaaatgtgggtgttgattggctgaaaggtaggaaaagacaataacgccyggcagtgtggcacgagagccattccttatggtcctagcagagcggccggggggtccccaattgatgacccgagcagagaaaccttagctttaagatacacagcgttcttctattttcccaatcttgttttattgcagtataacacagatattataaaatttaccatccaaactgtttctccctgtgcaggtcagtggcataaaagcacagtcacattgttgtgcggccatcrccaccaacctctccagaacttttccagtttcgcaaactggagctctgtccctgtgaaacacgaactcccatttccccctccgcagcccctggcaacctccattctcctttctgtctccagattccacaattctagggaccttgtagaagtggaatcatatagcatttgcctttttgttactagttttcactcagcatgatgtcctcacagttcatccatgttgtagcatgtgtgagtgtttccttcttaaggctgaaaaagattccattgtgagtgtatcctttacakgtttatccatttattcatcagtggacacttggcttccttccacactttggctattgtgaataatgcttctgtgaacatgggtgtgcaaatatctgtttgagttcctgctttcagttcttttgggtgtatatctagaagtgtggtagctgggtaagatgagaattctatgtttaatttttgtggaactgctggactgttttccccagtggctgcaccattttacatttccactaatggtgcataagagttccaatgtcctcccatccttgccaacactttttatttctatggttttttttgtttttgtttttgtttttgagacagagtctcattctgttgccgaggctggagtgcagtggcatgatcttggctcattgtaaccttcgcctccggggctcaagtgattctcgtgcttcagcctcccgagtagctaggactacaggcgtctgccaccatgcctggctaattttttgtttagtagagatggggtttcaccatgttggccaggctggtcccaaactcttgacctcaggtgatctgcctgccttggcctcccaacgtgctgggattacaggcgtgagcccccacacctggcctatttctgtgttttttttataatggccatcctaatgggcttgagaagacacaccatgttcttaaacgaaaaccctgaccacttgctcagtaaaatgtcagcctgtttaaaaccgagaccaaaaagagatttctttttctcycttttcttttttgagacaaaaaagaaaacctctgtcaccrggttggagtgtagtggcacaatcttagctcactacaacctccaccacctgggctgaagccatcctcccccctcagcctcctgaatagctactataccctgctaatttttgtagttttggcagagatgggatctccctatgttgcccagcctgatctcctgagctcaagcgatccttctgcctcggcctctcaaagtgctgggattataggcatgagccactgtgcccaaccaagagattttttttctttttcttttttttcttttttttgagactaagagttttcctctgtcgcccaggctgaagtgcagtggtgtgatcttggctcactgcaacctccgcctcccatgttcaaacgattctcatgcctcagcctcctgagcagctgggactccagctatgtgccaccacacctggctaattttttgtattttattttatyagagagggggtttcgccatgatggccacgctggtctcaaactcctgacctcaggtgatccacccgccttggcctcccaaagtgctgggattacaggcatgagccactgagcctatttcttttgaggatattcctaaaagagagacttgagaaaactggccctaataacatctttatgatagacacaatcagagattttcatattgtgatttttttttcttttttytttttttgagatggagtctcgctctgtcacccaggctggagtccagtggcgcagtcttggctcactgcaacctctgcctcctgggttcaagtgattctccgtctcagcctcctgagtagctgggattacaggtgcgcaccaccacgctcagctaatttttgtatttttagtagagacggggtttcaccatgttggtcaggctcgtctcgaactcctgaccttgtgatccgccgcccaaagtgctgtgattacaggcgtgagccactgtgcctggcccatattgcaattcttataatgcctctcggtcaacaataacagctaccatttgtcaagtgtctactgtgtgccaggcacttgttatcttcccttttaaaaatctttataaatgattctgcaaggtagatgccattatctttttttctaaatctaagattcagagggttaagtcagttgtctgaggtcacacagctggtaagtggcagagccgggattgaaacccatgcgggccttatgtgctagaggtgtccagtgagcctgggctgcagtccttgctgagcctgtcccttggggctctgggtctctgctttgtccacgcaggtctgatggagctgcgtttcctgtgcatggactctgccctcagggtgcctgtccaggaagagctgtgtggcctggcaagcaagcctgggagccggcgggaggtctgccaggctgtcccgkgccctgctcggtgagtgaggggagcaagactgtgtgctggccttctccctgtaagtgggagaccygagccttggctccatgcccggtgacctgcggaggggggcaggtgctgctggctgtgcactgtgtgaggctggaccatggccgccccatccccctgcctcactccaagtgcaggccagagccccggcccagcccctttgaggactgcaacccagagccctgccctgccaggtgggccccttcccaaggagacagggggtgctaggtctgcatcctggctctttcctcacctccaagccagaccttttgaccctcagtgtcctcaccagtgggagcaggtcattttgtgcccccagaagactgggggagtttaatgaaaggattagatgcatgtaaagtacatgctaaatgcaatgagtgtaaaatgcatgctcgatgcaacgcgtgtaaagtacattgcacaggatctgggatgctgtgggtgcacatggttgctggtgcgtttcttcatcgcctgctctttatggagcamctaggccccggggccgtcctggagctaggggacacagcagagaacaaggcagacaaatgtccctgacctcctggagcaaatgcagggggaaagggggacagataataataggacaggyggggaatgcagtttgatggatggtgttcagtgcgatgcagccaaacacagcgggaggggaggaggggagggctggcggggtgggctccagggcggtggtgctgggatcactgttgaagacagacatgcagggcccttgggtgcccggacccctgcccccactgtctctgggatacgacatctgtsgtttgccctcacctttctcttctgtaaaatgggtttgtccaaatgttctgtccactctgccaagcctcttggtgaggacacaagggggcctccagaaagagaacctctccgggcccttcccagcttcctgtctcttcctagtctggggaaatgaaggggagacctggctcccctgggttcccaggccctggggctgtttggggtccctgactccagtttgctccaggtggcagtacaagctggcggcctgcagcgtgagctgtgggagaggggtygtgcggaggatcctgtattgtgcccgggcccatggggaggacgatggtgaggagatcctgttggacacccagtgccaggggctgcctcgcccggaaccccaggaggcctgcagcctggagccctgcccacctaggtgagtcagccggtgatgggaggggcagctcctggtgtgtgcagatgccaggccaggcgctgtggtgtgtgcctgtaatcgcagctacttggaaagctgaatcaggagaaccacttgagtccaggagtgcaagtccaacctgggcaacacagtgagacctcatctctaaaaaaaaaacaagacggggccaggtgtggtggctcacgcctgtaatcccagcgctatggaaggctgaagcgggtggattacctgaggtcaggagcttgagaccagcctggccaacatggtgaaaccccatctttactaaaaatacaacaattaggctgggcgcggtggctcactcctgtaatcccagcactttgggaggctgaggcgggcagatcacctgaggttgggagttcgagaccagcctgtccaacatacagaaaccctgtctctactaaaaatacaaaattagccgggtgtggtggtacatgcctgtaatcccagttacttgggaggctgaggcagaatcgcttgaaccggggaggccaaggttgtggtgagccaagattacgccactggactccagcctggctaacagcagcaaaactccatctcaaaaaaaaaaaaaaaaaaagaaaacccacaaaaattagcctggcgtggtggtgtgcacctgtcatcccagctacttcagaggcggaggcaggagaatcgcttgaacccgggaggcggaggttgcagtgagccgagatggcgccgctggcactccagcctgggctacagagcgagactccgtctcaaaaacaaaacaacaaaacaaaacaagacggggtggggggctcagtggcccaagarccagtctgtaaggaatagggctacctggcaggctgtgctagttgtgggaggtgaagtttaagcaccatgcaggcagggtgcagtgtggggaggcctgggggacagaggaggcagcatttgagcagaacctaaagctgtgagcaccagcattctgatgtggaagacgggagggatggaggtctccacagggacacacacagccacactaggacacgggacagaatcatgttcaagtccgtggggtccggagcccagtggtaaagggcgaacatttgcctacctcatttacaattctttaatggtttctttttgtaggtttgcatttttagtaaagaaatacttttctatatcatacagaaacgtccagaaaagaatgtaacagacatgtatgttccagcactccagtttaatagatagcatcctactgccatgtttccttcmtgtccacttacttttatttatttaatttatttattttgagacggagtctcgctttgttgcccaggcagtgatgcaatcttggctcactgcaacctccgcctcccgggttcaagccattctcctgtctcagcctcccaartagctgggaatacaggcacccacaaccacacccagctaacttttgtatttttagtagagacagggtttcaccatattggtcaggccgatcttgaactcctgacctcaggagatctgcctacctcagcattccaaagtgctgggattacagatgtgagccatcacacctggccagcctccttagttttaaataaatccagttacagataagatttcacttaaatttaggctggtcatggctcacgcctgtaatctcagcacttcaggaggctgagatgggtggatcatttgagcccaggagtttgagaccagcctggacaacatgccaaaaccttgtctctactataaatacaaaaattagccgggcatggtggtgcatgccagtatccccagctactcgggaggctgaggcaggagaatcacctgaaccttgggaggtcaaggctgcagtgagcagagatcacaccaccactgcatgccagcctgggcaacagcatgagaccctgtctcaaaaaaaaaaaaaaaaaaaaaaagattttacttaaatttaaaccctgtactaatctgtgatttatttggagtatgttgcaaagtagggaccaaaggatttttttttttttctaaattgttaactagcatctgttggacaagccctgatgcctccaggtggctccttggtggtattggtgtgtgttagaatctatgtctgggctttctactgggtttttttcttctccttttttttttttgagacagtttttctctgtcacccagggtggggtgcagtggcgcgatctcagctcactgcaacctccgcctcctgggttcaagtgattttcatgcctcagcttcccgagtagctgggattacaggtgcccgccaccacccccaactgattttgtgtttttaatagagacagggtttcactatgttggccaggctggtcttgaactcctgacctcaagtgatctgccaggttctgttttttgtgctttttttttctagctattctcttgcccatacaaaattgttttaaatgttgtagctttataaccatttaacatctgtgtcactagtgtgtcctgatttctttgcctatgctaaagtcccttggctgtgtgtcccatttatttttccacatcacatttagagatgatctgggattttatgggaattgcagggtttttcacactgcacgctgcctgcatggtgcttaaacttcacctcccacacctagcacagcctaccaggtagccctgttctctacagaccacctcttgggccactgagcctcccctcacttttttttagagatggggtctcactatgttgcccagtctggacttgaattcctgggctcaagtgatcctcctgcttcagcctcccgagtagctgggatgcaggcacacactacatgagctctggccatccctctgacgttgctgtagccacgctggcctcattgtcctggaacattccagggatactcccctgacttagggcttctgtgctagctctcgctgcctgatgtcttctgtggatatcctcgaggccctggatatccctcccccaggctcggctcagacaccacaactccaaagtggcccagtgccctccctgagcgtcggtccagaacggcactctcgtccctcctgtgacgctctgcttggcactttgggaggctgaggcgggaggattgcttgagcccaggagttctagaccagcctgggcaacatagtgagaccccgtctctacaaaaaatacaaaaattggctgtgcgcggtggcttatgcctgtaatcccagcactttgggaggcgaaggcgggcagatcacgaggtcaggagatcgagaccatcctggctaacacggtgaaaccctgtctctactaaaaatacaaaaaattagctgggtgtagtggtgggtgcctgtagtcccagctacttgggaggctgaggcaggagaatgacgtgaacccaggaggcggagcttgcagtgagctgagattgtgctactgcactccagcctgggtggttgcagtgagctgagattgtgccactgcactccagcctgggcgatgagtgagactccatctcaaaaacaaaaacaaacaaacaaaaattacaaaaattagccaggcatgatggcacatgcctgtagtctcagctacttgggaggctgaggtgagaggatggcttgaaccctggaggttgaggctgcagtgagccgtgatcacaccactgccctccagcctgggtgacagggcgagaccgtgtctcaaagaaaaccattaaaataaaataaaaaataaaatttctgcgatgcacacgacagcctccacagcaaatcagcatccagttgctcatgccagtgatgccccaatggagaacaatccacgctctgagaggaggtggggtctggtttggttcactgccacctcccagtgtcatgtagaacagtgccaagccgcggaaggcacgggtccaagaggcagcgctgcagggtcatgggggagcacagtattgcgatgaagatcccagctcccttgcaggctgcctgggttygtgtctgggctctgaagaatgcgggccataattagttattgattgattacagatcaacatgggcagccttcccttgcccaagggaagggaactcggccttcccttgcagaacgtggggtgttgagatctgtctcctgttacccaggggctcgcttcctgttgctgttacttgggtccataggcaacccctggggtgctgacaggtgttctgtgataaaggcgactagagggggatgtgcaattagggaaacaggggcctcttccccctagggccttttggtagctctcctgtggccgtgagccctggccccagacaggaggggctcagtggctgcactttccatcttgcctggccacggaagctgtctaggcaactgtccgagtacacgtgggtggagaggggcctgcgtggggcagtacygtctctrgggagacctagcctctctctggggtcttctcttcctgcaggtggaaagtcatgtcccttggcccatgttcggccagctgtggccttggcactrctagacgctcrgtggcctgtgtgcagctcgaccaaggccaggacgtggaggtggacgaggcggcctgtgcggcgctggtgcrgcccgaggccagtgtcccctgtctcattgccgactgcacctaccgctggcatgttggcacctggatggaggtgagcacagcgggcactcggaatccctatggggctggggtgggcatcagctgtggctcctcatgtgtgagggagtctaggaggcattggctcatcgtgtcccctgaaaggaaggagagagctgcgcccgttggtgagggggcacctagaggcagagagacagagggcctagagacctgcgggcagctaggacttaagaggcccttaggtttggggacgctggaagatgaatggcaggccactcagctctacacagatgagggaatgccagctgtgccacgcacctggcaaggcaggacagacaagggtaaatggggttcaggctgccccctggaggggctcgctcatggtgtggagggggcataggggcacagcagacagagatgagcygcagccccgcagacctgcttgctctaaggcttggagggacagagaggccgtgagggtgacagggacccagacttgaattatggctcctcccacctatatgacccatgcaaggtgccctctctgagcctcagttttctcatctgtggaatggagacacttaactgcctcccagcttgtacaaggattatattggatcactcctggcctgtggttaccactgtccttgtcaccttctggcagggtcagctgtgactcctcctcccctctcttggcagtgctctgtttcctgtggggatggcatccagcgccggcgtgacacctgcctcggaccccaggcccaggcgcctgtgccagctgatttctgccagcacttgcccaagccggtgactgtgcgtggctgctgggctgggccctgtgtgggacagggtacgcccagcctggtgccccacgaagaagccgctgctccaggacggaccacagccacccctgctggtgcctccctggagtggtcccaggcccggggcctgctcttctccccggctccccagcctcggcggctcctgcccgggccccaggaaaactcagtgcagtccagttatgtcctgtcctccttcctgtcaggcagctgctgcaggaggggtgggcaaaggcatcttcctctgggaaggactggcacaagcacttggtccctgggttgtgtgcctgggaggccggratcagggctggccctctttctccctggcaaagcaaaacctcccttttactactatcaaggggaagtaacttgaaggtaggaacccagcttgtgagccccctagcctctgggctgctctgcatgtgccccctcttgctggatcatctggtagcagccctgtgccctgagggtgatgctctgacctatgcagcccccctccctgtcctgagaaggcttccagctgggccttggaggacagggtccacccctacctcctggtctccttcctcagcttggaagccccggagcctgccctgctgggaatcggggaagcactgcttacctgtctcctgctcccttttcaggtgcctgtggcaggcagcaccttgagccaacaggaaccattgacatgcgaggcccagggcaggcagactrtgcagtggccattgggcggcccctcggggaggtggtgaccctccgcgtccttgagagttctctcaactgcagtgcgggtatgtctagggccatgcaagcgatgctgccagttatgggccctgccaggagccagcacgacgctgcatgccccattcctggcaggagcccatgtgcattcccacctgtagtttgcatcccatctcatgactggggagtgatgatctgcattttacagatgaggaaactgaggctaggagagattaagtgatgtgcccagttacttagagtcacatagccagcagtgggagaggtgggacttgaactcggctcagtctaccctggagccactcctctgctgaccaggcgtgggagtgctggaccctcactgccctgccgcttcctaggggacatgttgctgctttggggccggctcacctggaggaagatgtgcaggaagctgttggacatgactttcagctccaagaccaacacgctggtggtgaggcagcgctgcgggcggccaggaggtggggtgctgctgcggtatgggagccagcttgctcctgaaaccttctacagaggtatggccaggccttctccacctcccttgggtgctccagtcctggcagggaggctgggtgggtgctgctggggatggggccagtcccagtggggcagtgggaagatacggagggaactgactgagatggaaggaactggggttggccagtgtcagtctgcacgtgccagggaggggtcacaggatgaatgctatatccctcctttttgggaccgtgcagcaagatggacggatgtgggacatggtccacatcctcagtcagtccctcaggcctctgccccacacccacctgccccgcccccacccctccagcctttcaagggcttttagggttttgtggaagccactgtccctcagccctgtttcagtgcactggtgtaagcagacatgcttgtacatgcatgtgcacccacaagcacacctcaggcagaggatgccacctcagggactccagccttgcccgtggccccctcgatatcctctgatagccctctcggttgtcctggggggcttgccctctcccaacagcccgagctggccgaagttggcttccctagctggttccagaggttcctcggctcccccaggtgtctggggcttagtggcaacaggggcttagcctctgcagagacctagtgcgccgcctccttgccccagacctgcccgggcagagagccgtgtatgtgtcycagtgcacaggcgctgctgggccctgccaaaaggccacaagcccactgtcaccgttcacattgcttctcgcttcccggcccagccccgcccacacaggcatctgccttgaaagaggtgcaggaggtacaggcaggtgggggctccagtgagctctgaggaacagcagtggccgccatgggtggagcctatctttgttgccagtttcagtgttaaacactcttgcacgtgtgacatcattgagtcctaaagaccactctgctcagtgcatgccattgtttccttcagttacagaggagggaaccagagcccagaacatttagcctttgcctaaagtcactgggccaggaagtggtagaggtggggttcagcaggatttgcctgggaaccccaatattgaccacagtgccatgctgccctgcacggctccctggctgtgagttgtcctggcctctggcaccaccggtctgtctgggttcctatgtccctatgtcccacctgcagaatgtgacatgcagctctttgggccctggggtgaaatcgtgagcccctcgctgagtccagccacgagtaatgcagggggctgccggctcttcattaatgtggctccgcacgcayggattgccatccatgccctggccaccaacatgggcgctgggaccgagggagccaatgccagctacatcttggtgaggcccagcatggggacttgtgctgtgaytctggacagctttccctagggcgtgcagggctaggggacccccttcagtttatttcagactaaaaccctcaaaatcattagtgaaagaatgggagaagatagcttcctccacatattcaccaagaaatgttttttgagctacctacaagagtgaaatagtggctcacaactgtaatcccagcactttgggaggcccaggagggcagatcactcaaggtcaggagttcgagaccagcctggccaacatgatgaaaccttgtctctactaaaaatagaaaaagtagccaggcatggtggcgtgtgcctgtaatcccagctacttgggaggctgaggcacaagaatcacttgaacccgggaggtggaggttgcactaagcccagatmgcaccactgcactccagcctgggcaacagagtgagactctgtctcaaaaaaaaaaaaaaaaaaaaaaaaaaaaagcgaaatggtaaagaatggtaaagacctttctgatgtagactgacagctaacccaggactgaagcataattttacagtctgatataacttggacagaatagcaccctgcaccctccccgaggtttcatgtgtcctgggagaactgtgttctgcagggtatcagcttccccagaggaggcagcctggccccgctctggcaccctgactgtgtgtccttggggaagtgatgtaacgtccctggacctcggttttctgggtagagtaatggcgtattcctagtagggctttgtaagcattaaatgtgatccggaatctgtgagcccttgcacacgaaggcttccgtgagtgctaattattacttgtggccggtccttctgggctgccccttttctctcagatccgggacacccacagcttgaggaccacagcgttccatgggcagcaggtgctctactgggagtcagagagcagccaggctgagatggagttcagcgagggcttcctgaaggctcaggccagcctgcggggccagtactggacmctccaatcatgggtaccggagatgcaggaccctcagtcctggaagggaaaggaaggaacctgagggtcattgaacatttgttccgtgtctggccagccctggagggttgacccctggtctcagtgctttccaattcgaactttttccaatcttaggtatctactttagagtcttctccaatgtccaaaaggctagggggytggaggtggggactctggaaaagcagccccyatttcctcgggtaccaataaataaaacatgcaggctgaccggcgtttttttcttataagctgtccagacctggcttgaaaacccatcccatggcaaggcagggattcgctggccgcggttggctctatcttgatctgagcaagccgctggacgtccctagttatcttcttcctatccaggaagaaaatccaatcaggattccactccgaggatggcgcattagccagctccctgcgaagccccacccgtgtgtcctggtgtgaggctctgaccgctaaggtgtctgcgcgcctccaggccccgccccctatgctaataagcgcccgcctcctttgggagcaagtcgccgcaaactgcgagcccccgccccctacgctaatgacgcccgcccccctcgggcacacctctccgatgcctgcgagccccgccccgtatgctaacgagctccccacccccagctcctcgccgcagcctgcgggtcccgccccctacaataatgagcacctacctcccctcaaacgcccctagtcgcggcatgagggtcccgctcactatgttaatgagcacccgcctcccttcgggcgcgcctcgccgcagcctgaaagccccgccccctatgctaatatgctccctctcccacaaggcagcgcgccggctcggacgcggccggctaccgagccctttgtgagggctgtgagctgcgcctgacggtggcaccatgagcagctcaggtggggcgcccggggcgtccgccagctctgcgccgcccgcgcaggaagagggcatgacgtggtggtaccgctggctgtgtcgcctgtctggggtgctgggggcagtctgtgagtatccagtcggggagaggggccggccccgccgcgcatgcgctcctcgccctgccctgccccgccccgccccggcggccccaggggaaaggacccgctgggggtcgggggtctgccgggcgcctcccggggcggaggaatggcggggccgccgggagccggcgtcctggggttgccatggttacccgctcgggcctgggcgccttggtaccccgggctgggctgggctggcgcttctgggaacattcccggagggaccagaaaccccagggcgggggggcggcgggggcgggggggcggcgggggcgggggggcggcgggggcgggggcggggggtggggcaccggcctggggcacgtgactgagccctccccccgctccccaggggcttttgtgagactttctcggtgatgctcacggggcgcatgcccacctggcccgtactaaagcgtcaactgttgacttgggcgtaggtgacggcagccacattgctaacctttgggcaaggattgtttgtaagggaggcgggtgcacggctggctagatttctggcaggaagccactgggcggaagtttgctgagggtcaggtggtgtcagggcacaggtggcccctggggccgcggggcagtgagctgagggcccggcctctccctgggtcctctgtccgctctcatatctcccccgttgctgctgccttagccgcctgtcaccggccttcctccccttctccgcacgcatcccagtcacagaccctgaccttaggctgccagggaagctaggctcttaagcacagccagaaaaggacaaagagggaggcaggtcagctccaggagtgaatggaagccgtacagctggccttccagggaaagacaagtctgtctgagtgataccctttcctttcctgtctgccctcaatcttgtggattactggagtgggcaaggtcttagagaatgtctgtcgaggatgtctgcagggtttaaacagtgcctgcctggcagagagggctagctctgggcctgggcagggcaggccccatcagcaatcctgccagaaggaccaccttttcagggtcaccttgggttccacagcctttccaggtgggtagagggtggagggaggttgaggcaggagggtgctgggctaggagtgtgctgccctcgctaggcatgcccttatccagaggcaacggatacggtagggcaggccctacccccaaatcacaaaaaggccccgagtttgtgtcactgctcttcagggcaagtacgcttttgactttgtaggagagactggtgggtttgaagttaggcattggatccagtcctgtcatgtctggttagctgttttccctgcagattagggtgggcagtgcagtggggtgacatggtcagtggtgagaaaggaaaggtcctgactatggcctgtaggccacacctccttccttcttggtcagtggccctgccgactcccagatttgctgtggagtcttactcagttctgtgcctctcaaagtgaggtacctctgcctttcctgggagttcctggggctctgttgggtctacagatgaagcttcaggagaaacttgtggcattgccctgagttgtcagttgcatctgcagatttttgggggcatggttatgtgaacatcaaaatgctgtattacagggtagaatgcaaaaatgcagggtgttttagagatgcggcaggagttcagacaagggttgtgtgccgggctggtccttgggtaaggttttcctcctccagggtgaggggatcagagagagtacctggagagggtctaccctgggtcctaagagcatctggaggtgataccttgggaggggacaggattgcatggtgacagccccctcacgtggaagatatcagcattgaggcccccaagtggacatcctccagccctttattgctaaaggattcctggctggagcctgctggtctggcttgacacctggtcctcccccaaggctggctgtgggttggacagctggggtagggttggagctggaggccaaatgctgactgcagcaggaagcacagccgagctgtcaggtgaggccaggcacagcagagaggcagggagccgtgtcaccctttgggcactctgctaggacaggcaggcccctgtgtacctgtggttctggaacaccttgctgtctgaaggcagatgtctaaggctgtgctgaggagcagtgcaacgcttgagtcctttgttttagaaggagaccctgggggcccatgaagcagtcccattgcagttcggctcactttatctggcttctttgcctgctgtctgcataaggttacctgggaaaatggaaaacagcagaattccagacccaggtggagggatcaggtgcagaggagctgctgcaagtttaatgagctgggtgctaattgctgcctccaaggcccccctcagtgatggcctgggcttgctccctgcccagcagccacctccttggacctgccttgaaggctcctggagttcctggtgaagccaggctgcaggctgtgggtggaggagggagttgggtgcaagagaccctgctggtgaggtgcagctgggaggcggggcgtcaaggctgcacatctgagcatcagagaagccacgttctggggtggaaaacgatgccccctccccttcctggccttatggcatttcagcggtgggtggctgggctgtgggacttgctcatgtgcaagaggagaaacgggtctaggaagatgaagatagcgtgccagtggcacagggctggtgaggaagttagagctggaactgctgctcagtcttacctggttcccatctctgttctgagagaggcaccccttgtcccaaccaaaatccaagccacattttctgagtcagaggacttcttgtgtggccggccctgtgaatggtggcaagtgacccttaccgaaggctgagtcttgggggagcactggcctgaatccttgagggacattcactctttaatccttctttaatcctaacctccctttgaggtggatattgatgtagctggggtcagagggccagctcctctgagccctgaaacggggagaggatgctgtgagatccacctgccaccttgctgccaccttgctgtggggcctggggcaagcaaggcactgcacctctctgcgtctcctcacctgtctcagacgatagagggcaggcttctgggtgctgtgagaactgtgtgctgagcatccgcagagactctcgtcctttccagtcatctcccaaggccgccttcccagcgggctccgcctgcctccctgctgactcctgcccgtgtctcttgtttcaagcttgcgcgatctctggcctcttcaactgcatcaccatccaccctctgaacatcgcggccggcgtgtggatgatgtgagtaatgcatggccgtcccaccccgggggtcttgctggtcgggaatctgctgggcacctcccgggacagaggagtggcaggggccgtgggagtgggcatccttgtggttgccatggctactggctccagcctgggtgcctcgggcatgtgagtttctggccacagcatgcggcttcttccccttcatacccccaccatgtttagtttcctaatgagaggtcaaggcccagggaatgcccaccccggccttcatccggtgcaggggcaaggccatcagtgctccagacatttctggagcatccactgagactgcagatgccaagtccactatactggggccctcgccctctgggagctcccaggactggggtggggaaggctgttcattggggctggctgaggactgggttgaatggtctgctgggagagggcactcgagctcggagctgtgccaaagatagatgggagaggcgggtcggagttgtcacgggaacccgtggtcagaacaccctcatgtgcgttccatgcccacctcctgccagggtttcgccatcccatcggaagggaaggcggggtgagggcaggcccgtgtggcttggggcacgtgagaagtggcggtgcaccaggaattgatgagtgtcctcatggggcttggtgccttgaggggtacagagctagacgagattcaggtcccgtccccagtgacctatggccagtggagagcctcgggggcctgctgtggtggggtcctcagtgcttgtgctggccagtggtggatagggaagggggatggacagagaggcgcccagcccagcttcagggggtggagtcggagcctggccgagtttgaagtggaagggctggcccagcacagagtgagcccgtgcttggaggcctggtgtgtgggaggctcggggcgggtgcagtggttaagagttgtgaagagagtgcctgccccgggcttggggtggctcttaggtgtcctgagcctgcatttctgttacacaggcataatgatggcacttttctcccaggcctggggacagaagggcctggctcagtgtctgctaactgattgttatccatgcatagagaataccaagaccacagcagacaccttccgtcaccagtggcttagctgttcccaccccaaacatagggctggatgcaaggacttgctaaagttcttcctccccagcgtgggcttcccctgggtgtccccgggcctggggccggtggcatcaggtgtgtgggcagctctccgtgactgtttcgggactgcgtggctccagctctctgcctccctggtggggcagccttcctggtgctggtgccactgacggcttttggtggccatggcgataatactaacagcagacagaggacacagctgccagtgctccatctgtggatgaacctgccgcagcgttgtagcagtgccatgatgtggggtcccctttcctccatgtcacacaggaggaggataaagggaagcagaagcccaggggcttccctctaggagtgttcagttcagctggggagatgggtgtgcaggagcagctggggagtgctggagtcttcagcagaggctctccgaggggtacgagcaggtgccctggagcagccgggcggcttcccagaggaggagggatgagggcaggagggtgagggaggtggcattccttatggcactggcactgggggccgccctcatcctcctgggattgtcagtcgctgctcttctcctgccctggtccctgcagcatgaatgccttcatcttgttgctgtgtgaggcgcccttctgctgcc

SEQ ID NO: 97331 - DNA, 19709 bp, Homo sapiens
  misc_feature (1)...(19709): n = A,T,C or G
agcagagccctggcttctgctggccagcttgccccttttggtgggacttttagtcactgccttgacctcaggtgggagctctcattatcagtcatctgttgggcttgctgttgacacctgactgcccttgtgaagctacctgagaccgcctcctgacatatggaggaaagtcttattttgagtcctgggtgtcacccttttttcaggtatagtaaacttatcctccacagggcccaaggccctgtggctgagggcagataatgtaggtctcaccgtgagggtggtcgtttgaaaaagtgccctgaatgatttgtctgctctctccctagaatatgccctacagagataggtatattcagccacattttccattcagggtagcaaacagtatgccagatttggcttgcagatggggttttggcccacatattttttaaaatttcacataaaatattcattgaggagtccagatttttagcctctcttgtaaagttggactctggcagtgcagatccacattcccacatggcatcaaagttcccctttgaagagcacgccctttgcctttctccttcacttgtctggccctggtgggctgtgtagtctgccaccctcaggggattcgttttccagccaaaccttgctcggccactgttcttatctccatgcagcccaatggaactgaaaaatctggagtataggccagtgaaggtcagggggtgctttgaccattccaaggagctgtatatgatgccccggaccatggtggaccctgtccgggaggcccgggagggcggcctcatctcctcctcaactcagagtggggcctatgtggtcactcccttccactgcaccgacctggggtgagtaggacatgtgggagctggctgtcctggcagaggcagtcagggtatactaatttacatcactatttccttcacaatccccaaccttggtaggaccctggggaacccaagatacccaggagattcaattccttgcatagtttaagtccctaattgtgacattgacttaatcttctcagccagctcatttatgactggataatttctgtatgttgacctctgaagggaaaggagggattcgtgaaacaggggccctgcctctggagaactgtctagttgcccacacattagatgatggcaagctatgaggggccagcaagaggacttcaagagaaaggaccccagccctaccttgagggagtggaggcaggggtggctccctagagggctatttgggagttaagagatgggaagaacattccaggcaaagcaaatgacaggtacaggagcacctgtgtgattaactagggaactggaggattcacgtaaaaatgaaaatacctggggctcttgttaacccatgggttcctgttttagggctgggatggggcccaagtactcatctccagcaggctggggtgccagggctgctcctcacggctgccttggttaggaggagggattggagacagctcttgccatagttcaggggagaggtgtggggtctaaactctggcgtggcagcgttgctcaccagttgcacgttgtagtaggtagaccacaagaagcagagatagaaggggaaagccacactggtaaaaaggtagtgatggtggcagggagccttttaccaaccacgaaggtgcctcaagagaggaagactttgcctgtgtggcactgccagggctccactgagccagccctgttttaaaagccttccttggtgctctagttgttcctatgggtgcctgagtgaccatgagtgactgtctttagtcaaaaaccctccccacctgaagtagcactttcattaccctagagtcaccatcctggtaaatagagggttcgttcccaggaagaaagtgaatcctgaaacccggcagaaaggccaggtaagggacatggactcttcctactttagagaaggctctgggagtccaccaggctccatgcaatctcacacaccttcctttatagattgagggagaagtggacctcattgggatggtgaggctgacagaaaccaggcagccttttgtccctgagaacaatccagaaaggaaccactggcattatcgagacctggaagctatggccagaatcacaggcgcagagcccatcttcattgatgccaacttccgtacgttgtggaccagcccatctcggaacaagtagcttttgtgaatactgtccttcctcctaaccctcattgcccagtcactactgtggcttatgttctcacatgtgtatatggcgggtgggaggaggcagcaactcagcaaagaacctaggcaagtactgagcggacaagggcggggatggtcacccaacgtaaaggccatacaggacttccaactggccacgcaaaaatgacagccactaggaagtggtgcagaggctggcaggccagtagggggtggacttgagtctgctgtctccacagagagcacagtccctggaggacccattggagggcaaaccagagttactctgaggaacgagcatctgcagtacatcgtgacctggtgagtccccagcggccctctggcttcctccccttcagcctagcagcctgctaatgctggcttgctttcaacccctaggtatggactctctgcagctacatcctacctgtggtttaagaaattcctacgtgggacacctggtgtgtgacagatcagctgctgaagccctgtccctggataatgcagtatttcaagactgcctttatgctggatcatgtgctactggtataaagttctggccttctaccttaaatgagctcatgactggttcatcataaaatcctggcttggtttcagtccaaagaactttcccaaaacttgatactcaagttacatctctagggaacaaaatgcctggtttaagaatgtatttaagggtgggaagggccgggtgcggtcaggagctcagaccagcctggctaacatggtgaaaccccatctctaccaaaaacacaaatatgggccagccagttgggatgctgaggcaccagaatatcctaaacctgggaggcgaaggttgctttgacatcacaccactgcactccagcctgggcgacagagtgaggctgtgtctcaaaaagatacttgctaaccccaagtaagattcaacccgagatactcaacagacactggctgaaggaaaatttgtattatttcaattatttttatgtacagaaaactcaacagtgtacatttaacccagtttagtggcaagttctttagcctttgccttttcgagcttggcgatacgagccacagacttaggacccaggacattgccaccccagtgacggcggatctgaaaagacaaaaagaggcagttagcttggcttactgttttctgagattttcaaggttattagttgcgttaattctgtttggctgttccaagctgatcgtcagatagaacttctcataggttaagccagccagttatttgggagaaagatttgtgaatgacagtattttggtgtaaagctgcctcttacctcatcgtatctgtcattgtaattggtcctgatagcttccaccagcttagccaaagcgcctttgtcttccctaaaaggcaggaggggaaacaaaagtgggttttttgccttagtttcccttttagaatgcaaaaataccttttagctcaagacagtcttttgcctcagatgcaatgctgaccacatggtttattcaggtgaagaaattcttaaccatcattggcaaaagttcagataaatatatttcttaaactaaaagattggcctttaaggcaaaaggaaacaactgtgaggcatggattaaatgaactggggggaagtttggggccaggctgtgtacttacgagttcacctgtgtgaaggcgacagtggtgcaggtcttcctgtggactagacgtcccagtcttgcctttcccttgataatgcagtaagggacccccattttacgacacagggcaggcaagaagacaaccagctggaagaaagcattagctgaagactgtattttgaccaaaagcagcaaatttcagttagcttgtaacaattgctcagggttaaaaagctcatggattcgcacttcaaggttgaattcagtgagagattcacatcattgcaagagccacgcatgtgttggatctgtgtcagtactgccctcacccacttcggtcccatcactgacttggcattaggtctactctctcttcctggtactgccagaagcccttgggttagcagtcaacaggcaaacgcacctcgatgggatccacgtcgtgtgcaatcaccaccagctgagctttcttgttctccaccaaggtggtgacggtgttaactcctagaacacacaaccactttgtgagcactcacagggcctgctctagtcacaagaagctgctgggctcagctgctgactcagtgttaaaaagctcggttttactcttcacagtaatttcaggccaagaaattttacatcactgcaacagcccgcccccagtgttcaccctaaggtggggcctactcacctgctcgaaggacaggtggtctcttcgttgggacgtcccctttgccagcagccttcttctcggcccgggccaacagtctctgcttcttctcttgctttgtctctggtctgtacttgtgggccagcttaagcagctgagtagctggaaaaacactcttcagtttaggcttggagtcaaggttctaatccttgtcacttaacacttaataacaaatgctggactgcggtcctgctatatgactataatttaatgacaactgcagttcaagaagcctaagaccatccccctcatgttctggatgaaataaggaatccttgcctgagaaactcctttccacgccacagaacctcacctgtttggcggtccagggcctgggtgaactggttaatcgcaggaggcactttcagccgcttatagaggatggctctctgccgctgcaacctgatatagcggggccatttcacaaagcgggtgaggtctcttttgggctggatgtcctgtcctgagaagtaaagggtgacaccgagtgaggctcaaattccatgtcaagttcatgtctggggccactaggaagggtgttggtgcatcagcgatcttggtggtttaaaatgtcatcaccatctctcagatagcaaatattcttttacatcatctgcacacaaacacctgagaacaaagagcacgatgcttttcctcatctaacaagaagccaaggtgccacgaagtacagcagaattgcagtcctagtacctcgctgcgacactgctactgtacttgtttccagatggctaagctgaattcaaggccactaccatattgagctgaatgctcgctcagcaactcccaatgaaagcaagaagcatgtatcattgcccccgtctctaagagacacaaattaaggactgcgaccactttacacccactaaaacctacaagatacaacacaacccaattaccaccttcccttgagaaaaacatagaccgttttcattctgccgtttgttacttaccaatgccaaaattcttaggccttttctcaaacaggggattcaccactttcttagcctcctgcttcttcacgacagctggggccggagccaccttctttcccttggccttctttcctttcggctgggcagaaagaaaacgtcagttaaaccgccgcctccactcgcttcgtcgggggtagggctcaggctggctcctccaaaacaagggacgctgacagcacctgcctgaactaagctggcgagcagctttctgcaaccccccagcaccacccctcgacaggagcatctcacattcagccgcacaagcatgcagccccgggaaccccgagtggccagagcaaggctaagcccgagaccacgctctcttcgcgtcgcccacccaggagacaccccggactcatgactcctctgagtcgcggccccacaggctctagaagcaacaggggcgggctcagaactcgtcgctcacaaggcctctggagcggcccccagcaagcccragagacgctagggctccgagccccgcactgcggtgctccagscctgcgacacccagccctgcgacaccgggaacaacgcattccgctctcggccgcccggggctctagtccatctcaatgtctccgtgccacaccaagtggggctctaatccacctcggtgtctccgtgccacaccgagtggggctctcctagcgccaggaggagcaggaggccctccgaggccgcgcctggaggaggatggcagcggatacagccggaaccyggctatagtgccacggaactacagctcactcaccatyttgggcggcrggaggagagagaaaggaaagggaattgtgggtaatatgtatgcggcctcggagatcgcgagagttgataccggcacgggatttcggatttaaagcaacagcattcctataaagctaaaaatcgaggcggggcygagaggctgcggcggctgactagsttttcggaccgcggcgcgscggggaagagagactgcggcgggagggccaggccgtgggagagacgcgggaaagtgcgggtcgcagaggcacttgaccaccccgccctaggccgacccggcggacgcggcgtctggtgtgcgggcgctggggcgggtatgagggtgtggtggggggtggggatggagggggggtgggtgtgtgggcgggagtgggggtgggtgggtgcgtaggcgctggggtcggagatcccctttcctgcgtgtgacttatttcccacaccccgccaaaaatgggcacaaacaatgcgagtgcgtccaggagtccgctcggtcgtgcgccagactccgaacctagggggccccgggccctccctgagcaccgcgcgcaaaggcccggccccagggccaggcaactccagcgccgaggccgtccagtgcggctggagggcagaggccgagaggcgcggcgcggaacttgagccccttgtcccggcgcaccggggaaccatgagggatgttaagcgagggagtggaattaccccccttttttttttcttttggagacgtagtctccccctgtcgcccaggctggagtgcagtggcgcgatctcggctcactgcgacctgtgcttcccgggttcaagcgattctcctgcctcagcctcccgagtagctgggattacaggcgcctgccatcacgcccggctaatttttgtatttttagtagagttggggtttcaccatgttggtcaggctagtctcaaactcctgacctcaggtgatccctgcctcggcctcccaaagtgctgggattacaggcgtgagccaccgcgcccggttggaatgaccactttttaggacctcttccctgccgcgcagagactggagggagcggggcccssagtgcagggatgaggtctggagcggggcagcctgagtgggagtggaaggaaagcgtggatgtaggcggtgcagaggggtcgaattggaaggactcttcggatgggagggcgtggcgaaggtggcggcgggctaagaagttaagccaagggctggggacggggagctggtgttgagtttgcagggctccctgggacacgctgtgggcctggacgtgaagtctggactggagccctggacagggcttggagggctggccaggagttccaggatgagcttgctctggcaaaggcggggccagtcctggcaccccctgcggtgtctgctgatggaatgagttcatctgtgtttcagtgattgactttatttggcagaaagggaatccccagaaatctgcgtgttctgctaaggttggggcatagagggtggctggggtagactctgcctgcactcagaggtctgtgctgcactctaggtcccaggtctccccgctgcgctgcttgaggctcrgccatggcccagcagagagccctgccccagagcaaggagacgctgctgcagtcctacaacaagcggctgaaggacgacattaagtccatcatggacaacttcaccgagatcatcaagaccgccaaggtgggggtggggtggcccaccaaggggagcagagtctgagaaggggtggagacaggagaggccagggsstgagcagcgcgagtgaatagtgttctaggcaggaagcacccagtssacagggagctggtcagtagataagcaaaccaaataatggcacgtccagcccttactaacagtatggatttggatggagatttcactttttagtgcctcagtttctcctgcatggtggggtccttgtgatgactggtgagtttatctgtgtaaaacagttacctcggggcctggcacacagccaatgagcaggagaaaagcagactgaggggagaagtggggggkggcctccaggcaggtggagcggtcagcactggggcctgcaagcctgctgaccactgcagctacagctgcatcagattgggctggatccctcctggytgctgcagacctggcaggctccataagcgatgatgatgaggatggaagctagcatgtacttagtgcttgccatgtatcaagccacgttgtgaggttatctgtgcctgttctgctgaatcttcatgaggactctgtgaggtgggcactgttgtcctcttcatttcaggaggaaacccaggcccaggagacttagtgacttgcccaaggtcactcagctcacaactggctgagccaggatttgarcccacgaagtctgggtcttaaccactgagggtacctgacacccaccccgaactgagcctttgcaaggcctgccgggaagccccatccagcctcgcttggccacctatacaccaggggtggcaggccaggcttctgtgaaactggcatgggttaatggtggtcaagtgcatgacacagcctggcacctgggaagtgatcaggaaatggtcgcgaaaaaaaacttaaatcatcccttcactcatccaacagtttaccaaatgccaagcaagtgacaacggttcctaccaaacagggctcccacagcccaaaaagaccgggccaagataagcccccatccctgcacctagyacagcaagcagcgtgggttgcctctatttgtcttgagcaaaggtgcatgttgtctcccatggccagaacaagagagggtggaattgaaccttgtcagaggtctggctgacagcgcttaggtctgtagatggcaccacagacaggttgtggccagtgtggacatcctgggtagatgacagttaccgtaagctgggctgggccgggccaggggtggggatgccttggctgggttgatttctaggttttcttgttttcccccagattgaggacgagacgcaggtgtcacgggccactcagggtgaacaggacaattacgagatgcatgtgcgagccgccaacatcgtgagtggccagggtggagggcacggcctgggctccaagagcatcagtcccctcaggtttcctgggtggagtggagggggctctggggctggtctggtcttcttcccccgagaaggagcagaaggaggcaaatgtagagatgctttggtttcaccactcggcarctttaaagaatgaggtgggggcaaatcatttctcaggagactgtcctcacgtggggcacttggaggagggctgggcagagagccacccatgcccgtcctgtagccgtgcagtggccagaaagagggtagcccttcctgctaactcaggagttcctaaggtcagttgtgagtgaaaagacaaacagccgaatggaactgtaggcgccattggattccttcggatcacaggagaaacacagcaagcagataattccgcaggtgcacgtccagggctcaaaatgcatggaaaaaggtcccacaggagctctscccagctggcagccatgttaatcctaccccggggcaggaggcaaaatgggatcgcagttttatctgtggggtttgagtttttcatgagcagaatgtacacctgcataattggactggaggccagtcctgcargagtggaagccagaggctgacgagaggggagggcctgccctgcagaactgacatcccagttttctcacttaattctcacacatgaacctgtggaggtcaggggtagagtcccactttgcagatgaggaagctgaggctcctagagaggscatcccttgyccagcatcagctacytgtaggcaaggccgctgtcccccctcaccctgtgyccgccctggttctgatggccacaggtccgagccggcgagtccctgatgaagctggtgtccgacctcaagcagttcctgatcctcaatgacttcccctccgtgaacgaggccattgaccagcgcaaccagcagctgcgcacactgcaggaggagtgcgaccggaagctcatcacgctgcgagacgagatctccattgacctctacgagctggaggaggagtattactcgtccaggtataaatagcgctggactccccatgcagagcgggagcctgcctacctgggcctggccagcaggcagggctgccttctgctttttcaaattcttgctggtcttagcagtggagccatgcctgggtttcagagcagagctcctggccagagcgtttgaccgacagacaattcacatccatatgccagggccctgggcctttcccacagtgcaatgtgatgaaaaccacaggactcacgccagtcggataggccgagtctggagaagggaggcgcctggctgtatcccccgcaggccctcttccgagagccttcctcctcgggcagtgcgttctggggctgtgctgctcctgttaccttctgaatccatatgtagagatttcagccaaggctgggccagccttttttgggcagtcaggtccacacctatgtccagggcaccagggatgcaattccatgtggatgtcaccaaaccccagtgtggaggcagggacagtcatgggaatgtgggggatgaagcccaggcagggaatggccttgaaagccattggagctccaattcgtgacccactcagccttatccacggagctggagccaacctacgtgccaggccccrtgctgggtcccagggatgcagaagggtcaaaacccatcatcctgacccttgtggggctccgtaagaagctgaaaccttcgaccgtttgagctggaggggccctgagaaatcagagtctacgtatcatttacttagggggaaacttaggctggagacagggaggccttccactctgccccattagcttagaaaatcaagattcagtccagcagatgcagagtccatgtccatcttgtgccttctcctggacaaacctttccttcctggtggtggatttaaaatactcctttctgcccattggccatgctgggagccacagntatccagagccagcatgacctggggcttggtttccctgccctgggctcagtggcactgctgagctgcagcagtcctagagttttccagggggttctgagggaatctttggtccccagtactcattaactcagcagacatgaggcagcatttcctccacactagggtggctgagaggggtcctrgggtgtttcagacccttctgggcatctccttccacagctgttcagtttgtcggtctctttgaggcagccaccgtccctgagggcccctgcacagagcagctgtgggcctgtaattcagcctgcctgccttgccttggggcagggagagagggaacctgctcacggccctgcagcagagcagggcgcaaacccaggacatctgtgccaggcttcccatgccctcccccaacagtccctcagcttcacccagcggggcttccaggccagcctgtgtcccctccmgcaggcctcctgtccacaccagcgccccctggggggsctcacacagcccctgtggcagaagcagttgscctcctctgtacattgcctttaagcgaccaggtcctggccgagtttcctctgccccttcttgctggtcccccaaagggcgctccgctccctgccctgccctgccctgttccgcatgagctgcgcctctgtgctcgcctgccccctctctgcttgttagttgctctttctggctctgcctctcctttgckttcctcgggatgccactctgtgcccaggacggttctgagactgaacactgagggcaggagcaagggaggaagccaggggcgaggcaggccgcgggaaagccagggcccctgcctgcaggttagaaagaggcgagcgtggattgtcacagctgcgggcatgggaagggctagctgagctcttcacctgcatcctggctgccgtgaggattccccgtgttagaggtggggacgcctgctggaggccgcctggctgatgtagggctatcgggaagtgccagggcctgtgttcccaactgtcgcccccttcaggctaagtctcaggcagggacagacccagaaagaacacagtctgccctcagagagctctttgcagtgtagtgacactggggtttctgcagtcagggaggagggagggtggccaggctgacagctttttgcaagaggagggggaccagcaccagctgggaggcataggctaggacaggcccacgtggaggctgggcaggaagggcctgctgaggtcacacagctgttggtggttgggccagggcggcttcctcctttcagaatgctagggtggctctcaccactggccgcctctccttgccaggcctgccaactcaggggacagatggagcaggagtggagaaagggaaaggcwggtctggggtgtggtcgtgttttcttaactctgcttctgtcttgctctcccctcccctggctttcctctctgcctgctcctgtctctccctggggtttctggtggtggaaaagctcaagcctttgcgaagctaatgacctgcctctgtgcgaagcttacgggaggctggacctcgacacagactctgctgatggcctctcggcccctctgctggcgtccccggagcccagtgctggccccctacaggtggcagcccctgcccactcccatgctggtggccctggccccactgagcacgcctgagcctccggggccacgcttcgttctcaggaacaaaacctgaggcagccctttggatgccctcacagccttgcttctctcagcctaggttcccatttggggacttcaggaccccagagccactaggacttccttgggaagcccgttagcccagggtgggtcccrccaggacagtagggaaacagttgtttccctagccatttccgaatagcccatcattccgagtcatcatctctgtttgctgccttcctggccagccaggtggaagaaagtttccaagctaggtctggcccgttggggatctcagcagtggrgcaggagggtgcctgatttcggggagtcctgacccgagcctgttgtcagagttgggaggggctctgagcagtgttgggcaggccgggtctcccatcccgaggccagcgttcctgtgcagagccccatccactggttcttgccctgagccacatatgtctgtgccatgggctgagtgccacgacaggcccgtgtgacagctrctgcccacgcatgtggaagctaggtgggactcattcctaattctgccgttgtaatgagacttgattaaaacaccgccacttttttgcattgctgctctttcttcctcattccttgtcagtccaggaccatccttggtctcccagcagttgtccgagcagcagctcctcagctctgcctggacagcctggcccaaggtcactctctcctcattggcacctggtaggtccccagtattcagtgaatggacctgctgccatcattgcacatccaggcacctgtgcctctgctggcatctcatcctcactgctaccagagccggtgctcctagtgccggtattttagagaggagaggatgtggacttagaaggggtgaggtgtaccacggccacagagctaggaagtgaagtggcaggaatcagaacttgaacctgatggaagtctagacccagtgtcttttggtgccaggctcaccttagaaatgcagaagtcacaacactgggcaggaagtgtggggggagcacagttcgtccacaggaagtgtgggggagcaccccaccccagttcctccagcaccatccatgtgcttcatcttctcatgggggaggccatcatctttcccgatgtatgaatgaggtgacagcccaggatccagccttggggacaggtaagaacacagctgacccatcaccacctgaaccagagaaccccacagccaagcagaaggcaccagacagacaggagcttgaggcccagtcctggctctggacctggcttctggggtggcctagggaagttgcttcccctctgagggagaatttccccattgatacgtgtggtgatctgttcccgcactattttagctgtggaaatgccttgtacttaaccactgaggaagaaaaagattacaaccagatggaagcatatatgaagcgagagcccggaaggaactggccagactttgtggtgggatcccacttaccctgttcctaaaatcctgagcgataagacctgccatcagcttcattttctgcttggccaggaccatcattcccatgtgaaaatcaagttatttctccttcttaaagccaagccgctctgctgaccttttttcctctccagctcatggccttggcagcagagctccacggggaagcagctgataaccatttgcagttctctcttgggcctacgtcagacaggttttgtctccatgactctagcaaaactacacctattaaggtcaccagtggcctccacattgctaagccccggcccattctcagtccatgtaactcttttatcccaagctttttattttgagggcagtggaactcatggaagtacttgtcagtttgcctctctgagcacattctccttcgtccatcaccacaaccagaatggatgatgattgcatatcctctggtatctagctgtattcagatttcttcagttgttccccaaatagtttttttaatgcctattttttttctttctagtccagaggtcttttatttttttaacacccacgatgccatgaattcatagggaagaggttccagcagctcaggctccttcccattggttctcacagtgtgctgctctgggtggagcaggctggcgcttcagttgaatccaggtacctttctctttggcttccctctttttctgatcattttccttcacgcgtttcaggaagctctctcggctcttagagtgcttagtgtgctgaatatgcacattcattctcttggcaagaatcttgcccttacttgtttacaacagtgccaacagcatgctggggaacactgtagactctcccagtctagccatggtgacatttgtggggcattcctttttgaacagtacccattcccttgatatctacaatatcacctttctcatcaatttgcatatacttggccaaaggaacaactgcatgttttctgaaaggcctagagaacatatattgggtgcctctcctctttccctttgtgttcgtcattttggcgaattactggaaggtggcggttccagctgaaaggcttttatgcctgtttttattgtgtgttgcatttggttgttattttggagtcttaaaatctaaaacaggaccaggtcaggcccagtggctcctgctgtaatcccagcactttgagaagccaaagcgggtggatcacttgtggtcagaagttttgagaccagcctgggcaacatggagaaaccccgtctctactaaaaagtatagaaatcggccgggcgcggtggcttacgcctgcaaccccagcactttgggaggccaaggcgggcggatcacctgaggtcgggatttccagaccagcctgaccaacatggagaaaccctgtctctactaaaaagtatagaaattggccgggcgcggtggctcacgcctgtaatcccagcactttgggaggccgaggcgggcagatcacctgaggtcgggagttccagaccagcctgaccaacatggagaaaccctgtctctactaaaaatacaaaaattagccgggcgtgctggtccatgcctataatcccagctacttggtaggcggaggcaggagaatcgcttgaacccgggaggcggaggttgcagtgagccgagatcgggccactgcactccagcttgggcaacaagagcgaaactccacctcaaaaaaaaaaagaaaaaagaaaaagaaattagccaggcatggtggcacacgcctatagtcccatctactcaggagactgaggcagaacccaggaggtggagactgcagtcagccaagatgacaccactgcactccagcctgggaggaagagtgagactctccatttcaaaaaataaataaaacaggaccaaagtggtgatgagatgggagtgggtccactgagattctggaggtgctctgaaggcacagctgacaggatttgctgaagcattggatgtggggaataagaaaggagtcagtggtttcaaggtctggcccaagcacctggaaggatggagccgctttaactgaaaaaagggttgacagtgagaggaagagatggggcttggggggtcagatgcccattctgaactcagtaggtgatggtgttaagatacccagcagttcaggggagtcagcagcagcgtcacgcctatcctccatgaaacatcacctctaggctggtctgaatggcagtgggatgtcagaactaattaaccttagtgtcactatagttggcattcgacccccacactgctaaatttgactgccttttttaaaagtgaaaaaaatacatatatcttgagacagcctggcactccaggctagaatgcagtggcgtgatcttggctcactgtaacctctgcctccccggttcaagcaatcgtctcttctcagcctcctgagtagttgggactacaggggccggccaccacgcttggctaattttaaatttttttgtgtgtggagacagggtttcactatgttgcccaggctggtctccaactctagggctcaagtgatcctcccgccttggcctcccaaagtgctgggattacaggcgtgaaccactgcgcctggccaaaaaaatttttttaaatcacctcatggcagaagttaggggaagaaagtttagttctgtttcaaatacaacagttctgtttctaatatatatatcagcagccaccttttcaaattgtaatttaagactcttaagttctcccttctctaccaacggggtggccctggaaggggctctgggtccttaatgagcctgtaattttccagtgcaggaactggggtgtggtggtcccaagcctcaggccatgacctctcttttctcctgcccctagtgagttattataaagaccacatcttgtgttaaaaatcgcagtgtgggctgggcacggtggctcatgcctgcaatcccagcactatgggaggcggaggtgggcggatcacctgaggtcaggagttcgagaccagcctggccaacatggtgaaaccccgtctctactaaaaatacaaaaattagctgggcgtggtggtacacgtctgtaatcccagctactcgggaggctgaggcaggagaattgcttgaacccgggaggtggaggttgcagtgagccgagatcttgccactgcactccagcctgggcgacagagggagactccgtcaccggggtgggggagggaatcgtagtgtgtaattctatttttcagagcaaaagccactgcccagggggtcttccttgaacatgcaggctccctcccgcccaacacttctcccttttcccctgggctttctttggcgctcccctcacctgacagtcacacgcttgccaggtttatcagtcacctctacggcagacactcgccgagaacacatctgtgtgtgtgacacactgcttgtgtcccctaggactgaacctagggcctgccacgtgccaggcgctcagtctgtgtccgcctgagacctgaggccccccactccaaaggacggaatgaatgtactgctggtcattcattcatttcgcccctactcatgagcgcctgctgtgtcggggttgggggtgaggggagcacaggaacacgtgcgggaccggggtgatagaggcactgaggccaggccccgggggtgccctgctgcaccgactccgggcggagattggctgtcctcggcccgcaatgctgtgcgccccgccccgcgcgccgcttccggcggagtcaggcttggctaatcgagcgcgcgggctggcggctcggcgttcgtttggccgcgcctgcccgtgtggtggtttccggcggaggtggtgagagtcgcacgcgcagcggggaaggtgtgagtcgtgaacggcccgggtctccgccatggcctctctactcgccaaggacgcctacctgcagagcctggccaagaagatctgctcccattcggccccggaacagcaggcgcgcacgcggggtaacgcacagggccgggccgggactaaggggcctgcgaaacgggggacgcggccggagccggtgtagacgagtctgtaaagtactagaaaaaaaatctaagtgacttgtgaaattatcgccgtttcccttatttgttttttttgtttttgtttttgtttttggagacggagtctcgctctgtcgtccaggctggcgtgcagcgacgcgatctcggctcactgcaagctccgtctcccgggttcacgccattctcctgcctcagcctcccgagtagccggcactacaggcgcccgccaccacgcccagctaatttttttttttttttttgcatttttagtagagacaggagtaatggtcagtcagtgggaaaagaccctttcagtcccttcactacgggcatggtgcggtgtggggaggaggaggatggcagagggctcctgcgcttagggttctcatggcctggtgaccacgctgcacaagggaagtagataatcgggtggggaagccgacagcggggacgtgtcagtgctgtctgggcccaggaggagaggagagcagcagggtctctggaaccaccagaggtaaaacggggtttcctttttattcaaggacgatatattggttatagcaaatccaaaatcttaagtgaattttctcattacctagtatgtcttccgtctgtctttctcatcctttttgaaattttttttttttttcattaaaacgattcagctcctactttacttagactgatttctcccatttaaaatgtaaacattgtccggccgtgcggcctcatgcctgtaatcccagaattttgggaggctgaggagggcggatcacaagatcagaagatcaagaccatcctggacaacatggtgaaaccccgtctctaccaaaaatacaaaaattagccgggcacagtggtgggcgcctgtagtcccagctactccggaggctgaggcaagagaatcgcttgaactcgagaagtggagtttgcagtgagcagagattgcgccactgcacttcagcttggggaacagattgagactccatctcaaaaaagaaaaaatgtaaacataacccccagcagctaaaatgaaagcccttgccattgtgtttgatggcagcatg

SEQ ID NO: 97332 - DNA, 13395 bp, Homo sapiens
tgggccggtgaccacattcatctcacggcccatccctgggggaaggctgaggatgaggggaggtcagagcccgggttccgctccaaattgtttctcgtggctgcagctggggaatgcacgcaacggcaccaccctgtcccgaggagagagaacctggctgcgctccctgtcccgaggagagagaacccagcacccctccctgtcccctgtgtgcttcccccgcccctgtggagagagaacctggcccctcggggagggcactgggcattgatgtgagcgcagcctccacaactcacctcccaagctcatcacctgcgggctccatccctgcgctgccagaggtcctggccccgccatggctcccaagtgcaccgcccggggaccacatcacaaaagacccaccttcccagaccccgagccaggtcttccagacctcaactttaaaaacaccgtttcgtagctatttttaaattttttttctggaaatattgataccatgacgctcactgtggctgagtactgcctctcaggaattctgagcaaactgttttgaaagtgcctacactggccgggcgcagtgactgacgcctgtaatcccagcactttgggaggccgaggggggcggatcacctgaggttgggagtttgagaccagcctgaccaatatggtgaagtctcatctctactaaaaacacaaaattagctgggcgtggtggcacacgcctgtaatcccagatacttgggaggctgaggtgggagaattgcttgaacccaggaagcggaggttgtggtgagccgagattatgccattgcactccagcctgggcaacaagagggaaactctgtctcaaaaacaacaaaaaaaagaaagtgcctacatcgtcaccggcagagcgctataccacagtgtgcagtgagacagccttgggccatgtgaaaagttgggggtatgaatgggacgcagaaaggttccattttgtttttttttgttgttgttgttttttttttgagacagggttttactctgttgcccaagctggagtacagtggtgtgatctcagctcactacaacctccacctcccaggtcaagcaattctcccacctcagcctcccaaatagctaggattacaaacgcgcaccaccacagcctggctaatttttgtatttttagtagagacggggtttcaccatattggccaggctggtctcgaactaccgacctcaggtgatccgcccgcctcagtctcccaaaatgctgggattacaggcgtgagccaccgcgcccagccctaattattgtattttttgtagagacaggatttcactatgttgcccaggctggtcttgaactcctgggctcaagtgatcctcgcatctcagcctcccaaagtgctgggattacaggcatgagccacagcacccgaccttgtatcattttaattaatttaaaattaatcgtaagtagccacatgaggctagcagccaccagaaagcacagccctggtgtgctctgggacccagtcgggcaggcacccctatgctggctggagcctggggtcgccccacttctctcaacactgatgggcatgagcattcctcaccccagggctctgagcacctcacagatggggggttgtgccaccctagcagtccctgccccctgggaggctggggaaccctctcctcggtgggcagatagggagacccaagcctagggaaggaaagtaactaactcagggtcacacagcaggggcaggaatagcaacctgggctgctggactcacaccccaatcattcggaaggtgggcgagcccagagtccctttggcttggggcatgtaggtcattttcaggtaacaaagcacttcccctaagcctctaaataaggaacttattttagataaaatcccccacaagggtcctggggaaattcctgtttcctaagtaagcagaggttgagcattcagacactggagtcagacctggggacacttcgagctccccggcttactctgggtgaccttggcacctaactttaggtctctgagcctcagtttcctcctccatcaatggaaacagaaactacatggcttcacgagattgccacggctgtgcatagcctcagtgtggggcaagtggcaactctcagcaaccacggggttacgcttatctgggtgtaggaggtgcgggtactgctggagcggggtaggggggacacggctgctgtctctgcaagaggaagaggataaccagcctgagagcaagagtgtgagtggggggtgaggtgggggtggggttgtcgctgtggcaggttccagagctggctaggattcccaatcactgccgctcttgggccccaggtgaggtacttatctgggagtctcagtttccctgcccgagatcggcaggctacaagtgccccccaggtgtttgggcaggaccctgggacccttctctgggctggcaattgggtgtgatcgcgggaagaggcttcttgggcctgctccgtgtctactgtcacctaggctgtaaagatgacagagggccggagtggctctccaggctggggcctggcatttcacagcgctagcgccgtgacttatggaccacaagaagctgtgatttatacaacgtgaggcagagctcctgggctcgtgagttcccttctgtgatgaagtgaagtgccttgcagaagcagcagccgcttagctgatgcgaggggactccgaggcccatccatctccctctctccccatgaggctgggcagcgttttgctgaagtggctgaacacaagtgcatctgttactgtctccagaaaccatcaaagagctgaacttgtccctgagaggcagctcagagggcaggaaggggagacccacccaggccagctgaggcagcttcaggacgctcagggggaagcacttggtaccacgcctggcacagggaggaggctcaggagcaagcttctctctcctggagcgacggcccggagtgcaaacatacccacctccagtgggtgccagcccaagtgtgagctttattggctcattagcccgcacggcatcagcctggttttacagatgagaaaagtgagggtcaggaatgtgaaatggcccgcccaaggcacactccctaagtggcagaaccacgcggaaagcacagccctgactccaccccggtctgttcagcgctggccccaccggcagagaagcaagctggtgctaataattccaccccacgtggaaccggcgcccagaagccccgctggatctttgccgcctcgtcttttggtgatagttgttgtcagggcttccctttaggtgggcgaaaatatctgtttactcaggaatggagcaatttcccaggcgagtctctaactagctaaatgcctggtcctgcctccgtcgcagggaagccgcccactgtgaaacacgagccactcagcagggaaatgtttaagcggcacccgcacccgctgcacaccgggagcagcggggcgggggcgggggcgttcccggtgattccacaccccggcccagcatggtgcctgtcccagaagccaggccacacccagtgaggcggaacagggctggcggagggctggaccctggaccactgtgcaggctgtccctgcactgagtcagccgggtttaaatggacgaggtcgtggtccactcggtccagggtaggtcaacagggcacccacaccctctcagccatgcaggggaccctgggggaagaaggctggattggaccgtggtctcaggcaggggcgtggtctggccccttcatcctgggcgtgcagggctgttccatggggatcgtcgcagagtagagtgcacagtgccggtgtgagcccacagggacagcatggaggagggggaggagtaggtcccccctcagcctttgcccccaccaatgctgacaacggtggggccagcagggcttcggccctggctggtggggcactgtggggtgggctcttccagtgtggagatgaccttgggcaggggctgcaggttccattcaccctgcaaggaagggggcaggaggtaaactgaggctggaggggcaagatgggtggctgcttccccagccacttcccagccacctcttggattcttgccctcaaactcagcttgtctcaaactgaactcactctgctcccccaagttgctttttgggggtcctcacctcagtaaatgccccctcccctggcttcccattcacctagtcaggaacctgggagtcatccaggcctctccccgcctctgtccccacccaatttaatcattcaccctagtgtagcaaccagagcccctggctgcaggctctgatattttttagctatctcttcccctcaaggctacaccaaatgccaagttttcaaccccatcagacgtccaccccacactattctcagcaagccagtattagcccttccttcccttggtgctgaggatgtttgacttagcagttaatctggctcccaaatgcttctgggaaggatcttcctggatctccaggctgcggcaccttacgcgactaactctgcataggccctggcctcctgaccacagcccagtgggcccaggataaattagatgccttcgaataccagtgggtctcagataaggaggaaaaaaccagctcgcagcttcagactggttcgtttcttaccttcccctcccctggtgctttatttttaggcaggttagtgcgccctgctcacaccacctgcatttggcattcggtacagtgtggaggtgtcaccagagagggtgcctgccctcccttccttgcctcgttattggttctctctctctccctctctctctctctctctctctcctctctctctcctctctccctctccctctctccctctccctctctcctctctctcctctctctcctctctctcctctctcctctctctctgctggctggctggctgtctaggcctatgtgtcaccacctggcacttgctctcattgtcttgtgcgagtgcttttgccagcagtttggagtgcagacccatcacccctcactggggccccccatgaggcctgcctgactgcatgccccacccgggcccatggcagcgcacctggaagcggacggctgaggacttgttgcagtgcatggagatgggcgcgaagctgtacagggccttcagtacgtcgcggttgaaggagttccagggaacagaggtgaactgctgagacacggacgcctgagggcaggtgcagacatcctcgttgttgaacctggtggggacaaggaacagccaggctggggagcagctgacgggcagggagcccagtgggcaccagcaacacctccctgcaactcgagtcctgtccctggggcaaccgtcctgccacctcctccccagccccgctgcctccgccaggccaccccagatgctgccttcaccggcaacggcctcacctctcctgtcaccttggcgggtgggtaatggctgctgcaggctgggttgaggaggctctgaagccaaatccagactcagcaggaaacgagtgaggggaggggtgagtgatgccgccacaggtctctgctcctagaacttagcctggactcctccaatctgcccagccgcctaacaggcccgaggttctgtgtcggggttccctgggggcagggagcttgtgcagggagccctcacctgttgatgaggtggaagtacttctgcaggaagccggcgtccacagcgctcttgcagagctccagctgcgtctgggggtagtagtgcacgtagttgacacacatctcctccaggatcccgaagcccccctgcaagttggaggagacccgtcagccccgggccatgccacgcagacgctgccatccagcagctttcgccgcacccacgtgtacactgcgtccactcgtctgttcactgcaccgtgccaggcatgctctggggaaccgagtccctgccctcaaggaattgccaccattggcaggagagacaggcagtgagtgagtgagtcaaccaggaaattcgtatcaggtactgatgatgctgtgaggaaaaatgaaacgggacaagcggatggggtgttattgtgcccattttatgggtacagaaactgagtctcagagcaggcaaggggatgccccgtggtggccacagcatcggtggcacagcctgagtgcacccagcgtcccggccattgtctggaagctgtccccatgacctccagcgagagcctggagccaaggactgcaagggaggccctttccactgcagccccgcaccgtccaccagtcatttctccaacgtggctctgaggggagcagggactctataagacaggaccgtgactagaggccrcgacaacctccagcctctcacggcaaccctacggcctgccatcgcatgggaggggcagggcaggcaccctctgagtccccactgccagctttaagcccctcgctgggttgctgctcttggagctggtgaccgtggagcctcagccataggaggaagaacagcagcagcttggaggagctggggctggagagagcaaagctcccccggcagcagctcagatcccagcaggtcaggggccgggacatgacgccctggccacccttgcccctccaggctccccgctgtttgtgaagctgctgtgggcctggggatttcatctggctggtggggaagaaaggcaatctttactctatggcagaacaaagggactgggcaaagcttggcgtggcacttacaccagctgccgccccctcctcccgtgcagacaaagagcatgggrcagttctgcccagagacgaaacctggcacctgttggccaggacgcgtttttgccagcattgttctctgggccggattcctcctttcccagcttttctcatccatcccgcccccgtcagatcgggacgattgccctcctgtgtgagttcctgtccctccccaccctctgccaccacagacatcaaaagggaactgagtccgaccctgtgtagaatctgttctcctctttcacctggggaaggaaatcgaatttcaaaggccactgtgtcttggatcagcaggcgagggcttgtcagagtgtgagaagctcaggtccacctggggagctgccctcccctttgatcccacctggtgctgtgatgtggccactgccaagaggasgacatgggccagggaagccacagaactgcccacggggacgctggcaccgagggcctcaacctgcagaacggccatctgagatgtccgcggtgctcaccaggcctggcagccccgaacgccctgggacgtggcgtcagttccgccgccgtgaagccagattgggcagggaatatgcagtctcctcgctggatgcccggcaagaccctcccatcccykgccccggggccgcgcctgcagaatggggctgatggtggggacttgcctggggtgctccacctgcagagccctctgtttgcgagcccactcagtcactgcacaggtgcttagccgagaggcggcacagtcggggttggcacctgcacccataccagccctgcctcctgttcgctgtgtggcctgagtggctggacctcactgtatctcctggtgggattgctcagaggtctcagcaaggcttggtgtggttaggatgagttattagagcagtgctgagctgtggcaagcacccgacatcagccactgctgtgatatactgagcacctcctctagagagaataaaggactgacaaagctgtcctgtctccaccctgagtttgtgatcaggaacctaggacacttgtcacctgaaatccaagggagacaggaagggtggggtaacagctgtgaggcacaagaccctgggtcaaatcccagctcagccatctatcagctgtgtgactttggtcaagtgcctgccctctctgagcctttatgtctcacctgtgaaaatacaaacactggctgggtgctatggctcatgcctgtaatcccagcatgagggattacatgaggagtttgagaccagcctggccaacatggtgaaaatccatctctactaaaaatacaaaaattagccaggcgtggtggtgggtgcctgtagtcccagctattcaggaggctgaggcaggagaatcggttgaactcgggaggtggaggttgcagcaagctgagaacacacagcctgggtgacagagcgagactccgtctcaaaaaaaaataaaatataaaataaaataaaataaaccactggcagtctgggctcagtaaacatcaggtgaatccacattggattaaaacacaaagaatagggctgtgacatggacctgagttcctggcgctgagggatgtcagggtagctgtaacccaggtctgctccacttgagccacacaattcacaggataattattggagaccaccatggttaccgaagcagctggcacggatccactggcaaggtggcccatttgccaggacagccctggcttgtgcctgggacccaggtaattgtgaacagcatcccctttggctcccggaagcagccccgctgcgtgatgcatcacgtggctgcccgtgtcctggtgctgcctgcatacccagccttgaaaatagatctctccagtgcagattctccttgaactgtctgcagtccagccaaaatgcatcctcagctgacgctcatcctgcctgacccccacccatgtctccaccctctcctcctctcctttccatcctgagaatgttcttggtcctctgggccttcccgcacgcagcccctgcacagagccttccttcacctcctcccctctcccctgggctccatgtgacagccacatttctgacaaggccctcccaggtccccgcacctctgcctcctcaacctggtttttaaagttttgttttgtaattttgcttgttgttagcagcaggtgctccaggcctgtctccctggtgcaccttgagctccacggggcaaaggtcaacctcttgtcctacagcttctccccacaccagccccgggtgctgagaagcttcttggtgtgagtgcttctcaaccttgagcaggggtcaacatccgctgggagcttgttaaaacatggattgcccgatgccaccgcctgtgtctctgactcagtgggcctggggtggcacccaggaggttgcattcatcccaagctccctggtgatgctgccactgtggttcagggagctgagaacgactggcttattgaggggacgagcccatgccctaagtgaggagtcaagacctgtcatccttcctcagatggctcaggctgaacactcgccctgggcaggtgcagggggaagcgggggtgacttaccactgtggccagctcccggtcttccgtgttgtacgtgcaggaggtgatgagcacatctccctgaggaaaagccaatgtgaccatcagcacctgccacctggcgttggcaggtgctggaggcctcgcccccataggaccacgccactgtgcatgccacggcacctctggggtacagtccctgtcgtccactacaaggagcccagcagattcatgtgcgaaggtcacaggctgagtgttcccgagcaagttataaaccatcagctcctgtgacccagtgggtcacaacagggccagggcccaggccagtgggggtgcagctggtgggccatgacacatctcaaaggacttgggcaagtccccaccgaggcctgggcttggccctctgtgggatcagggctccactgcctgccttagtgccctcatctcccccaaacactctcgggtttgtggtcggcccatcagactgaggacacgcgtcccctgggagtgtcctgtctgctccactctttccaacgtctctccatgaactcctgagtgagtctccccatgaggtagcccagcccagagccacccacaggcaccctccccctgccctggatggctctccctccccctatcactttctgtgtccctctccttctggtggcacccccagccctctcagccaccccagctggtggcagtgagtgggacagccttcccgctgggcactcaccggatggaccgacacgaccttcttcaacatgcggatctcctggggcaggcagagccgaggggtgggggagaggagacctcagagagctgcagaccagacccccggccactgtgtcctccctcaggcctccctgacctctgggggtgtccattttgccccagcctctacagtggaagccagagcccgctaagtgtggcttctggccagggagggcattagattcaaaccagaaggtggttatccaagaccaagattgatgttcccagagggccgcctgggtctcccgaatcccaccaccatctgccatgtgccagaggcctccctacgatcagacaccagacacccaagtggggagcacaggccacatgggtggggggcgggtggggctggcccaggaaaaagaagccagcctggagccatccctatggtgtcaggaaacagtagacccaggaggtcgtgtggtggcagggtgtgggggcggggcaggggtggggtgcaggttcctacctggaagtgagggctgtagtgattgtcctggttcacgatctcccactcccggccgtcccggaccagcactgtgaccacctttctcccagtcaggtgtgtgtggagctgagaggcgaagatgtggatcccggagggaggcagtgcctgtggggtcggggggctgcagtgtcagggcctgacccccgaggggaccctcccgtccatggccaggacccggtagggagcagccaccctgggcagtttgcttccctggaacacttgcattttctaggtctttctccccggccaggttagagccaccatcagaaacctcacggggaagagcgagggggccgcaacagcccccagctcccaaagaagcagcccctagtcccactcaggagcgactttctttccgagtccttcatcctctcctgagcccctgaagcctgacaggttcatcttcactcagtcaacaggcctttaaggcgagcctcccgtggacagggtgtggcaaagccaccaagctgagcagcgcgtggcctctgtgctgaagagcttgctgtccagggaaaagcaagtggcagaaggtggtacttggcaggtcccctacgtggtgggccgagcaggaccttcagctgccctgcgttgtggcttcctttcagcttcaaagcagccaaggctgcattctccctgtgctcagcatcaccccgtgctacagctgggagctgtagctacaactggaaggtggtcatccaggaccaagatggatgtgaccatggggtgctgcagctggacactctgaggctgcaggccggcctcacagaaaagatggcagccctcatctcaagaggtcttatgccatcactggggcatgagagaatcttccagagaacgaaagttttctctaacctaatgctaactttttttagatagaaaatgcatttccatggctgggcatggtggctcatgcttgtaatcccagcactttgggaggctgaggcacatggatcatttgaggtaaggagtttgagaatagtctggccaacatggtaaaaccccgcctctactaaaaatacaaaaattggccgggcatggtggcacgtgcctgtaatcccagctactcaggaggctgagacaggagaatcacttgaacccgggaggcagaggttgcagtgagccaagattgtgccattgcactgcagcctgggcaacaggagcgaaactccatcaaaaaaaaaaaaaaaaagaaaggaaggaagaaagaaaagagaaggaaggaaggaaggaaagaaagaaaggaaagaaaagaaagaaaaagaaaaagaaagaaaaagaaaagaaaggaaagaaaagaaggaaagaaggaaagaaaagaacacgtctttcctgaaatcgagcattttctttgtgagtcagttgtccttttgcccacccgctgccaggctctgcccagtttgttcatgcagtcagcaggtcccagagctcaaggtcccgacagccccatccctgaaggtcccagatggccgagctttttaggactcacttttgctccttccctctcgctcccaagcagcggccgccctgaccttgccgtcgcctatagctttgtgtcccttgcaatggcttgagaggccattgtgtgccaggcctgggagcccaaagggtcccaatgcccctttggcccccagaggccgaccctggcccagagatgccaggtgtcggccaggtggagggaggactatgctcttctgggcactctggtccaaagcagcactcttgtcttggcctatttcactgggatagctagactaggccagattttggctgcagaatttgtgcccctcttttatctgccaaaggagagacaagactgaacattctcattctgttacttaaggtagtggaggactctggcaaggggaggcgggtctgtattcctgaggctggagagaggcgttctcacagtcagcggtcagcggggtcgaaggccccaaggccctgcaaggggcagtgagtgctgcctggccggaagccgctcttccccatgagccctggccaaggtgccttttacatgggcccacgcttcaccagtgggcgctttagggaagtgggagagagtgtccacccccgtctgggacaaaaggagctgatttcctgccggagacaatgggtgccatgccggctgagagctccgtctcccttcagccttgaggaacctttgcttggaagactgggatgctctgggggctcagccacatgaagaacaaatcccaatcgacccatttactaggaaggaaaatccactctaaacctcattacaacgaaatctgctgtcacggccacagctttcaaagtcagacagactggtatttgaatcttcactctgcgtgactgctggcagtgtgatcccagcaagcctcagtctccccatctgtgaaatgggtacgtcaacacttactttgcaggtcactgtgagaagtaaagctaccgcacaggaggaaatgtttgtaacatatacacaaactatgaaataacatccatcatataagaagaactcctagaaaccaacagtaagaaaaacaaaccacctactggaaaaaccgagcataggaatgaacagaaaacaggaacaaatggccaagaggcagaggaaaagatcctcaagtccacaaatagaaaattcaagttaaacaacactgacatgtcttcctcccaaatgacagaaaatatttacaatattaataatccagtgggtcagtaaaaccgggcaccctctcgtcctatgtgtgggagggagcagaagatgggctttctgaggggcattttgcaagatttactcaagggaacactc

SEQ ID NO: 97333 - DNA, 12381 bp, Homo sapiens
gggtcgtaagaacagtgtccgtgggcctccaagatcccgggccatgatttatttgcacagtaggactgataggtcgtctctctccactttcccaccattcacctgttaccagctcaccctttcctctcccccttttccaaatgttgtttatggcaaaggagtggcttcagtgatactgtgatttacccacagcctgtgaaaaagttttctgggtgccctagcccagcatttttctaaactgtgcttattttaaggattctacagccctgaccctatctttcaggtcagcactttccatattcaaaacctccagtgggaagccgaccggcagtatcgaatgaactgaacggttggaagtggtggcaggccctacgccgctcggctttgtcatttgcttcttttttacttagagaaactaagttcttagtttctctgcacttcccctgggagacagggaagtttttgatggagataaatatctggaagtcctttgtggccagaagaacacactgacaaactctatgtttacaccttgtcaagactggattcttgtttctgagatagtggggacgtcatgatattgtttgggagaaggacggattttcttctcattctggggcccagaaaacttcaggcatttaacttctccggttgttcccaagatgttttctgtcctgcctaagatctctaagccattcctctctgaagattggccctggctcctgtgggatgctcagctttcctccctgtgcaaggcttacgcaaaccccagaagaattactcagagcagcggcagcagatcctcctgcatacagcagggtagcaaggcgtgcaagctgccaagagaaaggctagcggctgcaggcctgttgttggtcagggatacaggagtccgtgcaggggacccaggcaggtcactatttggggcagcactgtgggcttgagatgggctgagtggtacacccaaaaagtccccaggaaaaggtatgcgaaggaggctgagggtttgttattgtttggtgggacagaggtgaggtggcagggagctgacctagctgggaagacgcctgagcttctttgaggtgaggtaactgtgtccccacctaggtggggtgaccgcactaggagtcagtcttgggccattggagcaggtggaatggcaacagagaataaagagctgcaaccaaattctgtgaaaacagtttggcctgcctgggaaggatgtttttcttgcctctccatccttctagcaggtagaacagaagctcaaggagctctgaaccaagttcagggccgtgtcttcagatcctgtggaatacgtgtctttttggcatctttttgattttttcaccctcatgggtacattctgccagttcctcctgtctgacttgggctggacaccagtgagtatgagttgctgtaatatctctggaggcaggaggagaacatcctctttgtctttccctcttcctgtcttgccccagctctgactgggtcattaactgagtgggaggtggggcctctcccagctgttactgggcagtgttgaggtggccagtggaatataggtcacgtggaaactggccaccaagttcactctttgtggagccgagctgtcaggagcagcccctttcctgtagcagaaggcaggtatttggacagtggctggcatgggctgggggatgtttggctatagcttttcttttttttcatcaacttttccttgggctggttcacggtcagtcatagctggtgggttacatcatatcaaaagactaggatgaccaggttgacttttggggaggatttcagtcttagaatttttatttttattttttttaagcgtaaacagtggtctttcttaaaaattacctttattggagtttaattaatatgtacaatttgataagctttgacacatatctaaatccagctgtgaatctatcaccacagttaagattgtgaaaacagccaccagcccccaaagtttccatgtacctctctgtcatccctccctcctactcctccctgctccccagccccaagcaaccactgatctgttgctttccgacacgatatattggtttgcattttctagtgttttatagaattgtaatcttaaagcatgttttcctttttggtctggcttctttcactcagagtattattttgaggtctgcgatgcacgtatcagtgcgaaccgtgcctttgagccagttgcctttcattctcttcctattcgcactccatgaacacaagaatgcctgcttgatattatctaaaggcatggttctcattcatgattttttccttaatataaatgaatcaccgagcaagaatacaggcaacgctgcatctctcatacctgaaattttagctgggaaagttgggagaggggaaagccttcatgtgggcagccagcatcatgctcctaagaggtaagttcatttcttctctgaggtccgtctcacacactgccctgccctgctgttttctttattccagaccccaaattcttcctatagaaaggaaaaggaggagatgtatcaaactctttctcctgaacaaggtggctaacttagcaatgcaggtcacttttttttttttatgtgaatcatggccagtcctgtcttccaagggtatgtggccaaatcatgcctctcctctggagcttctgggaggtaattgattttatgggccttgcctattctaggactcttctctgcttgaggcctgagtcatatttcatggaatgttcaaactctttgaacagtgttcctttcatcttgtagtagtaaagttttcagcatcggggaagtgtctctttcagcaggtgatcacctgttggatacaggtgttgagggatgtctgaatcaccctgtgctaggaagatcgagttggctctgggattcttacaggaccatgctagccaccagcagaaggagaccagagttgtcttggagcagccatagtattggtataggtgtgattcaagggagggactgggctaccaagaagattggagacaaagagcctgggctgcagaaatagcagaaagttgaccaaagggttcttcccaccttaaggtaaggaagtggcaagtgaaataaaaacatgtagtccttgatgaagtggtgcagagttccacgaggtcatgtcagacgctcttctgggaagaattcaggagatgctgtagcttgcggagaaaggtttgagaacatttggacctgaaaaggactctggggtctaggcacgtcctccctccctccctctccaccatcaccagcaggggcagggttttttggtgtcaatgttgggatatttgctgcttcctctccactcagttttagcttttgcttaaatctattgctctggatattaaagaccgtattgaaaaagagttctcatgtgtggatgtctcctgggatagaaaggcagcaggtgtttttagaggctcctgctaacgaggtagatatttcttgactcgtgtctgcctgttagagactccttgttgatactcacagcttctgttctttgacactcagcgaaacagtcagtgggcttgttcctttcaagcacagattgtatttttttcccttaagaagttattttgtgagtaggcaattaatgaacatggtaagtattcagagtgtgaaggggaataaagtgaaaagaaactcccattcctggcccctaggctaggcacccttccctatcccctattcatatcagctgttactactggtaatggcttctttcagaaatattctatgcatatacaagaagatagctacacatattatcccacttgtccattagacacataatttatttaaacagccttctactgatggacatcgattgtttgcaatcttttagctactgtaaacaaagctgctgcagatatctgttggatgtatttctataagtagaattgctgaccgtaggatagattcattttaaatcttgatagacatttccaaatagtacattttatttctgttggatcaatgtaaaggagattccgagcccaactcaatagggccaagtcgattcttgagtcttgtaagagccagtgcatctcttgtatatcttcatagataagtcctatgtggtggattaaaaaaaaatttaacataataatgtttttccgtatttgtgatatcatttcatttagagtctacaagcatcttgaagatcaggggcttgttatcaagagtagaggccttgtgttatctaacagagctttctctctgggtgagacacagtccttttcctgtttatgatgctgtcaatggtcccaaagtactgcaaaagtacagagtaacagaatgttagaacactttttgttgttgttattgttgttatatggttgattagagtgaggggtttttgttactttactattggatctcaaggttttggtctagtaaactcttcttcatgtactcacttcctacagtctttaggaaataactgctctctgaaccaccaatattgcttccgggtcagagcctggatgtgaggccagggttcctgccttacctgggagccttttcaaaggaaaaagcagaggagctaggatggcaagagtgctgtggacctcttgctggggacctcacatctctgcaagatgcatatacttgccttgggaatggcaggccaaagcccttgggcgtatttaatgcctctcccagcaaacaggagtccaacaccttgggcccagaccaaggagcacatatagaaagctgggccagaaacagggaccgacttccatttccctgaggctgaagttcctggagcccggggattggtccaagaggcaatattttggagtagaggcattaagggcaccatctgggccaaagagtgaatagttccttcttcaggccctcaaattcttttgctgagggtggagagaacatggctgaaggctgctgggaccaaaatatccccaaacagacagtttagggcagcaggatgtccaaggaagttgagcctcatgggagcctagaaccgaaccagaatcctgagagtgatgaagtctgcactgaagacacatccaagtgaggaattcccatgtgtttgatgtctttgtgggcagctgaacacacttgccatcacatggtggcctctggcatggccacttggaggagggtggaggtgagtgttttcttggtcaggatcttcatgggatgccctggatttggattcagttgaacctctgtttaggaaggccctaatagggccacagtgtacctaaaaattgaatttgtaagctatcgtctcagatgaacaagtatgtgaacacgttatgttatagcatcaaaataaccagcctttggggccggcaaggacttatgttctgggaatcgaaggacaatgattgcagttcctgactcagataccagcttgcgtatgctggtggccagcctcggactgcgtgagtgctgcctggtctccaccggcggtcatcgtactccggatgttcacggcactccggatgttctgctgtgcccggttgcatggatcctggcctatctgtgtctggtcatactctgcatggcagaccagaaagagatgactgtgaccccagtgaggcctcccagccgtaccatgaccccggttcctgatgagtgtttgcaggattgacgggtgatgcagggatgcccgctggcatggcaggacgcatttcaagcctggcacacttcactcaaggagatcctttctggtggtgacaggatctggctcacctcccacccagccgccctgcaagatcccctctgaaacttgacagccagtcccattcccagaaagaggtggtgaccttgccacctgctcatctgcccttttccatccactcacatccgggagcactttttactacacctggaatctcctgcctgctggggcctgccctgtacccttcatcctcaggacccacctcaccagtcaaggaaaaattactccagagggctccacctccccctgcttcctcaccacggggcacagcagaacttggtacctatgtcctctgcttcaggtttccattgcaaccaatttttgtgtctgcagcttgcccagccttcagcacgaatagtgcatgccccttttccacttgccaaaagggaactggtgaggatgggctgtagaggtcttgttaggttgtgcgcggccccatcagaagtcctgatgtgcctgccttcctccaggaaccccaccttggaccatgaccatggccaccctctccatccaggtggaggagcggagcctgactctgagcagagcagacctgggcactgagcactgagttcagggtttgctgtccggactcttctaaggtggaaaaatcgctttggataaatgaagccgagatacayaggcaacaggaatcctagcagaaagtgttaacataagctccagttcaaaagaaggcaggtgttcctggtttcatcagataaaggtccatcgtggatgaactgctccccaagaaaagtgacagaaacacgctgggcttccttaggatttggttagctgcttggtatcaagcctaatttaggagtaaagtcttgctgacctttaaaccaaccaactccaaccacactgttgatatttcctttattttattattactgagttactcaggaaattatggggttattctccgtcttatgattattagtattaatgatcattatcagtgttaatagccatttacatgatgcttcgttgtttatgaagctgtaactcgcatggtctcatttactagcagtgaattccttggagaaacccaacacgtatcatcctcattttcttggtgaatccatcccttttaataaggtattgacaacttctctagtaacctaccagaaaattcccatgaagaaacagttgaattcaccagaatttggaattggataacagctagattgttttttattcttgttgtttatttcattcctcttgctatgcactgagaagaacgtttcattctaaaaatatagaaaatggtgtgttataaagacactagcaaagacaagctctatccagggagggagtctacgtagtgtccaaggagaagacgcagattgggcttctcgagctgtaaccttgggattggttagaatgcagattttgattcagtaggtctcaagtaaggcttaaggtttatgcatttctgacaagctgcggatgaagacctggaaatctggttggtggatagaagttgttgaattgggatgcctctttccaggtgtctgcactttgagtcaggcggctgtgaccctgagggagttcagaggtgtggctgtctatagaccacacctggagaagtcagcctagagggaggtttcctgatccttagtcatcaactaatcaaggggagaggttaaaggtgttggttcctagcagggactgtgttggaatgtcggtcagagaggcttctccaaccctgcctacacctctgcatttagcagggtggggagtggaggctctcgcacccataagtagatgttaggataagtaatgtgtgctttaataagaattggagattgtgcttttgaagttctggctggagaataaggtttggtacctggtggaatgattgctaagttgtattgtcactgtctttaaaaacagtgatattttgtgtgtgtgtgcatgtgcatgtgtgtgtgtattttcaccaccaggttgtcaaaatgcccctgtttttaagaaaataatctgtccatccagttcttcctcattctggcctggggtgagcccagcatgtgcctctgagggaaccagggggagaacctgtgttgcggcgggcaggtgagtctggtgagtacctgaggcagggagggctgagcaggtggcagggtgtgtgctttggagcaggtgtggcctgagcagttgtgagcctgtagccaaagcaaagcgcctggtgagcagagcagggggcaccaaaagaaggcccggacggtggcccagaggggccgaggccttgtcttagcactccagggcttcatctgcaaggatgtgggccagcagagtttctgggagagggcagatcgcacatattttcagctttgcaggccacgcagtctatcgcaagtactcaactgcaaaaagccattcgtagatggtgtggctgtgtgccaatacaatgatttatgaacactgaagttcatataattttttatgtgtcccaaaatattatgcttttgatttttttccaaccacttaaaaatgtgaaagctatcctcagcttgcaggctgcacaaagacagatggcaggctggatttgacccgaggcccaagttggcccacctctggcctacaggctgtgttggtctaataggatctcagtgtacagaatctttcattgtcaaattttagaaattgtcataagatggcttggcacaaagtctagcacataagctatataccaccatggggagaatggagaagttgggattattccacattagggacataaaacccacttgtggctattctctctaaagctttctctttggagaaaaaagtgtggtgaataggttcccataactctctaatacgcaaacacatgctacaataaattgatttcagatagagataagacccttcgactcacagcagagagtgttgcatttctccgggaccctcacagcagcctttctgagcagttgggagaggcattagactcgttttatagaggaagaagctcctgcccacagaactggtgtcactaacccaaggcgacagttctaccaagctgggggccaggattcacatccggatcttcctattccagctagcgtttttgctgtcactgtctcatacagtcctttggaagaactgtgtcctaaaatgtcatttgcaagccatttactagaacatggaagttttctctttagaaaaagaaaaatgtggtgaacagattcccaggttgcccaagatgagatgaccctttcatctgtaacacagcagaaccatagtcctggagcttcggtgtgagttctaaggccctggggctgtgagaagtaggaaggagtaggtaaaaaagcaaatttctttgcctgagagtggccccagacaaaattcccaagaggctggcgatgtccgagctgtcttctgccctgtgggcaccctgccccctccccgtctctggccatctgggccctctcgcttgttccctccctctgtgacactcagctgaggggcgtcttgtgcagtggggcccggctggccaccgcctgctagtgtcagggcaggagcgagcgccggtggggacgaaggcacagcccacaccggctcctgccccggactcagccacccagcaccggctcctgccccggactcagccacgcccttgtttcatgcctccagctttcctgaccttcctgacttgaaatgtgggtctccccagcttctcgcacggctttcgggagacagggtgggaaggagacccacccggcagcaccgagtcactgggacccggctgaggggctccctggggccgaccccgagagatgccgagaggcgctttctcgcggaccggagccttcgacggccttcccgtgggggactctgctctagctgggtcacctcgtggggggtgcgcggtcttcagaaaataatgaagacctggaatcgggtggatgggtggacgccgccaacgcagaccctctttccaggtctctgctcctgcggtcgggcggctgcgaccgtgccggggctcggaggtaccgtgtgaagtcgctgtcgcgcgtggccgcggggctggccacggtgaagcccgtgcggcgcccgccccgccccgccccggccccagcagcagcctctcccgtggcgtgacggctgccgtctctcctttcagcccgccggcctccatgccgagtgctgtgcttgctgccggctgcagcctcggcctgcccttcccctgccgcggggccccgtgctgaagaaagaccccttcccaggtctggctgaggcggaggggagcttttcccagccacctggacgcaggcgccctcgagagagaaatgccgaggacctgcgaaggggcgaggaagccgatctctctgcggcccggagcctccaggctccagaatgtctttgtctttccaggctggactggagcaccctggtccctctgcggctccgccatcgacagctggggctgcaggccaagggctggaacttcatgctggaggattccaccttctggatcttcgggggctccatccactatttccgtgtgcccagggagtactggagggaccgcctgctgaagatgaaggcctgtggcttgaacaccctcaccacgtaggtgctgcccctgtccccccggagcctggttcctaagcagggcgcctggtgtctgcatgcgaaaaaatataagaggaaccggcccaggtcctctgcccagggcgagagagccagggtctccctcctcctccccaccacagagctcctgactcatgggcgccaagggacatgaaatggatgtgaggtctagaggaaccgcagtagcaatgtcgcacaaaagagtatagggaaggcggtgagtgcagattgaggaggtgattcagtgctagcgaatctttttgtgttacaagcagtcttcccacttccagtttatacagccagtgaacggagtcttcttcaggagagctgcctgagaggctctctggccccagttttcagcactcctcttgggcagtggtcttagaatgctgtggttgccatcccagcctctgctgtgatgattggcacatggtaggcacgcactaaaatgtcgaacttgcaaatcatttataaagtgtgctcagttgtgaataacctggatcttttcatgggttttccccccaaattgccaactgatacttgacgctaagtctatgaaataaagggggtgatcaggctggattattccatgtttaggcaaaaatatgtgattacaaatcaaggagatggcttttcatgggtggtttatgaactgattttgaagacagttccttaaagagttacagaaacctgccgagccttgacaacttccccgaaaggactcctgaaggctgtgggagtgctgcaggctcagcactctgactcgcagaagcagcaccgacgacacttgctgaaaggcagagctcgtgtgtctgggttggaagccaggcaggctctcctccttcatctgagaatattctttgtagtgggcagaggctctgcgaaagccagcgatggggtggggccgggagaagagcagctgccatcactgtgtcatccatgagtcgtcccttccgcctctcgagttgagcctgtccatgagcctgctccatcccttgtcctgtctttcgagttggaagcttcattctgttgcccgttttggaattccggggcttcagtaaatataggatgatcaccgagctttccccttactccttgtagctgtttttttgataaagttacattttcttctccaatggggcgtgggcatggtaagctaactggggtcagagcgcctgaccttttactcagccggtcttatgcttcatccaaatcttgttgatgcagagggaagagggcttgccctcgattctggtccctagatcagttcacttagttcttggttccagtcctaaaatcatgaagaaacatatctttagccatcatattggatttttgggctaaagaaggtaatgtgagaggtgaaatggaatgaatgacatgctctagcctataattatcatttctgttgcagctatgttccgtggaacctgcatgagccagaaagaggcaaatttgacttctctgggaacctggacctggagtatgtggtgttgctgcttctgtgaactggccaggggcagggcacagaggtggctactggggtggattagcaaccaaagagaaccagggagggacgtgggtctggagtcctgttctaggactgtgagaggccctgcacccaggacccagacgctccccagtcgtgacctgtcacccagagggactgggcctgcagcctccgggccccacctctccactgcagcccagaggggcagaagaccctgggagccgcccgactctgcatggggtccggccgctgggctggggcagggcggcccctctaggctagcaaggctatggggtcaggttcactgttgagaccactgagccctgggtgtcacccttcctcctcaggcccccgatggggctgtgcagaggctctgaggctgggagcagctcaggccaccgacctggtgtgggagtccccgcgctttgggggtggggccgagccgtcccttcgccccaccaggcagctcctccaccctgtgatgcgtgtggcccccacccggcctcatcctgggccgtcgtgggaggggctga

SEQ ID NO: 97334 - DNA, 13586 bp, Homo sapiens
  misc_feature (1)...(13586): n = A,T,C or G
ctaaattttgttcttttgtgaaatagagtacagtagctatgagaacagtgaattaacagtaattcagttgtttggtatttaagactaatttctaattcttctgtagcatttattaagaaaagttaaaataactgcttaatttgagatgaaattaacacatgagaacttcactcattaggtggtatgttctgtgactgttgtttaatgtgtattttatggcagttttgactgccattttgtcatttgagaaaggtgaaatgaagtactattttgggctgcgaaacctgaagttgtagggaaacctgtgtttgaagaccattaagaagttgttttgcatactaagaatggcactgaacatcattatcaatcctgtgtggttttgccactgcttgacttgcacaattcacattgattttcatattttattcattaaaatttttaaacacatgttttttaggtcgctttggtcatcttggcttagccatcaacttgatcacatatgatgatcgcttcaacctgaaaagtattgaggagcagctgggaacagaaattaaacctattccgagcaacattgataagagcctgtatgtggcagaataccacagcgagcctgtagaagatgagaaaccttaacaagcatgtacgtccctgacagaacagctaagaggaacctttaaatgagggaaatcaaaatcttctttcctgggggaaatttgatgtcacaccatatataatagcaataaagggtaaaatacccactagcataaatgacagtaaataatatctcttgtgggaggttgtagtctcattcgagaatctgtaaatgttgttcttgaatgcagcttcccgggtaatgtggtagattagcagtacttaaattcagagtcctaaaataatgaaagcaaaaaagaatgtttttcagcaatttgtttttctttttgagacaaggtctcactgtcatccaggctggagtgcagtggtgcaatcatagctcactgcagcctggttctcctgggctcctgagtagctggaactgtaggcacatgccaccacgcctgcctaatgttttaaatttttggtagaaacaaggtcttgctttgttgcctaggctggtccagaactcctgaactccagcagtcctcctgccttggcttcccaaagtgttaggattataggcgcaagccactgtgccactgtgcctggccttttttgacagttttgtaggggggatttttgttgtttttgttttttgagagtcttgctctgttgcccaggctggagtacagtggcacaatcacggcccactgcaacctctgcctcccaggttcaagcgattctggtgcacctcagcctcccaagtagctggaattacaggcatgctccaccatgcccagctaatttttgtattttttagtagagttggagtttcaccatgttggccaggttggtcttgaactcctgacctcaagtgatctacccgcctcagcctcctaaagggaggctgggattacaggtgtgagccaccacactgccagcagttttgaatatgaaagtatttacatttctgaaaatgtaaaatgtttttagcatttactcttaatttctagtaagtacattaatcactctgataaaactatccataataccttattagcaaatgtttaatcagattatgaggatggccatctttttaaaatacccactctgggccgggtgcggtggctcacacctgtaatcccagtactttgggaggccgaggtgggcggatcacgaggtcaagagatcgagaccatcctggccaacgtggtgaaaccctgtctctactaaaaatacaaaaattagccgggcatggtgacacgcacctgtagtcccagctactcgggaggctgaggcaggcgaatcacttgaacctgggaggtggaggttacagtgagctgagaccgcaccactgcactccagcctgggtgacaaagctagactccatctcaaaaaaaaaaaaaaaaaaaagccacttgggctggctcagtggctcacacctgtaatcccagcactttgggaggccgaggtgggtggattacctgaggtcaggacttcaagaccagcctggccaacctggtgagaccccgtgtccactaaagatacagaaaattagccaggcatggtggcgggcgcctgtaatcccagctagtcaggaggctgaggcaggagaatctcttgaacctgggaggcagaggttgcagtgagccgaggtcatgccattgcactcgagcctgggcgataagagtgaaactctgcctcatatataaataacccactctgatttcctaggtaataagagtgaaactccgtcaaatacataaataaaatacccactctgatttcctggacaacctgtcttcccatcttttttttatttttattaagatgggatctcactatgttgccccggctggtttcaaactcctgggttcaaatgatcctcccactttggcttcccagagtgctgggattataggtgtgagccaccacgccctgcctctatcatcttttggtgactattgggctctagttagaaatgcatgaaacaaggctcagctttaagcaaggtaggttgtttcagtatttcctaaagaaaatctgatttgacaaaggatagtttccaagttataggtgaacatcttacctatttaagtaacctaatgttacttaaattttttttctctttcttttttaaatagagacgaggatttaccatgttggccaggctggtctcaaactcctgacctcaggtgatccgcccacctcagcctcccagagtgctgagattactggcaggagccacctcacccaaccaattgttacttaaataatttttaaattactctgtactctttttttccttaagttaaacatcaaacacaaactcttggacaagcatgaaactagccaatgtttgctagtactttggcagagtattcagtttgtgtaaggttaatttttttcccccggatttgttacgagtgagggctgcctgctatcagaacattcacattcattcaggcccccaatctatctcagggttgcctaccagaaattatttaatcctataaccagtagattctatagtaggcacagggttagtagaaactactagaaaagagcatttgggatgaggattgtgaaaacctatgtatcctagtttgtgttgctttcagaatgttaattttgtattctcttcttctgtaggctttgacaaattacaaaaggctcgtttggatctgtgacacatcgttttggggggaatgctcttctctttgtgggtttttcatcttttattttggaactatgaagacttaaaagagctcagacattttctttttttaactggtgaagagaaaaaggctgaaaagaaggaatataccttttttgttccacttgtttgcactgtgtgctgactgaacattagttgcactaactgctggtttttaaaaaatgttttctggggaaaggggacaaggaaggaaaagaaagaagagaaggggagaaaccctaaaaagagaagaatcttaatgaacacacaagcttgtcaatgatttcaaaattctccaacagctgactctcgtgcatttcaacttctccctgattcctcatccgttttttaagcctgaagagcttattacttatttgtgcgaagtgccttatgctatgagaccattcagaatatcatcttttagacacagcccgaggaatcaacaatagtaactctttctttccgtttttttttctttttcttttaaaaaatgtctttttattttggtttcaggttgaagtctcttccctttctacccagtactcgagcccagggctagaagttgaaactcactagtaatgttaaacaccattttttttttctttttggggaggagttgatatgcaactgcagttcatccgcactgtaaatacatgtatttaaaaaaacaatcccaagtaaaaatttcttctgggctgagtagataaaaaacatcatcgctcccaaaggaaagagcagtctatcattgcaggagccatatgacaagcctttgtgctctatagcagacactaaagactgggttacatatgcctccagtagtagtatggcacttgatgtgtagacatgtcagagccttggccctctttcctctgtggcaaagcgtgtcccatagaaaattgggtgtgtatacttgtataaactttgtaaataagttttttttctgggttcatatatatatatatatatatacatatatatatatttttttttggatgaaggttgctgggattaaggggattagagtgattatgggagcagctaaagatgagaggggctcagttttacgcaacactaaattctagaaagtactttggcctcgtgctgtagagagcagatttctatggtaccctgtgttagtaaaggggcccagaaatctgggatgtactgtttgctgccacactgtctcatctagtacctttggagtaggtttaccagagagagcaaggaagcttcaaaacattgataattcaagatttattttgagaagctctgattttgcttcttccccctttctaaaagtttgaggaatatttcaagctctgcaacagggggcaaagattaatctaccttgcagtgtaggaattctattgagtggcagtgtcattgagcagtatatatataaagcacagatttgcatttcagaatattagccagtaccagctttggtaatgttagcagttctggagcttaattttctgtggatcatttcctgtagtgtgtaaatgtgttgccctctgcccgctttgatacataaacttttgcaggaatgggcaacctgagagctgttaactttcatgctacagaaagctgcttgccattctcttgcattgtgacaagaattgttacctgtcattttgcactgtaaattgctggcagatgctttacagtcaatagtgttgctttaaattgtgcccctcccaacatgcttgatgtttggcctgatctccaggcaaaaggagtgagatgaatcaaaaccagtgaacttttttttttaatgtttttaattcccttttaacccagtgtactaggtcaatcaggaggcatctggaaagggggggaaaaaagcaaaaaacaaaattaaaaaaaattgatttccatattttatttttcaaaaccctaaaatattacaaaataagtcccgcatatactttaatgttttaactcttttggacaaaggaatcaattacttgaagttgcttttttgactctgcctacttctgagcaaactatttgcgactcacccacaattccttggagatcaaaatcctgcagatgcctcctgatgggacatagccctaactccttaacaactgtagcaagaactgcacggtacaaacccaaaaaagaacaagctcatctatttggaacccaagcctcatattttctgtccagtcaatgttggttactaaatagaaaacctaattaaggaagtaacttttttccagggaggggtgggagagggaatttaaaaggtgtcaacttttgaccaaaaaaattgtgcccttgtaccgatgcagctctctttctcccccacctcttgcgagataagagggatcattcatgtagaagaaaagagtataaatgcaattctgtatctcgctagagaacgtgtgggtgactaaacaaaaagtgcagtctccttcaccaactttagactgcgtggtgccacatgcctgtgggtccctcttaaagcacagacttaaaatggaaagtattactgaagtatagcctctaatgaggagtggcacttaaactatctgggacaccactactggacacggtcttgtagaggcagctgtccagttttggtgcttgactcttgaataggaattgttaaatggaaagatgctctgaggactaggtcaaagcctggtctttttttttttttttttttttttttctttcttttttgggccctcataataagcattgttactattggaagttgttttcacattctttccaatattaaatatgtatttttttaagtaatgataatattttccartggctcatttggatgagaactaccctctatttttaatattaaaactacatccaactcatcatttagcctttggttgtacagttgtgtaatgggctatggactgttacacaccttaccacctctaggcctatgttttttctttccccatatattctgatggggataaatactgttttgcctctcccataggaatggaatacatttattctaaaatgatctttcacagaagtaagagagagggaaacctaaatatacctctaaattgtttgaagttggtcccagcagcataaaatgggttggccccaaagggttggagggtgggcttggttatcagtatttgttttcagaatgagatgggagcatctttcctttgccacgtgctttgtgcttgataacatcatgcttggttcaaacgacaactcagcacaaagccttgagtataaattgttggaatcaaaacatctcattctgatgacgtggtttaattttttaatttttttttttaataggggtgggagggagggtacttkgccccaraagggagggtgtctgcactaaggatttagaaacacttkggaagctcataacctcatcagaaactgcctttagccacactcctgaccttctagatgagtaacaaaaaaatgaaataagttcttggaaattaagccatttattttaatttgctatttttttcaatgttctargtatctttaaatttgttattgtggaatcattttcctgccagatacctttatcaaaattattggcctcatgagagctgaagtaagtcagctttttggtgaactttagtggacttctgtgagattgtagttgtactttgtatctctaaatctaaagatagttttttaaaactcccaaagaaaatctgctctcctttctgatctaaaamctcatctttggggtaaagagttaagtgtccaaaggttgtcacagttcatgaggtcagagggagctagcctggcacctggactctgcccatccacagctgacagattccaacagaagtgtatttaaattctccagtagacaatgctgggtaagggagggggtagggctgggttattaagatacaggctgctgtattttacattggttgtgkgggaaggggagcctggagaaaacaaagtcactattcccttttttgaaacagraaaaaaaawtattttttgttcagtaaaaatggtagagaattccaatgtccctagccacaagggaccagttccactgagaagtgaacagtgggaactcaaaatttcagaaacattgggggaagggaaaattggctttctyttaattggcaratgttccagtggggsgggggggctctgtttttgttgggatgtgttatgttgtatgtacgcatatatggaccggagtctgctgagtttataaggttccaaaaatatggtaaaatcttggtttttgttaatttatctcaataaaagcccmctggaactccaaatgtgtgtgtggtatgtccttagtagcagctgtgtgcataggaatctgagcattttgctcaggtaattcatactgtgaaacagacatttctcaacccatcattcctgtgaagcccagttgaattcagagccccttcatctgttgtagatactgttccaccatgctgtcagatttcacagcctaaatggagaaccaagataatcggttgggaagaggggagatgtggtccataatatgtccaaatacatcagtaattaccacctcctacaattgttctcaaatgtaaagctgaacatacccccaaaaccaaggcatactacatcttaacagtatgaatggaattcatatgctgagaactacaaaccactgatgaaataaaagattgggaaataaaagttgggaaaagcagacacttaaagttgagcacatcactctcactacctctctacccaaagaaatgcttaagtataactaagaaaatagagtcagtcccctgtatctgggttttacgtctgcacatttagtcaactgcagaccaaaagtgttaggcctgcaatggttgggtctgtactgagtatgtacagatttttcttgttctctgaactacagtataacaactatctacgtagcacttattgcactagatacgagtaatctggaaatgacaaagtgtgcaagatgatgtccagagattatacgcaaacactacatcattttatataagggacttgagcatctgagggtttgggtatttgcaagggagggtggaatcctggaaccaacccccatggataccaaggggcaaacaactgcaatacctatatgctggagctacaaaataaactgacagaaaaatcagacctagataaatggagatgccatggttcatggactggaagaataaatcttgagtttcaccaatttggtctagagggtcaatgcatttccagtcaatcccaataggcttttttgtaaatacccacaagctgattctataaaataacgtggaatgctgggtgtgttggcattcacctatagtcccagctattcaggaggataaaatgggaacatcagtggagcccaggggttccaggccagcctgggcaacatagacctctctaaagtagtaaaatttatatgggaaggcaaattatgctgtaacaattctgtaatgggaagaaattggaggagtcactacctgatttggactcaatataaagatgcagtaacgtattagcaaaaggatagacatgtattgatggaacagaatagccgaaaaatagacccacacaaatatagttgatttttgacagtgcaaaggccattcaatgaagaaaatagagtcttcaataagtgatattgaatatgttgcaaaaaatctttcacccattccttgtgccttctataaaaactcaaaatggatcatacggccaggcacagtggctcaggcctgtaatcccaatactttgggaggctaaggcaggcagataacttgaggccaagagttcaagaccaacctggccaacatcacaaaacaccacctctactgaatatataaaaattagctgggcgtggtggtgcatgcctgtagtcccagctacttaggaggctaaggcacaagaattgcttgaacccgggagagggcggttgcaatgagccaagattgcgccactgcactccagcctgggtgacagagcaagaccctatctcaaaaaacaaaagaaatggatcatagacctaaaagtagaacatgaaactataatttctggaagaaaacgagagaatccgtgacctgtttgggtttggcagaaagctgaacatgcgatgttatggagaagattgataagcagctgttaaaatcttcttatcaattaagtgagctgtggaggatatagaataagtagtaacttagaataataggaattagaatttagttcaagtaaattcagaagttaaggagaaagctgggcccagtggcacacgtagtcccagctactcagaaggttaagtctgggggatcgcttgagtacctgcagttcaaatccagtttgggcaacatagatcctgtgtgtgtgtgtgtgtgtgtgtgtgtgtgtgtgtgtgtgtctcaaaaaaaaatgttaaggagacttcaaagatttacagattgtacattggaaaagtacattggccagtcacagtggctcacacctgtaatcccaacattttgggaagccgaggtgggggtattacttgaggtcaggagtttgagaccagcctggccaacgtggtgacaccctgtctctacaaaaatgcaaaaattggccagatgcagtggctcatgcctgtaatcccagcactttggaaggccaaggcaggcagatcacgaggtcaggagttcgagaccagccagggcaacatagtgaaaccccgtctctactaaaaatacaaaaattagccgggcatggtggtgcatgcctgtaatcccagctactcgggaggctgaggcaggagaatcacttgaacctgggaggcggaggttgtggtgagccaagatcgtgccactgcactccagcctgggcannnnnnnnnnnnnnnnnnnnnnnnnnnnnnnnnnnnnnnnnnnnnnnnnnnnnnnnnnnnnnnnnnnnnnnnnnnnnnnnnnnnnnnnnnnnnnnnnnnnnnnnnnnnnnnnnnnnnnnnnnnnnnnnnnnnnnnnnnnnnnnnnnnnnnnnnnnnnnnnnnnnnnnnnnnnnnnnnnnnnnnnnnnnnnnnnnnnnnnnnnnnnnnnnnnnnnnnnnnnnnnnnnnnnnnncactccagcctgggcaacagaacgagactccgtctctaaaaaaaaaaaaaaaaagtacaaaaaaataagccaggcatggtggtgggcacctgtaatcccagctacttgggaggctgaggcagagaattgcttgaacccgggaggcggaggttgcagtgagccgagatcgtgccagtgcattccagcctggacgacagagcgagactccgtctcgagaaaaaaaaaaaaaaaaaagccgggcatggtggcatgcaccctgtaatttcagctgttcaggaggctgaggcaggagaatcacttgaacccaggagtcgaggttgtattgagccgagaccgtgccactgcactccagcctgggcagagtgagactgtctcaacaaaaaaagtcaagtcagataacctgtctccaaattcagttctttcactgcactaccctgtctataaaggaatgtggggggacatgtcttcaatcagaggagcaaagagaacggatatgaaaatcacttaacagtactgtacagtctggtctaaggtcagacttccttgtagactctgtgggaaagtattgattcttagattccccggttgtctttccattatctcattaatctaattacagaatagagagtgtagcaggtgcctacatcttcagggctgttctctaagctcactgtctccacagattggcccgtatgaaccacactaacattccctttggtccctggcttccatttgggtttgctcaccagggattccccccaggaaatcagtgggaaggaagacagtaaggtcctctaattccctaattagagtgtgtctgcctctaattccctccctgcaagattgtctctagctgcttcgtccttcagcgtgaggtctcttactgagtctgaatctacatgactcttgcctcattttctggtaactgttgcctccctttgttaagttctgctacataagtcctcttcaaattatgctattacaagtgcgccatctgtttctttttgggatccagactgatagagtaattggtaccagaagtggccctgggaaacagactcttaaaattagatctgggattgggttagtcatacttgaagagctcaataacctcctcatgggaggtggtggaggggaggccgggaatgggacatgagtgatccatggcatacagtggtgtcacaattcaaattttgactggtggtaccatgggatggagtgaggtaaagggcaaggcatggggaaagggagctgtgacaattatagtgacaataggccctcgagtgcatgcagaagaataagagaaataaaaattagggacatgccagctgggtgcggtggctcacacctgtaatcccaacattttgggaggctgaggcaggtggatcacctgaggtcaggagttcgagaccagcctggccaacatggtgaaacccccatctctactaaaaatacaaaaattagctgggcatggtggtgggcgcctgtaatccctcgctactctggaggctgaggcaggagaatcacttgaacccaggaggtggaggttgcagtgagctgaaatcgcaccattgcactctagtctgggtgacaagagcaagactgtcttaaaaaaaaaaaaaaagaaggaacatgcaattaacattcaaagagaaagagaaggcctccttgggagttttggtgaagggcccttatctgtagatatttttggtgttagctaattgattccactgtccctaggactgaaatagatggcagcctttgaaaatcaagttttacttgatttgtataaacagaaaagctctagatctgttgaagagaattctgacttgagctagtctgttgaactcccctcaacaaggccagttccttgaataaaagggaatctgaatctgggtcccccttctagccttttttttttttagacggagtctcgctctgttgccaggctggagtgcagtggcgcgatctgggctgactgcaacctctgcctcctgggttcaagcgattctcctgcctcagcctcccaagtagctgggaccacaggcacgtgccaccacacccggctcattttttgtacttttagtagagacggggtttcaccatgttggccaggatggtctcgaattccagacctcgtgatccgcccgcctcggcctcccaaagtgctgggattacaggcgtgagccaccaggcccggccttctagccttatcccaaaagggcttgtgactgtttaccagggagacaagggaagaggaaatagacgtttgaggactactgtagacccagaataatacggctcagagtaaagactatgctggtcaagtgatccatggagttttggcttgggcccatctcacagttggcctagtgggtccctgaacccaggtccacacagcatagtgggaatggacagcctcagcaactgacagaatccccaatttagttccctgacccatgaaataaggaatattatgacagaaaaggttaaatggaagacagcagaactgcctctttcaaaatagtaaaccaaaaacaacactgcattcctgaaaagactgaagcggttagtaccatcaacaaagacttagaaagtgccggatggtggttcctgccattactccactcaacgcacatattttgtttgttcagaagataaaggatcatcaagaacgacagtggattattgtaaacttaatcatgtggtgacttcagtgcaatctgctgtcccagatactgtgttctgtttgtctttttacggaagcaaatcaacatcccctgccacctggtatgtagctattgatgtagtgaacgtgctttttttttttttttttttttcccccagacctgatagtaaacactaccaaaagccattttctttcagctagcaggaccagcaatacaacttcgttgttgtatgtcagggctctattatccctctacgtagtgtgcagagaccttcatcacctctaaattctatggggtatcatgctgatccacggtatcatggacgtggtgagcaggatgtagcatctgccctggatactttagtaaaactcaagcctgccagaggatagaaaataaatccaacaaaaaatcatgaacctgcctcctcagtgaaattcctggggatccagtgggctgggccatgttgcaataatccctttctaggtaaaggataaattactgcattggcccctcctgcca

SEQ ID NO: 97335 - DNA, 44413 bp, Homo sapiens
aactttaaagttcagtccacatggtggcacacgcctgtaattccagctactcgggaggctgaggcaggagaatcgcttgaagctgggaggcagaggttacagtgaggtgaaatcaagccttagcactccagcctgtgtgacagagtgagactccatctcaataaataaataaataaataaataaataaagttcagtccatacagactattgaggcaggattattatgaactggagaaagaatgaacatgattcagagatcctggacttgttgctggatgaagttactgatgaggatttgagataatttctttttggggggtagaaggtgagtatagtgagtacaatttaggttataaaagggagggttgtttcagtttggagttttgttttgttttttgaagtgtaagtagagaaagaagggtgtatttcgatgtcaggcagtcacaagtgtttattatagtggacacctatcattcttattgtacactcagaatctgtaacccctttgtatgtttggacaatatcccaaacataagagacagagagacaagacagtgagcacgcaccttacactatcaaagctggcagtgctcactgtcactttccgcgtgtagcagactcagccaattccattctctttaatttggattccctaacacaagtaagttagggaaaggagaaaagctaacttgggtttgttaatgagtggttactgctatggataactgggcttaggccctctaggggccctcaaaaacaccgtgaaatgcatctgtgttcctctcaggggcaaacaagctgaagtatttgctgttagatctggctatgagacaggaagcagggtatgctttgtgggttccttagaaaatgtcagctttcccatttcaaacgctgcacattccccttcctctttccttgtcccttaaacctgatttgatggcactagggctgcaacagccaacttgcaaccacaagggtaaggtgaagtgaattgcagaaatatcagctctgacattactgagccagtaaaactgcctaccttcatttttcttgtatgtgagaaaaactgactttaaaaaggtgactacagtcaagttttctgttatctgtgggcaaaagcattcacattcgtaactgatttatttggtctcatttacagccaagggcacaggcccaattttgcttttgtgggtttttttatttaaaatttttttccttgagatgaggtctcactatgttgcttaggctggtcttgaactcttgggctcaagtgttcctaccaccccagcctcccagaatgctgggaaatacaggcatgagccaccacacctggcctaactttgagtccaaaggtcgcaatacaggccaggtgcagtggctcatgcctgtaatcccagcactttggggaggccaaggcaggaggattgcttgaggccgggagttcctgaccagcctgggcaacatagcaagattccagctctacaaaaaatacaaaaagtagctagtcatggtggcatgtgcctgtagtcccaggtactcctccggaggctgaggtgggaggatcacttgaatccaggagttcaaggctgcagtgagttatgattacaccactgcactccagcctggctaagagcaagattctgtcttaaaaaaaaaaaaaaaaaaaaaaaaaaaagaaggccgggtacggtggctcacacctgtaatcccagcactttgggaggctcaggcgggcagatcacatggtcaggagtttgagaccagcctgaccaatgtggtgaaaccccccttcactaaaaatacaaaaattagcctggcatggtggtgtgtgcctataatcccagctactctggaggctggggcaggagaatcgcttgaacctgggtggtggaggttgcagtgagctgagatcatgccactgcactccagtctgggtgatagagcaggactctgtctcaaaaaaaaaaaagaaaaaaaaagttagcaatacaaagaagcaggaactgtgggaaaactttctggggatggggacagtagtagtagttctggtggcaccatccagtatgttgacactttagatcttattttgctttctgatggcctttgccagggaaacagacaagagattctctatacttaataataattgttactactcattgagtgtttactgtgagccaagtgttttattagttttctgtcctaattcctatcaaccatttaagacggctattaatatattctctgaggttaaatgaggataactccaagatcacacagttggcagagttgggattcagtttcagagtgaccccaaagccagatcttaatcatatttctatattgcggctatttcttttgccaactcctaatttttgggcctgatcccctatctgaggctgaaatctggggccatacccttggaggggaagaaagatagggtcacatagactgttgtctgtcattagcccgtttggcagggggatataggctctgcccaaacgtagacaggctctgagccaggttgcacagatgcaggcagtcctctgagtcaggctgggaaaggctccagatgaaccgccagacttctgtgtctgaaaccctgagagataaagaggaaacttgggtggctccctcagagacaaagtgattctgcaggttcagaatgtgctgaaatccaggccataagaaagtggcaataatacatgaagagggggaatgtgtgagaatcaatcaactctctgctggcaattcttgcttgtaaattgattaattgaattctttcttctccttctcttcccaggctggattttgaggactgaggctcaaaacccccaaacccagatccaatcctttttacaccttccatttccccacatgccaagtctcagagccaacttggcccctctcacccttttcatttagtcaatttttactataaatacttattatcaattttgtgccagacaaacaaggacttattgggaggaagcaacttacaggagaggaagctattaaaagataagtgcacaaataatgaatgaggattgtaatacctgccaggaaggaaaagcagtattgaatgagaatgtgtcttaattcattcctgctgctataacaaaatacctagactgggtaatttataaataatacaaatttctttctttttctttcttttttttctgagacggagtcttgctgtgtcacccaggctggagtgcagtggcgtgatctcagctcactgcaacctccacctcctgggttcaagtgattctcctgcctcagcagattcgagtagctgggtttacggccacgtagctgggactacaggtgcccaccaccatgcctggctaatttttgtatttttagtcgagatgaggtttcgccatgttggccaggctggtctcgaactcctgacctcaggtgatccgcccacctcggcctcccaaaatgctgggattacaggtgtgaaccaccgcgcctggccgattcagattcttattagatctttgtgcttatcttctagcagttctccctgcctcttttgttgcccactgaaggccatgccctacactgtagctagatttttatttctaaaatacagtatgactagtgcctcctcgctttcacattaaggtttgacctctcttgcctagcatagtttgctcaacctccttttcttcagccttatctcctacttttctcctgcaggaacctctcacctcagtccagcacagattcccatctccactactgttcattcatgtttgctctgcaaggatctatctgtccatctctgcctaggaaatgactattctgaattcaaggcactcactgaacatgtgctagatgagaactcaccatggatgaagcactgggtactggacaaggggcaagatcagcgaggaggaaaaagctggaagacagaaggcagcgtatcttctgatgaccactccaaatggaaatatcatttccaaaatagactgtaagctccatgagagcagtaacagggtctgacttgtccactgctggatccctagttgtgcttggtacaaagtagcatagcaattattgaactcttccaataattgctactatgtagctcaatagttttttttcagtgcataaatacatgtgacagatattcttttatttatttttttgagacagagtctcactctgtcgccaggctagagtagagaagcacgatctcagcttactgcaacctctgcctcccgggttcaagcgattctcctgcctcagcctcccaaatagctgggactacaggcgcatgccaccacgcccagctaatttttgtattttttagtagagacggggtttcaccatattggccaggctggtcttgatctcttgacctcgttatctgcccgcctcggcctcccaaaatgctgggattacaggtgtgagccaccgcgcccagcccttcatgtgacggatattcttaaactatcttcccatctcctactggagttacaaatgcatggatctagacttcttaaaagactggacattccttagggcaggggttgtaacttaagtcgtgtgtgcattctttataatgaagcattttacaaagtggtttcacatacattactgcttccgtttctcattacagccccattaatattccccacctgatgaggaaactttcttcattctccttcctgcttcctcttctctctcctcttcctctagaatgcgtgtatggtctatgttccttctgtctctaatccagaaagagatttagaataactaaatgcagagtcaaagattatgtccaaataaagttagagtttgtgtgtgtgtgagacagtgtttttagttaaatgtcaatatttaaaatatactatgacttttataccatattttttcatgttgtcatgttcttttaaacatgctgggagccataaagttaggaagaggcccagtaacccgtccaaagtaacctgaccaaagtctgacccctagtagagggcctatgccagcactggaacccagtgtctccagatccagaggcattcaccacctcaaatctgcctcaaatgtctgcagtatggtctatcacaggggctaattaagctcatgggatttagagtcagacagatgtgtttccttcaaagtttcaacagttactttctgaccttggcaagttattcagcttcctcatttgaaaactagagggcataatggtacctaccaccgagagttgctattaggagtaaatgaaaatacgcttgaagaactcagcatgggcctggcaagtagtcagcgtgcagtaaattgtagctgttattttaagaactttatttgttgaatgattgactctggcacataacgcctgcattcaacttgaaacacggagctgtcacagtcgttcagctgaaggggcgggaactgtggcacttgccaattttttctagaaataaatctttgtgggaggataatgaccggttggagagtgtgagtcttgagggaacaaagatcggatctcccggcccaaggagtacggaagcgaagcctcccctgcgcgcggcagccaccgtgcgtaacctcccctgaaccgagtagcagccgcctgagcccacccagccctgggcgaggctgcctcagaagccggatttcagcagagtgggtgcaggatctgctttaattctgctcatcttattctcggggaccacaccctgcgcgccgggaggaagggctccaaaaccacagggcggaggcttccgcgcggccccagacttgaccatctatggtcacagaacacaccgaccaaacaggaagtggggtgagagcggagggttccctaccttcccagccccgcgactgccagccgggctggggctgacccaccgcgccctcactgacccccacgccctgcgcccagtctccgcaagtcctcccacaacaatgtccagactaattgccttcccacgtcacaaacggggaaaccgaggtatgcacgcccagagacaggcggagcgtggcctcgatcmccaccgagagctgacggccgcycggattcccgccctcagagaatcctggcccccagtcgttccaagaccctttacggactgcagcttaaaggaaccggcctctgccattgagaccaaactgacagaggaactggtcactcttctgttctttccagagaggagcttagccagggacttctgcccttcctgggcccgggcctcgggggcgattccgggtaggtaaagcggaacgagggcgtggcctctcttgtgagcccgccctccccgtgtcgctcccgccttgagggcggggctctttcccaagtgccctctgtragagccgggccgctctctccggggcgtggcgaagaggggcggagtcacgagcggggcggtgagacttcctgcccagtcgcgggccagcctagcgcttcagccggcggctcatttccggtgggggcgccgcgcccagtgagggcccggaagtgggtcgcgcggagattgctgggcggttcttgccggaagcggagagcggctgatcgcagtccggaggtgaggcggaactctgaggtgagggtgtgcagcttggtagggattggggtcccttccggggcccatcggcccctggtgktgttaatggcccttctggcctacgcgcgtgtcatgaaccctgccgagagggccggggctgaggccctcaggccgacccggactcttgggcgcggtctcttgaggtggggccggggtgagcagctgagtccgggtgccccggggaggcccctctgcccgatttcgcagcgctgcccatcagcttcagcggaggcctgattcctgaggtgctctgactggaaggaacctccgagatcggagagtcttccctgtctcctgttgatgctcccattgcactgataggtaaattgatccctagagaagaggctagtctgagatatatagcgagtgaggaaaagaatcggaatcatgatcctggtgccttagataaccagccccagttcttcccgtgttgctcggaacctctctaacttgggatggtcttccggtcggtgttgccccgcaggctgctgcaggttaaaggccagcgctgcgtggaacttttttttttctctcctcccaaattgagccgtttgaaatgcctagggagtttttaaaagaaaggcgggcacatccttgtatttacaggcagatatcctccctttcctcctcggctgctgctcttactttgamaagscaggctaacattgaaggtrtgtacttctggacctgaaatcagacggctcaggtttggtctggcctcagtgctragtgtctgtggccataggtgccttaaacttctttcagcctccttttgttcatcttttaagtggagatctctgctgaccccacaagattaaattcagcgtaacaaattgtgtttattctgtgccagcattttcccagatgcggggaatgcagctttaaaacaaaacaatgtagaccctgcccgcgtggagctagcagtgtttgcagggatgtttaagaagtaattataaatgttgatgagtgttaggaaagaacagggtgctctgaaagtatgtaacagggggttcaggaaaagcccttctgaagaagcagagtttttaagatgaattttgaaggataaataggaatgcgttcgaagagtggaatgagaacatttgagacaggttagcatcagaactgtgtcagttgaagctctttgtggggctctctcttcaagagaaaatccgggggcatatcagcacatttatcatttaccagacttttatttawtttatttatttgtatttttagtagagatggggtttcgccgtgaaggccaggctgctctcgaactcctaacctcaggtgatccccccacctcggcctcccaaagtgctgggattacgggcatgatccaccgtgcccggccccaccagacgtttattaagaccttaatatgtatgaggcacattttaatgagatagcctttgtggcaaagaatacagttcttctggagtttacagtgggagaggaaatagacaagtaaatgagggatggcttacagtgtcatagtgcatagcacagggctacaagagcacagtggagaaatacctgagccaggtgcccagggttccaggaggaaatgggaggctaactcttgaaatatttatttagctacatagggaatccggaaaagggatttccaggcagagactactacaggtgcaaggacctggagaaccggacagctgaaagaccatgacgagttcagtgtgactggaattctagtaatggctggggaagtggaggaagtgagatgtggtcaggtcagtcatatgtggaggacattgtaagtcatgctaaggaatttggatttttaccctgaaagctatggagatgctttgaagggttttatgcaggaaaatgatgtcgtcagatttatatttcagaaagttcattctgtcaagtaggaggggaccagccctgtggggaagtaaaacagtgtttggaagctcttgctgtagacatggcctgaactaagacagtggaaatgggaatggagaggaggcatcagatgtgagcaatattaagaagatagaatccatagaattggaggctgattatgggaatgaagaggtaagaatagcgcgattgcctggctttctggcttagggaactgaatgggtagtaccattcagatagagagtatgagaggtaaattagggaagtgacatgggaaaaaatgcattttgaatgtttttagtttgaggtgtttgtagcacatccaggcaaagatgtctaataaggtgggtcagctaaaggaaagagcaagagtaaagatacggaggcaggagagggcctaaattgttcagtgatactggggcctggagttttgcagaagaccagactgcaaaaaaggttagatgtcggccaagttgtgaagggctttttgtttgtttgtttgttttgagacggagtcttgctctgttgcccaggctggtgtgcagtggcacaatctcgggtcactgaaacctccacctcccaggttcaaggaattctcctgcctcagcctcctgagaaactgggattacaggcgtgcgccaccacgcccggctaatttttgtatttttagtagagacgggattttaccatgctggccaggctggtytcgaactcctgacctcgtgatccgcctgcctcgccctcccaaagtgttgtgattacaggtgtgagcctccgcacccggygtgaagggcttttaatgccttgttgaatttgtttggatttgattttgtgggtggcagtttgctaattgatttgcccaggtccagcataaagaaatttctgggctgggcacagtgactcacgcctgtaatcctgacactttgggaggctgaggtgggcaaatcacttgagatcaggagttcaagaccatcctagccaacatggtgaaacaccatcactactaaaaatacaaaaattagctgggcgtggttgtgcatgcctgtagtcccagctacttgggaggctgaggcaggagactcgcttgaacccgggaggcggaggttgcagtgagctgagattgcactgctgcactccagcctgggtgatagtgagactctgtctcaaaaaaaaaagaaaagaaaaaagaaatttctcgctttttccagaaatacttcctcaattgggtaggcataattgatatctcagagaagtttaaataaaatggtagcagcaaaagtactttgtagaatacagcctgatgtgcaaaccaaaagtggtgatattgttaagattcagtgagtatatttttgctttggagtttagctattgagtctgtaaaatgttttgtttccaacctagggatgatcttttattctcaccctttttcctggttgcagttatttttttagcttttaaaaagtgactttcttgaggctgagttagagactagcctggtcaacatagtgagacccctgtctctaccagaaaaaaaaaaggtgacttcctcctttcagttttttgtgaagcattgtgaatcaaatttttttttacttaagcaaatgcaatgtgtcactggaagccgaacctctggtttgaaatttaatgctgagatttgaaatatgagagttctcgagcggtatcttacccaattttagtgattattactttgaaatgttgacatcagtttctttctttatttgtgctaacctggctttcatgacctatacttcagtttctctatgacaaccagacaaatctttttaaagttctctaagaagaagcatttttcatcttgttagtcttcactgacttcatatttacaaagaataaattctgaactcttttttccatcttacagaattctctacagtttagacccttatcttaatttttattagatgatacaggttgactttctaatttagaaagtcgtgaactagcattttacttaaccttttgcacctccctatgctccttattaaattagaacagggtttctcaacgttggcacaattgacattttgggccatataattcttttttttttttttttgagacagagtctctatctgtcacccaggctggagtgcagtggcacaatctcggctcactgcaagctcagcctcccgggttcacgccattcacctgcttcagcctcccgagtagctgrgactacaggcgccckccaccaggcccagctaattttttgtatttttagtatagacggggtttcactgtggtcttgatctcctgatctcgtgatctgctcgcctcggcctcccaaggtgctgggattacaggtgtgagccaccgcgcctggccatataattctttattatggagttgtcctgtgcactgtgggatgttaagcagcatctgtctctacccagtagatgccaataagacttcctcagttgtgacaaccaaaaatgtcttcagacattgccatatgtctcctggaggacaaaattgcccctggttgagaattgctgcgttagaaagtatcgtagctatgattgtacaatgtccccaactaaattctgtgagggcaggccycatagccatacttagcacagtcgatggtacatgataagcactcagtatcctacartgaatgaatcatttgtttctgttgaagcttcaagaaattactgttccttcaaggaatttctgggtgggcaggttggagtacaatggtgcaatcayggctgattgcaacctccaacttttgggctcaagtaatcttctcgcttcagcctcctgagtagctgggactacagttctttttctttcttttgttttttgtttttttgagatggagttttgctcggtcrcccaggctggagtgcagtggcgtgatcttggctcactgcaacctccccctcccgggttcaagcagttctcctgcctcagcctcctgagtagctgggactagaggcacacaccaccacactcagctaatttttgtatttttagtagggacagggttttgccatgttggccaggctggtctcgaactcctcaagggaaccacccacctcagcctctcaaagtgctgggattacaggcatgagccaccaygcgctcggccaaatgtttgatttttttcagagacagggtcttgctatgttgcctgggctggtcttaaacccctggcctcaggtgattctctggcctcagtctcctgagtcactgggattacaggcatgagccaccacacctggcagatgtgatcttaagagaagtgccattggtttgagtactagaagcaagcttcttgttgatggtgtaagtcagcagatttccctctctattgaaaattgtgtgaattcctgttttgtttgtgttccttgtatttagagtgcttggttttagtggacagggactatcatttattttaaagttgcatataggctgggcgtggtgattcacgcctgtaatcccagcattttgggaggccaaggcgggtggatcacctgaggtcaggagttcgagaccagcctggccaacatggtaaaaccccgtccctactaaaattacaaaaatttgctgggtgtggtggcatgtaccgtaatcccaactactagggaggctgaggcaggagaatcacttgaacccggggaggtggaggttgcagtgagctaagatcgtgccactgcatgatctgcgccagcttgggtgacagagcaagactccgtctcaaaaaaacaaaacaaaacaaaaaaaacaaacaaacactaaagttgcatatagtttatggagttattcacatttattttagttgataaaattatacagtcatgtgttgcttaatgacaggtacattytgagaaatttgtcattaggtgatttcatcattgtgggaacatcatagagtgtacttgcacaaatttagatgatactgcacatggtgtaacttattactcctgggctacaaacctgtatagtatgttactgtatctaatactgtaggcagtttgtaacacagtgtaagtatttgtttatttaaactttttttttttttttttgagacggagtctcactctgtcgcccaggctggagtgcagtggcacgatcttggctcactgcaacccccgcctcctgggttcaagcaattcttctgcctcagcctcctgagtagctggtactacaggtgygcaccaccacgcccagctaatttttgtatttttagtagagatggggtttaactatattggccaggctggtctcaaactcctgaccttgtgttctgctagccttggcctcccaaagtgctgggattacaggcatgagccatcgcgcccggccacatttttaaagtacagtaaaaatagggtattataatcttatgggattttgtgttgattaatccccatataatcccatataatcttatgggaccactgttgattttgtggtccatccattgaccaaaatgtcattatgtaatgcatgactgtagtttcataattttaaattaatgcagctacagcattcaccatgaaattatttcttgatgtactatatgttaacctgataaaaacaaagttctaaaaatatgcctcagctacagtgctgctttgtttgccttgtattaccagaccttttgtgccaaacttttccatttggctggaaaatagttgaaatgtttaatggaaggagcagacttgctttgttttgttttgttttttcctccagagggcattgaaattcctatactttagttaattatagacttacagtctttccatattcctacttgtagatgaatcatggctaaggacaaacgtcatccttgaatccatctttatatattagagtgggaaatgctgttttattaaagcaactattcaggctgaaatcagccaatgcagttttcccttacaygctataaaacatgtagaagtagaaagggactgccgagtgctctgtgcaatkagtcttcataatattctttgaacgtaggagagaagagaacccatgaccacacaaagttacctgtttgctccagacattgaaacagctagttcccaagtctaatttcactttatacactaactttactcactcctggagtttcaggtagaggacatgtgtaaggagggaacaggagacaggtgttgatgttgggttggattccttccctccgtagaagataggcctttcttttaaaatctaaacctcgggtggcagtgactcaggcactaaatgtcattggtttaatcagtgaaaccaaatgcttagagaagaacagtggctcctgatttgggttagayttagatggcatcttttttttttttttgagatggtgtcttgctctgtcttggctcaccgtaacctccgcctcccgggttcaagcagttctcctgcctcagcctcctgagtagctgggattacaggcatgagccattgcacccacccaccatcacgcctggctaatttttttatttttgtatttttagtagagacggggttttgccatgttggccaggctggtctcgaactcctgacctcaggtgatctgcccttctcagcctcccaaagcgctgggattacaggcatgagccattgcacctggccttacaggcatgagccattgcacctggcctaaatggcatctttactggggcamagtggtgcctgttatttggtttctgtgttaaacaagccaacttgtatcttctggtagcatgtgtaggttttacttygtgacatgttaaaacctcgtgataagaattcattagaagtagaactaactactacatagtttagtggtaatttagaagggatagtcaagtagagatttttattattattataaaatattatatgttaaaagaaagtttggaaaacaggtagaaattgtcaaaaacccatcacccaaatgtgacaaataytgtaaattttgcgwtcaagtttttttccacactkcatttagctattcccctataattagaagtccaagatagatatagatagatcaatagatmtaacattgcagcaaacatctccatgcttatcacttttctcacattatgatttactttcttaggataaaacctcaggaacaggattacaaaattaagagaagcattttgaagcaaatcaaytgggctaccatagtagacaggctgatttgtatgggtgctttattttcaattttacctaaggatgatgacttagaaaaacaactgtgggacaaagtagaaaacatttcaagcatagcaacttcctactcaagtagaaattcatgctactgtcttaattgcctggtgggatgcaacaagaactgcacgcataacctggttccatttacttctgaatgacttccttgaataggcagaaggaattgggttaagttgttagaagtataagagtgtgaagcagctttggcaggaatcactagccatttctaattttttttttttttttttttttttttgagacagagtgtctctctgtcgcccaggctggagtgcagtggcgcgatctcggctcactgcaaayctccgcctcctggattcaagagattcttgtgcctcagttctggcagaaggtggtgtttttacaagatgatttctaggattacaggcatgcaccaccatgcctggytaatttttgtatttttagtagagacgaggtttcgccattttagccaggctggtctcgaactcttgacctcaggttatcyacccgcctcagcctccctaagtgctgagattacaggcctgagccactgcgccaggcctggttttttggtttcaaaccacaatagacattgctggagaatcaagctcatagtttctttttactctgcatgatatccctccaaaagcttgtctrttctcatgacttcatgacagttctttgccaatgatttgcaaacattatctccagtcttgattctttccyaggctttatttctaaatactcactagtcatttccacttagaagctttgtmttcttttcaaactcagcatatccaaaactgacctcatcttgttgccctaactagaacatgccacaacccatttctgcctataatgtcattattctcttaaggcccccatatttgcaaatcaggagtcatctttgcctcccttctctgaatgctgctgtgctcacagtcagtaccatacagttagtacttgttctcagtttaatgcacacttgtttcatatgacctcctagggcagaaccaagattcgtgggtggaagttgcagggaggcagatttgcctccatataaggaagaactttttaatactttgagctgtctgaatggaatggactgcctccagaagtctcgggttctccatcactgaaggtgtttgagcagaggctgcctgactaattgctaattgaaaggactgttctggcataagatggtgtttttacaagatgatttctagaatccctctaatcctgagagccagtgagtcgatagaaggtagctttgtctctcctgctagactcccttaggacagggagactattttacctttcttttatattctgtacagcacttaattcaggtgctggtctcttaattgcctaaagatgattatttacaggttaattgattcttttcattttgttccaatatttggttaaacaccaaatattgtggatttttttcctttgaaatatcttggggagaccaaggcaggtggatcacctgagatcaggagttcgagaccagccaggccaacatggcgaaaccttgtctctactaaaaatacaaaaattcgccgggcgtggtggtgcatgcctgtagttccagctactcgggaggctgaggcaggagaatcgcttgaacctggaaggtggaggttgcagtgagctgagatcatgccatcacactccagcctgggcaacagagtgagactccatctcaaaaaattacagtaataataaataaatacaaatatcttttgtagtagcattattttagatgaatarcagcttttaacctaactttctagaccctaatatcatcacttgtctccacatcccattctgtttatcagacagtacttgtaagctctttgctttcatcatattattctttcactcaaaacccttgaatggcttcacattgatcacaacgtcaaatttaaattttccctggctttcagtgccctccatcatctggcccagcttgctcatgcatccttgttccctataatactccatgttccatgcaggctaacccactcacattttctgtacatagcctgcttggtctccttttttgcttttgacttgctctggaatggcttcccttttttctcttgcctcttcaagatgcctcacttccctcctgaaaccaagctaccgccagtcctcattgatttcctctgaactctcagagcatgtagtaatttatgtaattcagaaccgtagcaacaacattctgtgaagaaaaatctgcaagaataggctgataatttaactttccctaatccaactggatattcccataataaaacttttaaaaatataggctggctgtcatggttcacatctgtaatcccagcattttgggaggctgaggcaagaggactgtttgagcccaggagtttgagactagcctgagcaacatagtgagactctgtctctatcacacacatacacacacacacacaaaaagccaggcatggtggcatgtagttatagtcccagtagtcccagctactcaggaggctgaagccaggaggtcaaggctgcagtgagctgtgaacacaccattgccctccagcctggtcaatagagccagaccctgttttttgtttgtttgggktttttttgttttgtttttttgttttttgagatggagtctcactctgtcgcccaggctggmgtgcagtggcgcgatcttggctcaccgcaagctccgcctcccgggttcatgccattctcctgcctcagcctcctgagtagctgggactataggcccctgccaccgtgcctggctaattttttttattagagacggggtttcacagtgttagctaggatggtctcgatytcctgaccttgtgatccgcctgcctcggcctcccaaagtgctgggattacaggcgtgagccaccgcgcccagcctgtttttttttgttttgttttgttttttaaataaaagcmgaaaaactttaacaaatataatctacagtatttattccattcacattttattttgttgtcttaaccaatatgagtgcttctggaggggagggaccatgtgtcttctatttcttcagtaggcccacaatgctaagcactttgattttattagcatcttcygtgtgcctagtttttctaggtgctgggagatagagtcagtgcaggaggtagaatggataaattcccatccttcttgagcctatattctagtacgtaatatgtagtgctaacattttacatttgaattgcattttaaggcttctgaagtgattactcgtatctatgaaatcacctcctttgatccttatatctgtgtatgctagatgaggattataatccattatgtgactgtgtaaagttgcacagttagtatgtacagcttgggactcaggcctcagtcttctaattttatttggacttgtgtaattttgaccacctgtgtttctgaagcttttatgatgaatgcttaagtagttgggaatccggacattcatttatggaggtttacgtatagttcttggttattgacaattagaaatggcaaggagcaagattaggcagacatacagttctctgctctgatacttctgtgtttgggagaagccttatttatttatttatttaaataaaagagatgagattttgctatgttgcccaggctggtcttgaacttctggccttaagccatcctcctgccttggcctcccaaagtgctgggattataggtgtgagctatcatgcctggcctgagaagccttattttaaacatttgctttccaaatatgtctcatctatcctgaatgtgattgaaaaaaagttggcctccatggagaaaattgaaagcagaaaaatggaagatgctggccaggcgcggtggctcacgcctgtaatcccagcactttgggaggccgaggcaggtggatcaccaggtcaggagattgagaccatcctggctaacacggtgaaaccccgtctctaataaaaatacaaaaaattggccaggcatggtggctcacgcctgtaatcccagcactttgggaggccaaggcgggcggatcaccaggtcaggagatcgagaccatcctggccaacatggtgaaaccccgtctctactaaaaatacaaaaaattagccgggcgtggtggcaggtgcctgtagtcccagctactcgggaagctgaggcaggagaattgcttgaacccgggaggtggaggttgcagtgatctgagatcgtgccactgtacagccagcctgggtgacagagggagactccatctcaaaaaaaagaaaaatggaagatgataataatgtaactaaagacaccataaagagaccttgagcccatagtgctgtgcaaacaagttggggctggatactgtgattaaccatatagtcacttaatttgttaaaagccattgtggagtagcaagaagagctgcagagtaggattcagaatatttgtaytctaggcctaggttctttactcactagttgtttgacctctggcaagtttttttttttgagacggagttttgctcttgttgcccaggctggagtgtaatggcgtgaactcggctcactgcaatctccgcctcccaggttccagcaattctgccttagcttcccaagtagctgggattacaggcatgcaccgctactccaggctaattttgtatttttagtaaagacggggtttctccatgttggtcaggctggtctcgaactcccgacctcaggtgacccactcacctcagcctcccaaagtgctgtgattacaggcatgagccaccgtgcctggccatctggcaagcttttaactgctgtgaatgtcagttcagtttcttcattctaaaaatagggatcaatgtctgcgtaacataccttgcagaattattttaagtctcmaaagaatcaacagattaataatgttaagcatttacaactatacagaattactatatttaattgatattatatattctaagaagagtactttccttatggtacttagtttgaagatctctatatcagtgtgattcgtggctgagaaggcaacatttatttgaaagacaggagggtttgtaaggtcctgcaaaagcagataagcaaaaaattaaaacaaaacaaaacaaaacacttctccatggattcgatagagaagatagccacactgtgttgaggggagagtgagtaagagcctttatttatttattttcttactcaaacacctttattagcccactgttcttttttttttttttggaaacataatctcrctctgttgtccaagctggagtgcagtggcgcaatctcagcttactgcaacctccacctctcaggttcaagcaattctcatgcctcagcctcccaagtagctgggactacaggcgcataccaccaygcctggctaagtagagacgaggtttcactgtgcttcccagctggtctcgaactcctgagctcaggcartccacccgtctcggcctcccaaagtgctaggattacaggcgtgagccaatgtacagtgtttttaatgcctcctatgtttatagtagtggaattacagtggcaagacatggtccttgccttagggtggctagttgcctgttgactgttagaggagatcagatgcattcaggggattatggccataaactcttagactctgaaggctattaaataaattattttatttttttattactaatgtcttgagacagaatcttgctctgtcacccaggctggagtgcagtggtactatctcggctcactgcaacctccacttcccaggttcaagccattcttgtgcttcagccactgtagtagctgagatcatagcatgcgccaccatgcccaggtaatttttgtatgtttagtagagatgggatttagtagagacggggttttgccatgttggccaggctgatctcaaactcctggcctcaagtgattgcctgtgttgccctcccaaagtgctgggattacaggcgtgagccaccatgcccggccaaataaatgattttaaaccagtgtgtgcagtgttgtgacacagataagtgcacagtgttgtggtagcacatactagaaatacttccccaggaggtgataacttagctgagacttaaatgacaataggagttctagaggggcagatgggaaagggaaaacatctaagcagagtggatagcattataaaggctcagaagtgagagaaagcatggctttttctggaaaacgcaagtagtcccgggttgctgtagtgtgctaaggaaaggtgtagcaagagataaaacaggagtggtagaagrttaaacaggactagatgagagaaacccttgtttggactttaccctgaacgctctggggtatgtgtcaaatgcaactctaatatatcttaaatgcaaatataattataaatatttctttaataccattcagtactctgggaagtgttgagatagatcactctgactataatatggagaatggatgaacaaagtttattactgtaactaggggagactagccaagaagtcattgcagtaatcttggtgaagtcttgatatcctttttttttgagacaggatcttgctttgttgcccaggctggagtgcagtggtactcatggcttactgaagcctctaccttctgggcctaagccatcctcccacctcagtctcccaggtagctgggaccacagctgtacaccaccatgcttggaaaaattttaaattatttttgtagagacaaggtctccctrtgttgccccggctagtcttgaactcctgacctcaagcaaccctcctgtcttggcctcccaaagtgctgggattagaggagtgagccactgtgcccagccagtatcctaactcttatcagtcaggatggaggcaagrggcatctattcatgagatacactaaatagagcctatggattttgatgactgataagatgttgtgggggagtttatggaatccttactattttccaggactgtgccaagcacttctacatggattccttcatttattctcactgaagccctttggatttttgtgctattattgtcttcattataaagataaggaaattgagtctcagaaagtttgataactgcttatagtcacaaagccastgcatattgttattcaaacctccaatctctctgatttctctaaagaacactcttatccactatataatactgcccaacagtttccagttactgacttgatcaatcaggtgattgatagcagtgctggagcaatgttagggaatatgatttctgcttttggacatttcaggttgcctttgggacatccaggtagtgatgtctaggtgaaagctggatttttttttttttttggagacagggtctcactctgtcacccaggctggagtgcatggtacaatcactactcattgcatcctcgacctcctgggctcaggtaatcctcacacctcagcctcctgggtagctgggactacaggtgtgtaccatcatgcccggctaatttttttattttctgtagagatggaattttgccatgttgtccaggctggtcgtggactcctgagctcaaacacttcctcccatcttggcattccagagtgctgggattgtagttgtgagccacagtacttggcctgaatctaaaatttaatcccagatgaatggcctgagctagatggatatgctgctctggtagtctttagtctataggtggttatggtggtaccacctcgcaaataggctgggtgttactacaacaagggtagtcagaggctttaggagtgtacatgaccaccggaagaatgtacgtgtgtrtagagaataagaaaaggtgtgtctttcacacaactgaatctcattctctacacacacatacaatgtcatacttaaattctggacattattttccataacatctcaaatctcatcttactcccaccaagagcaaaaaaaacagtttctgttcttttgtatttggttaatggtagaatgagattagctataaatggtagctgtattgtcctttttcattctgcttaagtcagacagcggaactttagcttgtttagcagtgaaagcctataaatacaaatgaaatatggaaaaagggagccaaagtcccatgaagctctattattaagcatttaagattggtaaatgttcacaaactctggcagcctctagcaatacatgtactgtgtctccatgttaacagtggtctcaacctgaaacatccatgtatgaaggaacatgttttaataacagaactgagtggtatctgttcatggaaggtagcttaggagtttattgcgttccttgccttttcccctggacttayagtgtggtggattgtatatatatgtgagtctgtctcttgatcagtatgcataatggaacagggcaggaattcagatatcagttgatagtgtcataacattagggaaagtatgttgactgcttatggtctgctctatttgagagtaggacatagacctggaggcttctgctgctgctgcaggccaaggaatggaaaggtttgtttggttctcattctcattttttttctttgcttctcttttaaacaacactctctgacaagtgattgggcccacagagaccagagcctgtacacagagaatggacaragactatattgtcttccttactttatcttgtgagctgcttatctcttccgcagggaggacaatgtgttaaattgagataattctggcatgctgtcatctttgggggaatcataattgctgttgtcattttaggcagcttcaagggagttgagttcattcagcttcagttacctgaactgaattcagttgcctgaattgacgcttttgtgaaatggaatctttccaagtcaaagcttggattgaaatttcactgactggtttttatgagatcacttagggtctcaaatactttatgtagaggtgcattgatcatattttacacttatgtgtgacttatgggcaacttttagcacccttatccctctggagttttggaatgctatttgtgaggtttataacttcataaatatttattgaacatctactacctgccaggtagtagtctagatggtagagtatacagtaaggaacaagctatataaggtcctttctctgttggagcttactttctttgggatattagacattgaattaggctatttcagataagatagtacttgtgaaagatctataacaaattcttttggatgtgtctagtgtccttccctactgcatgtccagatctttctcatcttcatttgaaggctggctcaaatggcagcttctccatcatatccttatctgatccttccagctgatatattactcccctctttgaaatctcatgcctctctatcagcaactttcttatgtcaccttaacatttttttctatttgtttcatagttgttagtgcatatgttaagtctccccattagactataaattactgagggcaggccgggcacagtggctcacgcctgtaatcctagcactttgggaggccaaggcgggtggattacttgaggtcaagagttcaagaccatcctagccaacacagtgaaaccctgtcgctactaaaactacaaaaaattagctgggcatggtggcgcacacctataaccctagctacttgggaggcaggagaatcccttgaacccaacagggtggagcttgcagtgagctgagatcctgccactgcactccagcctgggtgacattgtaagactttgtctgaaaaaaaaaaaattattgagggaagagtaaacatcctattcatcttggtttgggatatttcacatgcaggcagcaggatgttgtaggaaaaaaacacactgaacttagaaccagaaggatcagataaggatatgatggagtactggcttctctattcactggccgtgtgactagacaagtcatttagcttcactraaactaagttttctatctctaagcgtgtagtaatcatccttctattcctgaatagttgtcgggaggctcaaactgagataatgtatgtgactatcctttgcwaattctaactttctacacacagtatcatagtaaatattgagtatttgaatgagtaagcatttactttagtgaacaccttttcctgagcagttctcttgcttaatgaggtcttttgattttgtaaatatgctacttttttatctgatatttttgtattgttccattttgcagatgayatctaattttattaaattattctgttcctgagaattggcatcctcttcatccacctggggatgaccaggaattttctgkttttttctctgtaggtgctatttaatatttaaataacaaatgacatttgatctgtttcagcaggtggtccattatggctgacatgcaaaatctggtagaaagattggagagggcagtgggccgcctggaggcagtatctcatacctctgacatgcaccgtgggtaygcagacagtccttcaaaaggtaagcagtccacagcccagcagaatgctttctttgagcgtcttggcctgaaaattttctattattctctcctttggcgctaacttcccaaaacttaatctagaaagtttaccttttgtaatttgtattgctgtgaacagataagagaggaaatgacttgtacagggaggcctgtggttaagttattttaacacaagaacttcctgcttgtgcaatatttcctgctctttctttagcagaatgactccaatgtaagtcaaatgacaagtgataataaaattcctctctccaaacaattggcaaattggacattttgcacatgcaccagttggaacatagaatgttagcactaaaaaaaaccttggaggatcattttgtttattttcattttatagataaagaaaattaagctcagagaggaaaaggaatttagtcagggtcacacaaccagttagtggtgatactggacctggaacccaggtttccttactcctgttctgtatcctgttgactgtattaccttgcctccccactttcatgtagaagcacgttttaaagaagcctccttctgatgcatggctgattctttgtggtgtgtttgtctttagcaggagcagctccatatgtgcaggcatttgactcgctgcttgctggtcctgtggcagagtacttgaagatcagtaaagagattgggggagacgtgcagaaacatgtaaggatgttttgcctttttccccttcttttaaggactaacagctttcttcagtcagccaaggtcctcatccttggtttaagagctccttgagaagttcctcttggtttggggcattacacatgttctttctcttttgcctgtactgagsagttcagtccagccacagaaacgattcctcatttttttctaggccccttgcttttatcacgtatttatacagaaagcttgcttggtacataaaatatggttctgttcatctttgtagtgaagaatatgcaccagtttgatcccaacatattacataatcaaacctacagtggcttatttaaaggagtcattatcatgacttagcatttataaaactatgcttgatagttattagttatgctaatgtgggttattttcacacttaacccacagcaagaatatgaagtaggcaatgacaggtgcctttcctcccaccttcctttatgcctcctacgtcatcaccaccaccccccacccccaccccacactcacatatacattctacctctatttttgggacccaaaaaccttcctgctagctcaccgaattataaacagtaaccatgcttgggaacttcttcacctaaacctttctcgaagactggttgcttggcttttggaaaatctattttgagcctctcaaataccatctgttgccaatggttttagctctagagagtgggactgggactttaataagggtgtggaggcttgcatttttacttaatacagttctgtaacatttgaaaaaactttaaaacatttatcatttgtattttaaaaatgcaaatccagaaaaaatagattgctttctttgaatttttgtattttaatagtgcttacagtctcatgtttcttaaattcttttgactgcgaatgacccttagaaagaaagaacatattcgtaactgagataaaagtttcacaagatgatatttatactacttctgctgtacttttttttttttttaactttttatttggaaataacttgaagttggtgcactgcactcatacttttgttccattaagctcactaaattgatttaattatttattaatgggtcatggtatctggcatttgagagatagctttaatctaaaggagtaaataccttgagaattttcagcagaaatttargcctttgcctttactcctgtctccaatttttgagaaaagaaaggtgtttttttggttgctgtttgttttattttgctgatgtgaaataggaaggatttttcagtgcacggtatcacaatgcatgtgtaagatgctaacatgacttcatgtaagctaggtgattatccaattaacttcacttccaactctggatatatatccctgatgagttccaataggaacagtagtgtatgtaattctgctctcagtccctggaatctggaatacatgaggaggataacatgaagtgcctgggttgctatcagagtacatggaagtagaggtttcaggttattcttatcaagacttctctagttataatgtgtcatcaatagctgattcttctttctggcaggcrgagatggtccacacaggtttgaagttggagcgagctctgttggttacagcttctcagtgtcaacagccagcagaagtaagttcactactagctggtttcattttggtttgatgctcaggacgagttgagagatttatgtcaagctattataacattttaaaatagacctactaggcttttgataatatatgttcataccaagtcccagaggtagagccatacttcaagtgccttaatgggaaggtactattgggtacttaatggtctctactggctttttctctgtcattttgcataggactgtggttatccctgggactttgcttgcctgcctctttgctgagtccacattcatcatagtgtctccaaagccctttaaagatgattctcttgcttcactgtggatgggctttagtagtgctcctgtggagatcttaaaactcctacagtattgcttctctcctcatccttcactggttgggagactctctctttamttttactcccacctcaaaattttatggtgcaagatgtgaaaagttgaattagagaaaatttagatttctcttggagtcaaagaatataggtttccttcttttgcatttggttttcctagttacagaggaataataaagcaagttgtcctaaatgctgtattaaaacccttgaccctcagcatgcctagataatataaaaatagtgcaagataatgtcaaatatattagattctggttaagtgtgctggctcattcctgtaatcccagcactttgggaggctgaggcaggaggatcacttgaggccaggagtttgagaccagcctgggcaacatagcaagacctcgtctctattaaaaattaaaaaaataaaataaataaaaatagccaggcaaggtggtgcatgcgtatagtcccagctacttgagaggctgaaatgggaggaagatttgggcctgaaagtttgaggatgcagtgagccatgaacacaccactgcactccagcctgggcgacagagcaagaccttctctcaaaaaacattgtgtgtgtgtgtgtgtgtgtgtgtgtgtgtatagatgccatctaattctaatatgtagaattagattttaattcttaatctgtcctgaatggttaagatctgagaattgagatgttcaggaaatggagctttggaggaagggtgcaaacacaaacaaarttcatccattttgccaaggtgcctayttgaatgctaagcccctaattgttttttattttatttaygtttaaaaaaaaattttttttttkagacagggtgttgttttgtcacccagactggagggtagtggtgcaatcacagctcactgaagccttgacctcccaggtgtaatgatcctcccacctcagcctcctgagtagccttgactacagtgtgcaccaccatgcctggcttgcttatttacttacttatttatttatttatttttgagatggagtttctctctgtcgcccaggctggagtgcagtggcaggatctcggctcactgaaacctccacctcccaggctcaagtgattctcccacctcagcctcctgaatagctgggactacaggcatgcgccaccatgcccagctgatttttgtattttyatagagatggggtttccccatgttgcccaggctgatcttaaactcctggactcaagcgatctgcccaccttggcctcccaaagtgctgggattacaggcgtgagccaccatgcctggccctaattctttttattatttgtagagacaaagttgtgctgtgttgttcagtctgtcttgaactcctggtctcaagcagttctcctgccttggcctcccaaagtgctgggattacaggcgtgggtcaccatgcccagactaagccccctaattgcatttgattcatcagttctttacagcagctactatatggctggcaatgcattgggggctttcatgatgataaaagagctcgtctttgaagaattaatgagaaagtaaaacatattcacatgggtccattaatagtttgtattggtgagtgataaaatgccaagattggttatgctgacaacaaatgctgtaggaggctggtgtggctgggttggagggccctcatgaagcatgaggaaaatttggattcatgggaaaaaaagagaacatcatgagtaaggcacaggaatgatgtcctgagtgtatgtcctctgagtggaacaaaaaagagacaggtggctgaaatggaggttctgtggtatagctgaagtatgggtcctgatcatgaagaaccatcaggtgcagcctgaggagttggaactctacgaggagagtgagatgatgagcagtattttagccttaggaatcaggacaggactcatgcagtttatttgggtgctcactagagtccatagagaattcttgccttcaggatcagaaggcatagacacctttgtggaaagatgttaacctgaatcttttcttgtatcttttcctagaataagctttccgatttgttggcacccatctcagagcagatcaaagaagtgataacctttcgggagaagaaccgaggcagcaagttgtttaatcacctgtcagctgtcagcgaaagtatccaggccctgggctgggtggctatggtgagcagcgcagattccagggctgggggtgggtatagattttaagagggaaggcaatatagttggagaggtcctgagtcactgacagcttgtctctctctaggctcccaagcctggcccttatgtgaaagaaatgaatgatgccgccatgttttatacaaaccgagtcctcaaagagtacaaagatgtgtaagttcagccttttctctctttttttcttttctgagacagtgtcttgcgttgtcacccaggctgaagtacagtggcacaatcacagctcattgcagcctcaacctcccagstcaaacaatcctcccacctcagtcctccaagtagctgggacttcaggcacgctccaccatgcctggctaattttctaattttttcgtagagatgaggtctcactgtttcccaggctggtctctaatgattctcctgccttggtctccccaragtgctgggattacaggtgtgagccactgtgcccagccaagttcagctttttctcaaggggtaaaggataaacccatttggttacttgctggagtagcactttggagttactgagggctgcccttagccactgtgctggttttatctcagggctgctttctggagagctttacagatattgtctcacagctgcatttgcaagcaggaaatacttctgcttccacttctgctttctctccttttttggtagaggcccttttagtcttctgatccttacccttctgggtttaggaagttttgctggcagtaacatggactratgccctttatataagattttgttcctttgttgagaatttgttactggcccaatggcaaagggttcaataggacttaatagaaatttttcatgaagtcagttaaagtgagagtaaggctgcctagccaatgcaggtattacgtagggcagtcattgcatgtctaaccacatacgtctaccagttctgacttctccattgctggttttgagctggaatgattgcaggcaaaatttattaagttgcatatctacacaagcctttcctttcttccatccttcrtcaatcaacaaacatttattaactactctttttaaggaaaactacaccttcctgtgagtgaaatgtgtcccagaacaacaggcacttccttatccttctagcaacatggaattaagcatgacagtgttttgatatatcccaccattatcccatcactttacagttgaggaaactaggtcttaggctaaataaccttcccagttaatacataagaagagaggggacttgaaccgtaggcacaatgctatttctataatttaaggctgattgtttccccctaagggaaagtttttaagtttgcttttggtcagggtgggcatattttgacataaggcattgtctcataaggcagttaagtttcttagtctttagagttccacagtgatacttaagagctctcctctctaccatggttttatgcacagaatgtctgcttttatcagttttacatattagattgtgtttaaggtctactttgaaaaaagtttcaataagcagcaagtggtcaaaagaaaaaaaaaagttttggtacttaaaacagtttgagaaacattgctatgagagatagagatagaatccagagtctctatcttagtggagtttggtctgattagggtaatagactaggttgtatatacatagaagctggtgatgatagaaaagctgccattgagcggagcctaagaaacaccacgggtaggagaatgtgagcccataggaaagaagggttctggagtcaccactgttatgtacccrgatcacctgtgacaagttcttctttaatcctcccagggataagaagcatgtagactgggtcaaagcttatttaagtatatggacagagctgcaggcttacattaaggagttccataccaccggactggcctggagcaaaacggttagtgaatccttcctccctccctccctccctccyactttctctctccagcatggggtccacaggtttcttagacttcagcactaccaaagtctgtgagggaatgctagttttttcagtggaagggaggaagaaaaggaggagaaagaaagggtaaaaagagtagaggaagcaaggatcagaggagaaggaatattcagtggtattcaatttcaataaatatgttagggacagtgattggtgctggagcaggagacacacacaaatgagttacactatcccagcctttaaggagcttaaaaataagaatgcaaaaccccaatacaaatcaccaagccaaatgctataataaagatacagactagagtatgaggaagagaagagtgcttctcactagaagagattgtactttgaaggtatatactcttctgtgagacttgaaagtagtatagggcagtgagaagtgggatactacaaaaggcacagcttaaacaaaatacatgcagagtaaatgtagagattggtcatctctggcttcaataaggggaaatgatcagaattttaggagaaaaggctggaaaggaaggtaggctgagactttgggatgaggtatttgagcaagggagtgataatgattcaatttgtctttaaaagagtctcagtgtataggttagggataaggactcatgctcagattatgaaagtggtcatggtgtttgggggatagtagaaaaacatttgcaggagatagcaccaagataatagagatttgataaggtcgaagaagttggaatcctcaaagaagattgaatagtcagtcttggatagtaacatctttcactgaaatagggacaaggggatgattgtacagggagaggagcggcaggaaatgatgaaatcagttttgaatctgttgaatcagaggtactggtaacacactaaggaagatgtcaagtagatttgtggaaatagtttttagagctggaatcaggtgagttcaaaggcaaaatgtgatggtcaagaaatagaactgagagctggatccttgggaaagggtgagaaggcataaagccaagttgggtatgggtaggacacattaatcattgcctcaaaggctgtggtggggaccccatgtgcactggcccatgtagggcactactgggaatggtacagaggggagcagagaggatgatgatgttacctgcacttattgttccaggggcctgtggcaaaagaactgagcggactgccatctggaccctctgccggatcaggtcctcctccccctccaccaggcccccctcctcccccagtctctaccagttcaggctcagatgagtctgcttcccgctcagcactgttcgcrcagattaatcagggggagagcattacacatggtgagtgagcacttggacacgaacagtaggtacaacaagttgtgtgggccagacsccaccaaccagaaccgtctgtaaactacaaccctggcttgtgtggtggagactcgtttggtgtgtcctgttcctttaagggacggcaaagctggcttaaatggaaattgaaaatgatgatcacagttggaggaagccatctgccccatgggaaagtgacttaatattaggtagcatatatagaggaccctcttgtgccaaggcacagagctggcggttttccccagagctttttccgtggcaccacatggcctctgggaaggcattgtgttagggagttaacttcctcagaagatgcatactggttacatggaaaatttgcatgagagtgacctaatgttggtataaagtagatacccttaacacagctggtggaagtctgagttgtccagccacttctaggaatctatgatcatagtagctaaaaatggtgtaacaacctaaatccaacwgtaagagaaatggctaactaccacatgtcctcttgatgaaatgttttttatttttttattttttttgagacggagttttgctcgtttcccagcctggagtgcaatggcgcgatctcggctcaccrcarcctccacctcccaggttcaagcaattctcctgcctcagcctcccgagtacctgggattacagccatgcgtcaccatgcctggctaattttttttttttgtatttttagtagagatggggtttctccatgttggtcagcctggtctcaaactcctgacctcaggtgatctgcccacctcggcctcccaaagtgctgggattacaggtgtgagccaccacgcccggcctcttgatgaaatgttgtgccaccattacatgtttttctacagtgaaccatgtaatgtttaagaaaaaaaaaatctagtatgtaaattacaaccacaaggaatggtggagataaaaaggccattcagtatttgttatacagttaacatagatctggccatgttcaaagcgaggcgtgtgtcagcctgctgtgggagatgatgaattatttttcccttaaaacataaaagaaatatatttttacttttattttttattttattttattttttttgagatgggagtctcactttgttgctcaggctggagtgcagtggcgtgatcttggctcactgcaatctctgcctcccaggttcaagcagttctcctgcctcagcctcctaaatagctgggactacagcacctgccaccacacccggctaatttttttgtacttttagtagagactaaaaatacaccatggtagccaggctggttttgaactcctaacttcaggtgatccgcctgccttggcctcccagagtgtgggattacaggcatgagccacagcgcctggcctagaaagatattaaactacaggttaacatgagaaagwttttaagtgtcaatagttgaactaaatttgttaacaatctgtatgattataaccaacaaaaccaaatatatgtagaaaacaatattgtagagttgcaaatgccaacactgactgaggaggtgggggaagtagggttagctgtggggagtgagggtatttttttyttttccttttaccaaattttctttactaccactcatttttctttattgctttaaaaattayatatttgtgcacatacatttgatatgtctttctagacatagaggataaggatttacatatccttatcctcacccacaatatacacacattccatgttgttgttaayggaaccatataatttaatcttggggagaagagaaatgataaaagtacttttccaaaactgcttgcaagagaacatctcaaaggctctggttttggctttgaattttctgttaaggatgtttaacatgacgatagcagctcaaaggtctggtatgaaggacaggaacaaggtagctgttgttcttacagccctgaaacatgtatctgatgacatgaagactcacaagaaccctgccctgaaggctcagagtggtccagtacrcagtggccccaaaccattctctgcacctaaaccccaaaccagcccatcccccaaacgagccacaaagaaggagccagctgtacttgaactggagggcaagaagtggagagtggtgagttaaaaatacctagacaggggcaggtatttttattattttatttttttgagatggagtttcactttgtcrcccaggctggagtgcagtggcgcratttcggcttaccgcaacctccgcctcccggggaaaaggagtaggaacaggaggttaaatggagcttagctagatgagggcagagttctggcttcaattgcaagaacaaaaagtttgggatagcctggttattttttgttcggtgtgtgctttgtgatgagaatcctgggatctctctctaacaggaaaatcaggaaaatgtttccaacctggtgattgaggacacagagctgaaacaggtggcttacatatacaagtgtgtcaacacgacattgcaaatcaagggcaaaattaactccattacagtaggtgagtctttgtcgctgtcccacgcaagccccgtcccagagcccgagaaggctaataccattttacctaccctatccttaaagattcctaaatgtatattactttcctttaaagttacactgttgacacactccctttcttctcctagataactgtaagaaacttggcctggtattcgatgacgtggtgggcattgtggagataatcaacagtaaggatgtcaaagttcaggtaactcgatattttggctccttctttttgtccctgaggaattaattcaaagagacatggtagacccacagatgttgctttggtgggaatctgattctacaaagtctgtaagctgagctgctttggacgtggcagaagaagggttggctcttcaagcaagttcttttcaggacccatcccaacccacccgagtatccagtgtcttgcgcatctgtgagcttttcatgtagttgctgagtcacgtgaaacaggaaaccttttcctgcgacttactgttgtccttcccaaccactgggactcagttctctttgtttactctgcaggtaatgggtaaagtgccaaccatatccatcaacaaaacagatggctgccatgcttacctgagcaagaattccctggattgtgaaatagtcagtgccaaatcttccgagatgaatgtcctcattcctacagaaggcggtgactttgtaagtttcttgatctctttagtatgatgttaaaaacagaagggactgaagatttctggcattgaagaaagctattttatgaacattctgcactgagcaggtaaaaacccaataatgcacaccaaaagtacacasaaatgaggtagtcccatgtagtggagccccaaaggtaggtgctttctgcctaagtggagctcaaggtagcaaaaaataatggggatgagccatggcaccttgtcaggctggtgctataaagccatatgtactgttatttacaccccatagacttaatagtctgtccaagatcgctgaacactagaacatagcatggctctgtgggtttgtctcttgctacattgtaccgtgctcctggggttaagtggaagcaagcattgggagaaatgtgtgagatttagccccagctgttctttagctcagatttaaacctgctgtctcttctttatttgcagaatgaattcccagttcctgagcagttcaagaccctatggaacgggcagaagttggtcaccacagtgacagaaattgctggataagcgaagtgccactgggttctttgccctcccttcacaccatgggataaatctgtatcaagacggttcttttctagatttcctctacctttttgctcttaaaactgcttctctgctctgagaagcacagctacctgccttcactgaaatatacctcaggctgaaatttggggtgggatagcaggtcagttgatcttctgcaggaaggtgcagcttttccatatcagctcaaccacgccgccagtccattcttaaggaactgccgactaggactgatgatgcattttagctttgagcttttgggggttattctaccaacaaacagtccattggaaagaaaacagtccctggaattaacagatcagaatgttcacactggttaatctttttttaacaatgagcatgaaggtagcagaagctggtgtgtttccagatggttcttctaaccaaactaatttttcactgttgacaagcgaggcaagggttgcactggaccaaaggctgaggcttggccatctagcattccatacaaaattgtttcctataagcattccttttattctctattctatcctgggtctgcctcaaccgtgagataggagagtctctggtactagctgctgtagcagtgcccttcatccagggcagttaatggagtcttggaccctttctttctctgggatccctgcccagcaccttcctatagagatgactttaaaaggaaaaaaaaaaaaaaaamaaacccacatgatttcaaggagtctggcattcctgaatccttcttccctgccaggtgcctgtcacctgtcttcactgcctccttttccctgtcatgctcatcagcttatggcttctgtctaagcacctgaacagaggactgaaacctccactgcaggctgrttttaggtcttgaattatgtaagaatcttgcacagcactgctaatgtaaatttcagttgttyttccctctaggacaaacacttaccaaaatatgcaacttttttttggtgggaagagagattgtcctgtgatttctacccatttcctgaggcctgtggaaataaacctttatgtacttaaagttatacagaaaatagaataaagttaataccaaacttgcttagttgtttacctgtgatattggctgtacagaaatgcaaaaaatactgaaaacaccaaggataagaaactactctttattttagacaacctcataaaattattttcacatcccccccaacttcttgctcttaatcctcatcttttagttgaagaataaggcttaagagagagaaaggaaaaaccataatggctaaacttagcagcaccaacacggttctttcatcaaggcgtagctcatcatttctccaaactgacatgctacagaaatgtcttccaaaaagcgttaagttttcacagagtggggactatgatttccatgctcaaatagtgtaggaaatggtagattacgttagttttgtttactgtaacaggaattctcaggagtccttagacactctaatgtgggttgatctccagaaggagaaagggagtgtgtagtattttccaagctttttgagcaaacaatccttttctcatggaacacatcagaaacagtttggagtatgctggtaaatgtgttttggggatggaagtcagaaagcctgatctttttcatatggttcctcctattctctgctaaagccagcaacagagtaagttgactctagcatcaagaccactagtcatattaagaaagggcaggttggtcgagaatggaataggaagaactagctgcctcacttttcactttcgcgcctacattttcttcgctccctaagttatacaagatgtacatttcctctcttaagcaatttaatttgggtgctacttccctccttttgtgacagcaactaattcatcactacctgaggagacaaagtgggtgctgcagaagcaagactgtaggccagtgggatttgtctaataattgatgataagatgatagcacagagggcaacgtactgagagaggaaggcagccttaagaaatgatgcagaaatagccaagcaagatttttccaagcactggttaaatcaccagcaaaacaaagcatttatgtgagtacctcaggcctgggcacctctttgcttgaaatatggcaagacttggaaaaatgtttgcccttagaatctatctcactactttagttagttgtctcctttgggcctgggcacagttctggcactgatctggaacagactcccttttctaaaactgaacttgaccacatcaaaagtttgtaaaacaatctccatggtaattaaacttgcattcaacaccatatggtaacagaagatggcaaaggataagattcagatcttagatctttccaagtagggcatgttagatgatagaaggattagttgcaagctggatctgagctcaggcttgggcatgaaggaaactgtctcccatgtggtttggaagagttaggggctccctgagctctattgtgaactatacgggtttcatccaaggaatggtatgatgtgggcataaaaccattcttcagacaactgaagatggtccccttctgtagccagaaacactagctgtcctgcattgtccatttcctttagccccaggcggtcctgcagaaggaaaggccataattaattaaaaagcttaatgaagttttggagtaaaatggtaagtacgttaacttgagatatattttcaaaatgcagtttgtcctgagtattaaaattgaggtgtattttcaaaaatgccaaaaagaatatctcctacttctttttctttctcttttttctttttctttctttctctttcttcctttcttttctttcttctctcctccccctcctcctgtcccccccccttcttcttcttcttcctctctctctctctgtctctctttctctttctttctttcaagacggagtcttgctcggttgcttaggctggagtgcagtggtgcgatctcggctcactgcaacctccacttctctggctcaagcgattctcctgcctctgcctcatgagtagctggaattacaggcgcatgccaccatgcctgggtaatttcttgtatttttagtagagatggggtttcactgtgttagctaggatggtcttgatctcctgacctcaggtgatccacgtgcctcggcctcccaaagtgctgggattacaggcgtgagccaccacacccggccagttttttctaagtattaaaaatagatatgcaattgagattgctctatacagtgttctagattctgatttttgaaaagctcagagtcagaggactacctataggtgggcaagccatagacgacactgcctcagaatgccataggtaagtgggactgagccaaagacagaacattagctaggtaacttaaaaaacatccaacccaggacaggcgcggtggctcacgcctataatcccagcactttggatggccaaggcaggcggatcacctgtggtcaggagttcaagaccagcctgaccaatatgatgacactttgtctctactaaaaatacaaaaattagctgggcatggtggcgggcacctgtaatcctagctacttgggaggctgagacaggagaattcgcttgaacccgggaggcggaggttgcagtgagctgagatcatgccattgcactccagcctgggcaatgagcaaaactgtctcaaaagaacaaaacagaaaaaccatatccaaccgttaggtaacaaaccctggacactttcatattctggagttgaaaatgtcattacccatagcctagatgctggagaacaacctctggttgggaagataagcagttacgacagtgccagaatggtgcttctgccgtggccaacatcattttgagttttcacagtaaggaagttcttagctgtaatttctgaagccttttttttttttttttctcaaatcagattctagcttccctttttacctcaccacccaagttgaggcacccagtgcaaaagaaaagccaagccaagaggagacaaatgacctctgaaataacatggaggaattctagtagacggtgattggttcagatgtagtacttagcattttggagagtctgtctccaatataaaatccttagggctgggcgtggtggctcacacctgtaatcccagcactcttgaaggctgaggcaggtggatcacctgaggtcaggagttgaagaccagcctggccaacatggtgaaaccccgtctctactaacaaaacaaagtattaggcatggtggcgtgtgcctgtaatcccagctactagtgaggctgaggcaggataatcgcttgaacccaggaggtggaggctgcagtgagctgagatcacaccattgcactccagcctgggtgacaaagcaagactgtctcaaaaaaaaaaaaaaaaaaaaaaaaaaaaaaaaatccttaaagtgtagaaggccccagaactggaggtggcaaattactgcaacttctgcttaagatacaggacctactgctaaacaaaattcaaaactctagtcccactcaacctcctgcaggagcctcccttgtcagtgcgtaatttagaaacaggatttcacatctattaatgtttaaaagtaatgtcccttggccaggcgcactggctcacgcctgtaatcccagcactttgggaggctgaggtgggtggatcacctgaggtcaggagttcaagaccagcctggccaacatggtgaaactccatctctcctaaaaatacaaaaattagccaggtgtgatggcacacacctgtaatcccagctactaagggggctgaggcaggagaattgcttgaatctgggaggcaggggttgcagtgagccaagattgctccactgcactccagcctgggtgacagagcgagaccccgtctcaaagaaaaaaaaaggaatgcccctcatcatgcatggaggcttcctggatttgtagcagactgtacctcagccaaggcagctagttttaaaacctttttatcaaaagaagggaatcagacatgaggtttctcttgttgtttggaaaccataaggtttcaggatgtagtggatttttgtaacccagtgcctaataagctagagcacataatcaagagcctaacaagcttcacccatattggacatgagtcaggtgtttcaggagtacctagtgctctgaggtgtaaaggaaagggctccagcaccaaagaacatagcagcttcaggaactgggagctgaaaaaacaccaacctcccaagatagactccctgccagttacctgtgtgtacagggaggtctcctgtaagggaatggtttccttggcttggccacttctgtaaaatccaaaccactgcagaagaagcaaaggaaagaagctcagatatgacacacagcacatactgccaaaataatttgagactggttagaagctaaaactgccaacaaagtgaacatcataaagctgtaggaagaaggaaaaatggatagggtgcgtctgagtcatctcttcttaagggtggagcccgagggatgagttaatctttctgagaggccgctttccacttccccagaatttctgcttcctaaaattattaagcaataaatgtgaaaaattcctgtgctgagctctagacattcaaggatgaatacataatctgtttccaaaaagctcccagtcttgcaaggcacggaaacaattcactcttgagtacagaggtcagcaaacgtttttgtaaaggccagatacaaaatattttaggctttaagggccatatggttgtaactactcattgctgccactgtaacaaatgcagccacagacagtatgtaaaaagtaactaaaactgttccaataaggacactgaaatttaaattttacataatctttatatgtccaaatacttgatatgtctaaataaattttacataatctttatatgtccaattctttcccccaaccattaaaaaatgttaaaaacattcttttatgttagtgtttggtgttactcgtgggtagcaccaaaacgggtagcaggatggactgggcctgtgggccacaatcggccaatccctggtggtgtgacataacgtgatgagtgttttaacagaggctgatgattctaaaaaagcgatcacattctgcttggaatggggatggcatccttgccttgacagacgaatagaaattgttaggtggagaagccaaggaagggcattctagagacagaaatatatgaaccaaggcatacgagagaaaaagcacaagtagtacaatatggcttgatcaagagtgtatgaagcgtgcagacaaggcagattaggctggaaaatggggtgaagccagatcaaggcagaccttggaggccaagcttaggaatttatatattttgggctagtgattctgaacattttttgggtctctgatctctggaaaatggattaaaattatagatccttccccagagaatgtaattacataattttgcatagaattttggggttgggggattgattacaatcttcagtgtcccatttatggacctcaggtgaagaactgttttatacaaaagttggtggaagggactgaaggttttttccccagcaggcagctgtattttttcatttcatttcaatttcattttatgttctttttgagacagagtctcgctctgtcacccaggctggggtgcagtggcacgatcttggctcactgcaagctctgcctcctgggttcaagtaattctcctgcctcagcttcccaagcagctgggattacagatggctgtcaccatacccggctaatttctttttgtattttgagtagcgatggggtttcaccaagttggccaggctggtcttgaactcctgacctcaggtgatccacccgccttggcctcccagagtgctgggattacaggcatgagccaccgtgcccggccagcagccctattttaatgccatttactctcctggcatgtggcctaagtagtgtctcacctccgaatctacagggtccacaatggaatcattgaggaatttcaccatcacaaacttcttcagggccatcaggtttttcttgtaggactca

SEQ ID NO: 97336 - DNA, 42981 bp, Homo sapiens
  misc_feature (1)...(42981): n = A,T,C or G
gtcgcatgcacctgtagtcccagctactcgggaggatgaggtgggagaactgcttgagcccaggagtttgaggctagcctaggcaacacagcaagaactcgtctctaagaaaaaataataatttttttaaaaagaagatcttccattaaacaacaacaaaaaaatcacactgagcattatttaacacaagatatagaatccactccagaatcttgcatcagcatgtgtgttgtgagaatccactgttcaagtctatggaaattcatatttggcgtgtctggttgtttgaattctagataaatgagaatttacatgaaataactaaaaaactgatagatgctcttcttatcaaaagattgttttctctttcaaggaaatgggtcctgatgaatatgaagagatggaagaagaggaggaggaggaagaggaggaagacgaggatgatgattcagcagatatggatgaatcagatgaagatgatgaagaggagagacggaggagagtctttgatgttcccattcgcagacgccgctgctcacgccttttttagcaagccttctgctgatggaagcactaggatgattctaggctgttaaatagatttctcaataatgtaaataactaaattgttctctgcatatagcaggaaaactagcatgaaatattgtttcaggccctgggttctatgtgacactacattaggaattggattgtttgggtttgctttgtgtttttgaggtagaggaagaaatgggaatcttttttttctcttccaggagtcagtggaagaatagttctctagctaaggaacggacatacctttgttttaaaatattttatacttacaaaaatctagaaatggagagggaactgttttgaataaggatttaaaatacctgcacaaggatagagagaaactatgtgactcattctgtgaaaagacttcttgcagttgtgagttatttagaaatgatcaaaatttgtaattaggctaatccatttagtgattcctaatattttgtactcacagagaactaattgactaaacaacttgaacgctagtggtttgtccttagacaatctgtctttgaatttaaagtctttatcgctaagaccttgactttaaatttttcatcactacaaccttgaatttaatttcaggtcttcaacatgatgaccttggatttaatttaaagtcttcaacactatgcgctttatcatattattcacagatgcatttttgaaatgtagtatgtaaaagtatgtaacgtgctgtttattaacaaaagattgttcacaacatctcatgtagtttaaatttgtaaatactgcttctgttttgtttctcctttatacacttgactgtctttgtgataagtgacatgaattttatgttaggattaagtatgttttcctgaaacttggattttttttgtaattatataattgagagttaagaatgaaatccttcaagtgttaaaaactcacattttaaaagcaaattttggttccaattctgtattttgtataattgcttattttccataaactaatattagtcagcatttgcttttaaggtagaagatgggatggattcttgctgacctgctgcaaaagtagcaggtccactcaaagtcatctcctagctttgactgtactgtcttgtgtgccccaccatccattttcccccaagaacagttattttatagagaaaactgtaagaaaacaagtggcattcaaggctaagcagctgccattagggaacatgaagacaaacttatcctttcattttcacacatgtcaaggtgttctgaaatagactaagtcatttttcatgtttacttttcatttaatagagtataatcaggctatcaaatcctattatggctatccttttttttttttttttttgagacggagtctcactctgtggcccaggctagagtgcggtagtgtgatctcgacttactgcaagctccacctcccgggttcacgccattctcctgccacagcctcccaagtagctgggattacaggtgcccaccatcacggccggctaagtttttgtatttttagtagagacagggtttcaccatgttagccaggatggtctcgatctcctgacctcatgatctgcccaccttggcctcccaaagtgctgggattacaggcgtgagccaccgcccccggcggctatcctttttagaaaaaaagtcaattgtctttatttagtttgttataacaaaataccttagactgagtcatttacaaacaatagagatttattgctcacagttctggagggtgggaagtccaagatcaaggcatcagcaaatttggtgtctggtaagtacccactctctgcttcaaagatggcaccttcttgctgtgttttatgtggtggaaagagcaaacaaacttcctcaggcctcttttataagggcactaatccccttcatgagggcagagcctaaaggccctacctcttaatactattgctttagggattggatttcaacaatttgggggaacaaaaacattcagaccatagcgtcaaaccacttaattttttcaaaaccgaacttttccaataaagcagtaatcaaaaactagtaaatcttggcaattaaggctggccctggaatcccttgccattttttctttctcttttctgatgacctctctctctatttccagagtacttatgatgccccaaatctcccttccaaccctgtctaacctttgctcctcagaatgctttgatttgctttatcctctcatcagaattcacattctcttagtatgttgaatgagtgacctctagttcatactgaggtgtagttttttgtttgttttttcagacagtctcgctgtgtctcccagactggagtgcagtggcatgatctcggctgactccaacctccgcctcccaggttcaagtgattctcatgcctcggcctcgtgggtagctgggatcacaggtgtgcactaccatgcccttttttgcatttttagtagagccagggtttcactatattgaccaggctggtctcaaactcctgtctttaagtgatcctcctgcctctggctcccaaagtgttgggattacaggtgtgagccaccgcgcccggcctaacgtgaagtttgttggtaacaagcttctgtattttctgctattggcaagaatgcttattcacacgtaacaggaatttaacagttggcattaatgttgcccaaaccagactctacttttggtggtgaaaaggccatttctggctctgaggccccttgaaaacacaactgattttttttactaatttctctgaggcttgatatatcactagaataagacaaatacctaaattaacagtagcttaaatagtttgggggtggttattcttgcgaatagtcagaggtagctagttcaaggctgacatgatggcacagtggtgttatcaacagtccagattggctccatctttctgacctgccatccttagcacaagacttttcctctcaaagaagatcatggttgcatactggctgctgcaggcatattgtattcacaaaaggatgatgataacaaggtaaaatgaagtggaaaatgaaaagtgaggcatgaggctggagaggtaaactagccaggtctctagcagccgtgtggagggcaagcagagaaggggcaggggatgcaggaattgacatgggcaacatggggacctggtattaaggaattgtaatggctcaagcaacgcaaactacagatctgaattagcacagtagcaatgtgaaaaaggaatgaaattgagatattgaaatggtaaaataggcaggaatggctgagtagatgtgagggagtggaagaggtcaacgttgattcctaggtttctgtcttcatttatgaaaaaaattcaggaaaagcagtcactctttaaagatgaattcagatttgtgcacattaagttcaagatgtctgtggaacatataagtggagatgtccagcagtcagctggatatgaatatgaagatagggggagtggtcagggatggagacagacttttgaatcatctgcaaacatacatcccaaggtaaaagagtagatacactatagtctcccagggagcacacacagccatggttctcagtctaatcctgggacaccaaattattagtgggtaaaggaaaagaatctcaagaccgaatggtcaagaaaccattctagggaaccaaactaggagagagtggcatctcagaagccaagcgtgtcaaggaaggaatagctaacaggatgtgtgtaaggtatgtacacaaaagagctttggaatccatcttgggaaatatacagtattagctgttttaaggagacatgctttaaatatcaaagcaagtcatcctgatttaaaaaactcccacttgtatagaggaataccaggatttgagcaccaccaaatggaactcattccctgacatcccaaagccatcagaataacagtagaagcgtcaagacagttactatatgattttccctgcaagacattcagtaatctatgattccccctgcttaaattttatctcatgccttcttccctgaccagttcaacacaagcagccctgagatgtaatatcttctcaccctgaccctcaaagtgtgtctcatgctttctaacagaggccatcctcttggaggaagacttgtacttttggcctgtagccccaccctccctcctatggcgttcttacagtcagttctgcagtgagtgggacactttccaaatataatagcaaatggaaacttctaattacatctgcacataaaactaatgttccaaatggtggttgcggttctggtgagtgcttataattttttgttacctcagcatccatttttgaatatgtttaacttttaataacagaagcaagtctcagtcaccattgacagtttccagtactataccccacgcaaatggctctagctggtggccagagataaacatgcagtgatgtgataacagggcactactgcagcttcaaactctggttcaagttcctcccacctctgccttttcacctgcttgcttttaaatccaccagttagagctctccagaggaaacctaactggataaagttgctggcccaaaggtccgttcctcccttccctctccctgttctccctgatctccgtgtgtgtgtgtgtgtgtgtgtgtgtgtgtgtgtgtgtcctctaggcaagctgtgtaccacccagggtccgtaagtactaaaaactcttaaactttcacaccgctgtgttattgaaaccatgcctacaatccagtccctgagggcgaggccaccctgaagggacagactcatgcaggcggattccctggtcttgctcttctgtccctgcctctggtggctgctggggaacagtagctaccagctaagttgatagagacactcgaagaggttcattcaaaacactggtccccgagcagcccagtaagcttttaaacgcataacattttgtttgggtctcaaacaagtcacaaggcacggatacggatgcggctgtggctgatggctatttggatgctgcccaagcctcgcagtaggaagcagcttcagactgcagcagggccgcatagcccgatagccaggccctggggcacccagggcaccagcaagacgcacagaaacgttttgaaaaacattttaatatacttaaaaaaaaagtaaaagggaaaatcagaagtctttggaagtttcctactgtttttatgtcccatagcaaatccgaggaggacgccccaaactttcagttccctggggttttgaaggtgctcattgggtcctggccacccggccttctcagaacctgggccaggaggctgagctccgcgcgggggtggagggagaggaggaggttcctgccgaggtgcggctgcgcggtgcgggagccgggagcctgggagggcaagggcatcctgaggggcggggccggggggcggagccttgcgggctggagcgaaagaatgcgggggctgagcgcagaagcggctcgaggctggaagaggatcytgggcgccgccaggtaagaaggcccgaaggcctgctggggtttgggtgagccgagccgaggtggcggcggcagtctgggcccgggcggagggtctgtgggggctacccccgtcctcgctttccactcgacccctgccgggcgagcctcccgaggcctggcccttccaaccygtcaccgcggcccggtgtcctagccgaacgctggcttcattttatctacgaggaaggagaaacggggagcgcgccctctcccagaagcagccccgttacccccgtcgcgccccccattccctcgggggcagcctcgcacccgggcccctgccatcgctttcgtctcaagggaagctctagcggtccagagaaactgcgccgggggaaaggccagccctccgtggtcacggcagttcctctctcccctcgcggtctaaatgtgtaattttgaaaagcaggtgtcgggcgaaacggacttttttttttttttgagatggagtttcgctgttgcccaggctggagtgcagtggcgcgatctgggttcaccgcaacctccgtgtaccgggttcaagcgattctcctgccacagcctcctgagtagctgggattacaggcatgcgccaccatgcctggctaaattttgtatttttagtagaaacggggttttcccatgttggtcaggctgatcttgaattcctgacctcgtgatccgcccgcctccgcctcccaaagtgttgggattacaggtgtgagccaccgcgcccggccgaaacggasgttttaagtacaacgtgatgttttgttttcttgggtcggctcgggccgcacccttcttagagtctgactgctgacttttcaaaaaacaacattaacccgggaggctgaggtagcggtgagccgagatcgcgccattgccctactgcctgggcaataagagcgagactccgcctcaaaaacgaacaaaacccacaaagaacaaacaaaaaaaaccaacattaagcagtgtgccttttatggccgtttagtgatacccaggctcttcactggtcatttctggaagtatttaacagcacttgatgggtaaaacaataggcttcacttcacagggtggttgagatgattgacggaaagcgctcagcacaaacgcggcggctgctaattatttcaggtaccctgcgatccctgagcagttgttcaagttctccactcctggcggtttactcccagttccctgaagaaggcacagagccccgaatgttgagggagatggcaacgtttgccaaaatgtggctatttacgtggcagtttatgaaggagaggcagaaagggaggctgcctcccctacaagccaaacagtcctaaaacttgtggcctctgtattttcacagtggaaactagaaactgtttgctgaacttagctgtaagaaaaacatcccattagctgagtggcttaggagataaaagcctaaataaaatggatcttagggtgagagagtggggtgcctaatggcattcatctttgacagctgctggtagaagctcttgaaaagtagagcatggaaaattctgggccacctctttaagaacctcagccaaaccgccacagacattgccaagcccagaagtgcttgaggctttctaaaggcaaagacttctttttacttatgtcctatatcttaggaaacatattcactaaaccttggttttgcatgtgtacttaacacgggaggggccgtgagtgcggagataggactctttggagagttagggattggcattccggaacaaactgcaggaaaggcccttgtaggggaagctgcagatttgtttggtccaaagagttctggcctaataagtgggagctgaccaatgagaacacttggacacagggaggggaacaacacacactggcgcctgtcggcaggtggggtgggtggggatagagcattaggaaaaacagctaatgcatgctgggcttaatacctaggtgatgrgttgataggtgcagcaaaccaccrtggtacacgtttacctatgaaacaaatctgcacatcctgcacatgtaccctagaatttatatgtatatcacacaaagagttttggagtggttattcctggcatgagaaccttggctggattggaaagccttttccgttatgatggttgttttctctttgtctcttcctgctgatgtaatttgttccgtgaactgagtgatggatgtttgtctgggcgcttcaacaggcatggctagarcaggtattgtgtatgtctccaaggtgacacgcagacctggggttcaaaagctctagttctctgacattgctgacactaggtatcttgtgagttgccagcccctggcgaatagaaacaagatccatccagggtggttttgcgactaacatgttgccttgggacaggtaatttcatcccactgggcctccactaatttcctataaaataaaaacattgggttttattttgaggacacttctagccttaaaattcttcagtctgtaaggcctcaggctcctaggaggagtaaccatactcatgggcaactgtgaatcttgtggaaacaccactgatgtcaamtstcttctctaatgacctcagcttaactaatgtatttcagaagctgaatttataagaagtctcccrtctccccactagagtttaactatggttcgttcactcagagcttagacctgggtttaaatgctgttctaccagtttccagttcagaggttgctataataattttaataattttttttttwaattttgagacagtctctctctgttgcccaagctggagtgcagtggcacagtcttggctcactgcaacctccacctcctgggtgcaagcgattctcgtgtctcagcctctcaagtagctgggattacaggtgagtgccaccacatctggctaatttttgtattttttttagtagagacagggtttcaccatgttggccaggctggtctggaactcctggcctcaagtgatccacccgcctcagcctcccaaagtgctgggattataggcatgagccaccacactcggccttataataattttctactgctgctgaaaccaccacaaatttagctgtttcaaatgccacaagtttattaatctttccattctgtaaatcagaagtctgacacaggtctcacagggctgtaatcaargtggcagggctctgtgctgctctggargctctaggggagagtctgtttctgtgctcattcaggttcctggtagaatatagtccttgtgactggaggactgaggttctgtttctttgctgagtgtcagttgaggaccattcttagcttctaaaggccgcctgtgtgccttggcttagggaacccttcgtgtcttcatctcattcttcaaatttcttgcctctttttctgttgtcggtcatragtctttgacagactctgctaccttcttcctctttcartgacccctgggattacattgggcccattgaataatccaaaataatctccttaatctcatctacaaagtcacttgccatgcaaggtctcctgttttcacaggttcctggagttaggatacggacatttttggggaagagaggcattattctacctaccacataagttagttgcataaattagttctcttcctcaatcttgtttcctccccctgtaattggaggcaaaggttcagtttaccttatggtattattgtgaggattaactccagttactatgtcaagagcatctatcttagcaactggcccttgatatttgctcaccaaatggaagttaacacaggaacaaggtgtattagtccattctcacactgctataaagaagtacctgagactgggtaatttataaagaaaagaggtttaattggctcgcagttctttgggctgtataggcttctgcttctgggaaggccttaggaaacttagaatcatggtggagaaggggaagcaagaatgccttacttggcgggagcaggaggaagacagcaaagggggaagtgctacacactttcaaacaaccagatttcctaagctctgccacaagacagcactagggggatggtgctgaactgttagaaaccaccccataatccagtcacctcccaccaggtccctcctccgacactggggattaaaattcaacatgagattttggaggtgtattagtccattttcatgctgctgataaagacataccgaagactgggtaatttgtaaagaaatagaggtttaatggactcacagttccacgtggctagggatgcctcacaatcayggcagagrgtgaaaggcacgtcttactggcagcagacaagasagaaatatgagagccaagtgaaaggggaaaccccttataaaaccatcagctcttgtgtgacttattcactaccacaagaacagtatgggggaaaccgtccccagtgattcaattatctcccaccaggtccctcccacaacacgtgggaattatgggagttacaattcaaaatgagatttgggtgggaacacaaccaaaccatatcacaaggtcttgcctaatggcttgcattcaatgtcataatcatatgggcccttaaaagtagaagcggctcctaaatatttaagaactaacagcttcttttataaccctgttggaagaaacatttccaacccaatctaaagtaacctggcccttatgccaggtcaccctctaacccagtggttcttagtgtgatccctgaaccagcagaaacgcagcacctgagtgctggctcaaaatgcacattcttgagccttacactagcccacctgaattaaaacctctagggctggagtctaatcatctacttaagagccctccaggtgattctgatgctccctaaagtttgagaaccactgttatgaccctcttttattttyrycctagtctttagcaccagttggtgtaggagttgagacctacttcacagtagtaagtatactgatgagtgaattccttaaatgttattaaataattatttgatgtgttaaatgttttatgttcaatttctttggattgcatatatatatgtgcatatatatgtgtatttgtgtgtgtatatataatgtatgtataygtgtgtttttacgtatatatgtaatatatattatatatgtttatatacagttgaccctaaaacaatgcagggttagggacactgaccacctacacggttgaagattcaagtttaacttttgactcccccaaaacttaattactaatagcctactgttgaccagaaactttaccgataacataaacagttgattaacacacatttggtgtgttatatgtattgcctactgtattcttatgataaagtaagctagagaaaagaaaatgttacttagaaaatcgtaaggaagagaaaatccattacagttctgtactatagttattgataccatcagtttatgtcgtctgtttacaagatgaattacttgtctgaaatggcaggcggccacaactgcagacctcaatctgtagtacatatcaagyagttcaactgttttttggtaacatcatgacttttttctgcttcttgggagcgtggccagcatcacttgtggcaccctgtaagggtctcatgtgtcattcaagttttacactattgcgcttaacacgataaagaaaatactcaagaactgcaagagatcaccttttactgtgatgtgcaatttcttaaagaggcaaacagctcacagataattagcatcacatgatactaatcatatccctgctgataagtagatccttgcaacacttgagctcactgcaatagcaacaggaggtggctatggcattattaacagtatatactatagttgattttatgcagtatgatttaatactgcatctttacatttgtttacatttctctttactttggtgccatgtctggtctgtgtttgtgtgtgtaagttttaataatttatttttttgagacagggtcttactctgtcgcccaggtgggagtgcagtggtgtgtcttggcccactgcagcctcaacctcccaggctcaagcaatccttccacctcagcctcctgagtagttggaactacaggcacacgccaccacacctggctatttttttttttgtagagatggggttttgccagtctcgtctcaaactcttggctcaagcaatccacccacctcggcccctcaaagtgctgaaattacaggcaagatccaccatgcctggctgacacattttaactttataatagatttgtgtatgtttttgggtagtgataaaatagactagtatctatatacattttatacattcatgacatacytaaatttttcttaattttaaaaaatatttctaggctatgcagtttatctaacagttttttcmattgcaaatctccaaaatattttccaatatattttcagaaaaaaaattgcatataaatggacccctgcagttcaaacctgtgttgttcaagggtcaaatgtgtgtgggtgtatatatatatttaattgatatttggggggccggttggggttttggatgaacagtaacacgttttcctacttaaaatagtggaaatagactcattacattttctacccaaatacccagaacatttgctatctaaaacattttcaggaacttgataagaagtgcctgtattttttttttttctcggagatacggggtttaagttcttttttaaaaattatactttacgttctggggtacatgtgcacaatgtgcaggtttgttacataggtatacatgtgctatgttggtgtgctgcacccatcaacttgtcgtttacattaggtatttctcctaatgctatccctcccccaccccccaactcccgacaggcccyggtgtctgatgttcccctccctgtgtccatgtgttctcattgtttaactcccactgacaagtgagaacatgtggtgtttggttttctcttcttgtgttactttgctgagaatgatggtttccagtttcatccatgtccctgcaaaggacatgaactcatcctttttcctgcaaagaactataactcatagtattccatggtgtatatgtgccacattttctttatccagtctatcattgatgggtatttgggttggttccaagaatttgctattgtgaacagtgctgcaataagcatacgtgtgcatgtgtctttatagtagaatgatttataatcctttggatatatacccagtaatgggattgctgggtcagatgttctagatccttgaggagtcaccataccgtcttccacaatggttgaactaatttacactcccaccaacagtgtaaaagcattcctgtttctccacatcctctccagcatctgttgtttcctgactttttaatgatcgccattctaactggtgtgagatggtatctcattgtggttttgatttgcatttctctaatgaccagtgatggtgagcattttttcataagtttgttggctgcataaatgtcttcttttgagaagtgtctgtttatatccttcacccactttttgatgaaattgtttgttttttcttgtaaatttgtttatttgtagattctggatattagccctttgtcagatggatagattgcaaacattttctcccattctttaggttgccttttcactctgctgacagtttcttttgctgtgcagaagctctttagtttaattagatcccatttgtctattttggcttttgttgccattgcttttggtgttttagtcatgaagtctttgtccatgcctatgtcctgaatggtattgcctaggttttcttctagggtttttatggttttaggtcttacatttaagtctttaatccatcttaagttaamttttgtktaaggtgtaaggaaaggatccagtttcagctttctacatatggctagccagttttctcagaaccatttattaaatagggaatcctttccctgtagcttgtttttgtcaggtttgtcaaagatcagatggttgtagatgtgtggtgttatttctgaggcctttgttctgttccattggtctatatatctgtttcggtaccagtaccatgctgttttggttactgtagccttgtagtatagtttgaagtcaggtagcrtgatgcctccagctttgttcttttggcttaggattgtcttggctatgtgggctcttttttggttccatatgaaatttaaagtagttttttccaattctgtgaagaaagtcagtggtagcttgatgggaatagcattgaatctataaactactttgggcagtgtggccattttcatgatattgattcttcctatccatgaacatggaattttcttccatttgtttatgtcctcttttatttccttgagcagtggtttgtagttctccctgaagaggtccttcacatcccttgtgagttagattcctaggtattttattctttttatagcaattgtgaatgggagttcactcatgatttggctctctgtttgtctgttattggtgtataggaatgcttgtgatttttgcacattgattttgtatcctgagactttgctgaagttgcttatcagctgaaggagattttgtgctgagacgatgggattttctaaatacacagtcatgtcatctgcaaacagacaatttgacttccttttttccaattgaataccctttatttctttctgttgcctaattgccctggccagaacttccaatactgtgttgaataggartggtgagagagggcatccttgtcttgtgccagttttcaaggggaatgcttccagtttttgcccattcagtatgatattggctgtgggtttgtcataaatagctcttattattttgagatacattccatcaatatctagtttattgagagtttttagcatgaagcgctgttgaattttgttgaaggcsttttctgtgtctattgagataatcatgtggtttttgtcgytggttctgtttatgtgatggattatgtttattgatttgcataygttgaaccagccttgcatcccagggatgaagccgacttgattgtggtgaatgagctttttgatgtgctgctggattcagtttgccagtattttattgaggattttcacatagatgttcatcagggatattggcctaaaattttgttgttgttgtgtctctgccaggtttcggtgtcaagatgatgctggcctcataaaatgagttagggaggattccctctttttctattgattggaatagtttcagaaggaatggtaccagctcctctttgtacctctggtagaattcagctattaatccatctggtcctggactttttttggttggtaggctattaattattgccttaatttcagaacctgttattggtctgttcagagattcgacttcttcctggtttagtcttgggagggtgtatgtgcccaggaatttatccatttcttctagattttctagtttatttgcgtagaagtgtttacagtattctctgatggtagtttgtatttctgtgggattggtagtgatatcccctttatcattttttattgcgtctatttgattcttctctctttccttctttattagtctggctaacagtctattctgttgatcttttcaaaaaaccagctcctggattcattgattttttgaagggtcttttgtatctctatctccttcacatctgctctgatcttagttatttcttgtcgtctgttagcttttgaatttgtttgctcttgcttctctagttcttttaattgtgatgttagggtgtcaattttagatctttcctgctttctcttgtgggcatttagtgctataaatttccctctacacactgctttaaatgtgtctcagagattctggtacgtcgtgtctttgttctcattggtttcaaagaacatctttatgtctgccttcatttcgttatttacccagtaattcaggagcaggttgttcagtttccatgtagttgtgcggttttgagtgggtttcttaatcctgagttctaatttgattgcactgtgttctgagagacagtttgttgtgatttctgttcttttacatttgctgaggagtgttttacttccaattatgtggtcaattttagaataattaccatgcggtgctaagaagaatgtatattctgttgatttgggatggagagttctgtagatgtctgttaggtccacttggtccagagctgagttcaagtcctggatatccttgttaatttcctgtcttttgatctgtctaatattgacagtgggrtgttaaagtctcccactattattgtgtggaaatctaagtctctttgtaggtctctaagaacttgctttatgcgtctaggtgctcctgtgttgggtgcatatatatttaggatagttagctcttcttgttgcattgatctccttaccattatgtaatgcccttctttatctcttttgatctttgttggtttaaagtcttttatcagagactaggattgcaacccctgctttttttgctttccatttgcttggcagatcttaattcattgtgagtagccttccacgcccattacttttcctggctatgcrgttccccaccatggaagtgtaccatagtatactcatttccttattgttggatgtgtgtatcactaaatttttgctattttaaagaatgtttgtatgcccttgactatttcttattcctgtgatgaaaggcctacttggagctcccattacggaaatgactttagagtcaacttacgcaccacccaggaaagcctgccgttccttcatcatgggggaagacttgttcctacatatcttctttgagggatttttcagttgtgcattctttagaatgattaaaaatcattcagaacaatagcagtattattagaacagtcgttagggacaaacccaccgttattaatgaatcctgaaatgtttggaaaggagttgagtgttgatgctttctgagtgtatcttgcatttaagtacttggtttgggtggaatggcaacacttttggttcatttaccatcttatctacacttaacttatgggcatcttcttttttttttttttttttccttaaaatggagggtgttttagtctagggagtagttttaccaaaagatagatgatctatgactactagaaaaggaacattgtcatgtgtgaattttcctgatgtttctgattgtaaaagtaatacttggttaattatagaatatttggggaaaggatggcaaaaagtaaaggatcaggaagaaaaataaaaagccataaatgatcttgcttagtgttagttaccatctacattgtagggcatttataaaatagcyttaaaacaatcagctgtttctttttctgcctcccgccctcctccgccccccatacacatacacatactccatatgaacgttttgctcttggaaattcatattttggcagtggttcataaaggcctggtcttattttgatsgaacagcccgaccttggcatctacacatagctacttcctttctctgctgtcttggcttcccctgcagcatgtcatgggatcagctrtagcaacaaccagccagtcatgtggaactgaggctaagacttgacactccccaaccatcccagaaaactgagggcttccttaggtttgatgcctgaggtctcccctgctcattcaacccaggrtgtttctctggcttcctcacctcacatcaccctctgtctgccttcccaccgttcaccccccaacactccctccccacacaatttcttcctcaagtaacctcattactcctgagtagcactaacagtggccacagctttttgagtgccatctttggccaggcattgtgctatgcagtacaygtaactatctccatgcttactagccaaagcgtgatcagaggttaacacatagcaaagaggtgacagagccagaactatctggccttgttcagaggcctccagattggactggaatgcctgtgctctgaaccctttcattgtgttcttcctgctttcttagcaggccacttctttctaaggtacttcaaagaacagctccccatcaggggccctgtgtgttgtggcagtgtgatttatgtcaaggaccattccaagggaagtgtcctgaaccrgcagctcctgccagcctgacacctttccagtgcctaacccgagtcaggagattccttccttcctccttccgtggggatgcctgacattgtagctacattgggtttttgtttgtttgtttggagagaggaccttgctgtgtcacccaggctggagtgcagtggcacagtcacagctcactgtagcctttacctcctgggctcaagcgatcctcccacctcagcctcccaagtagctgggactacagttatgtgccaccacaccagtctaatttttttttaatgtttttatttttgtagagacagggtctcactataatacccaggctccgatcatgctatgcttaacttttaggaagtgtctggagctctctgttcggggacctcagaccaataccttcctctccctgctcacttgtagcagttccttgtatactggagccctgtctaacctgagtctataaatcacccttcctactcagaaacccctgaaaatggggaaccaagcaagccgctggcatgtgctggagcccaggtctcctgggaaggtccacatgggggatggtgtcccgtagcaggctgtaggtttcagagcccagcgggtggtggggagccctcaatttgtaaggaaaggccagatgacaattgtctttcttcctggttcctcacatatcataaaaccacctctttctcatctccaccacccccatctccaggcttgactcactgattgttttcttttttggacaatgtcagaccctgcccttttcctggaacttctcagtcctccactggcctgcgtcagcaaattcctaagtagcagatgaccttcaagatgtgtgagaaggaagggacaggaatgattgtcaggattgtcagttccccagggaactctgcatttmtgacttagggagggtagatgactcacccttscaagaacccatctgtctgtccgggcctgtggggctctggagaatagaatatggagtaccctggtttacaggcactgccacctccttatttcaggatgggttcagggatgtaggattggagttgggagatttcttagttctgctatggatgctttgtacttaggcaagttcaaaacctcccyaagctttggcttctttactgggtaaagtagggttggaggcatttcaggctttccttcttctcacctgatgctatcactacacatctaggcattcacgtaatggaaacttacaaagttgctcaatacctctcttcatgtccccaaagagagcaagcaagtgtccccattatacttcttacagtgaggagccagagcttccaggtatgctaagccattgctccctgttccrctgctgaatgcaygctggtgccttcyagagtcacccctttggtctgattcacttagtgctgtggctccgagaagtggccctctctttcagccagcagcttggggtggggccagtagagtgggaaccacagtggctatatgagtcaatttgctcatattgycatttgactcactgmccctgrtggggaagatagtgttattcccacagtgtggtagtacacactggggcttatagggactgagcctactcaagggtatatggtgctgtgggtcagagctggggcatggcccagggattcagtgtgccttgactccccctgtaaatgttcctctcagaagccttcttggccttccagcccttggtttttgagacaaccagcagtcatttgttcgttcctgacattccttcctgtcccttccttccaggttctgtggacaatcacaatgggaatccaaggagggtctgtcctgttcgggctgctgctcgtcctggctgtyttctgccattcaggtgagtgctccagtctcaggacatggatctaggctgccttggccatgaactcccttcttaagcctcagtttcagccccagctgctcctccaggcctggctttggttcttttgccttccagtgttacaggtctggggttgtatgacagctccttcctatgttatgaccttgtcctcagtggggcatcgtcctgagttacagcccgtcctgagttacagcgtggcttttggcaggggtgggtcaacamtcggcggctgaagtttcactcctgtcaccataagctgcttggggacaccaatggataccattcttagagtgctgtgcaagtccctttggggtccactctgcttagagccatctgagctcagtccttctgctctgaggctcctccngtgttttaatgatgatgatggtcatagtgacagcagcagcagctaactaaccctgaagcatttatgtgccagtcactactctaagcattttacgtgtatttgctwatttaatcctcatgccaacctgatggagttggtggtatttttatccktgttttacaagcaacaagattgaggcctccccaaaattaataacttgtcaaataacacacagaagtggtacacgggaatgtgaacacacagtctggcarcagagtccctgctcttccctcctgctccaggccatctgtcactgggccaccccctctcctcagccacccctcccctggttgctggaggaaattgtgtgcttctgagtcaacttctataacagtggaaacacacatgcttcattgtaaagatcaagtgtggttgtctgcctgtgtcatgttggtataatatcttggccactgctggttttttgttttttataaatatggttggtggggggagcagaaaagaaagtggcaatacartgagcaatttaaaaaaagatttccacaccactgtagcatgtcttagaatattaacagcaaccatatattcactgtttattgtttactggggactgtgccagagcctgtctcatttaaatccrtccagccattccgggaggtcggtactgttacctcccatattacagctgaggaaatgaaggcaaagtagtaacttggcgccaggacacactttaatatgttctccctttctgagcagaaagagaagtcatggcaccccttcttccccaccttccgtgattctagccagggtgcactgtaatgtggttcacctgtgttaaaacactatattttttctataattattttttatttattcatttttcttggttccttctttttttctgtctctgctgcttaagttggaatattttctagaattttaatagcccagtgacatcctacttccagcagtctgcatttgtttatggagcaagcttgggaccatcagcttctctgtgacaagtcttggggtgcacttcagccctttctcagagaattgagatgtgaagctcacatgcccacagatgagaggccttctttgctgctgcccaaaagggtctcaggaccctgcaggggaactttcctctgagctctgcctcttatggcccaggggaaacctcgtctaccctggcttagtggctaaaatatcaaaccattgtccactgacctattgcttgtttttttttgtttgtttttttcagggggatggagtctcactctgtcgcccaggctggagcgcagtggcgcgatctcggctcactgcaacctccgtgtcccaggttccagcgattctcctgcctcagtcttctgagtagctgggattacaggagcatgccactatgcctggctaatttttgtatttttttttatttactttttaatttttgtatttttagtagaggcgggctttcaccatgttggccaggctggtctggaattcctgacctcaaatgatccacctacctcagcctgccaaagtgttgggattacaggcgtgagccattgcacctggccctgttgcttgtttttgacctcagtttccaccataatctagagtttccttctcttcccactcaggtcaattagaagaacatcatggttaaccaagcttggattttagaactgacagcctgagtttgagctcagctcggtcacttagtagctgtgtggctttgaacaatttagttaacatcttagtcttagttttctcttgcaaggtggggatgaagataattgagcctagttctcttaacaatcctatgaagagcttagcacatagatgcacatatatttgaacactgaatgaacatgtttgccatsaatatttttgcccacagacgttccaaccatgggttttagcctttccttctaaagctttcttaagaggccaaatgagcccgggatctagccascacaaaaatccatgtctacaggtaaccttttaaaatggccctcaaacatggccagtctcaagaacaacacccttcatcttagactcttttcatttcatgcgtgtgaatacatgtctggcacaaggaagggaccaaagaaaaattgcatctttgcgccttctccttgtggcttccctctcacacgggcatgacagccacaggctgacagtgggggagaacaaacaaagcctggtggatggggccctgcccacaggccccagggctgccgccagctctgctgctttgtagccaggtgtccttgtgtgagtcacatcacctctccagacatctgtcttgtcatctgcaaaaaagttggggaggaggttggtttttattttattttattttatttattttttagacatggtctcgctctgtctcccaggctggagtgcagwggtgcaagcttggctcactgcaccctccacctcccaagctcaaatgattctcatgccttagcctcctgaatagctgggattacaggcatgtaccaccatgcccggctaatctttgtatattttgtagaggcgaggtttcaccatgttggccagggtggtctcaaactcctggctacaagtgatccacccacctcggcctcccaaagtgctgggattgtaggtgtgagccgccacacctggcctagtttgttgttgttttttaaaactaatatttcaaggcattaatctgtaaccttcacaagtcagaggatcctctattgggtaggatttcacacctgtgagggcagrcatggccatttcagatgctctagagaactgggttcctgtgtgtgctcagaaagtgaggacccaccttgcttccactggactttccactgaaaaatctatttccatggtgataaacctagccttcagccttagaactagaagtcagctgttgggctctaaaacccacacttggtttaaccatgacattcttttgtgagattttacgtgtttcatctttgaaaatgtcttttcacagaggtaggtacttccaaatactgattacatggtagaagtcatatggcatgaagatagtttatctctgatgatggaaaagggggtatccatacaaaccaggaagatttccttccaactcttgcttcctcagtctctccccatcacacgtgtggactgtaactcatctttttgttgtcactgttgttacaaaaatggagaaggaaaaataacccagcaaaaactgacagctagcaaggatgagtcttaagaattgactgggagcaataattgtttttcaaactagggaactggaggcaatttgcttctgatgtaagatgaccctcacgttgtgtctgctggtacccagctgtcctatgcccatgggtttaaagtgcacagctgttgtcttgtctttgacagtgtgtactcctggcattcggtcagtcccttagaagggrgtagttcagtaatgataccctgtcccagaggttaccaaactttttctgtacaggaccagatagcaatttttttttttttttaaacagagttttgctctgtcacccaagctggagtgcagtggtgcaattgtggctcactgcaacctctgcctcctgggttcaagcgattctcctgcctcagcctcccaagtagctgggattataggtgtgcaccaccatgcctggctaatttttttatttttagtagagatggggtttcgctatgttggccaggctggtgtcaaactcctgacctcaggtgatccaccctcctcggcttccctaagtgctgggattacaggcgtgagccactgcgcctggcccagatagtaaatattttaagctttgcagrccaagaggcaaaatcaagggtattatgagacttacctcaataataagaaacaaaattttcacagatttttttattgacaaaattcataacataattattgagtccagcataataatacayatctactaatgaggggaatagaattctttttagggggataaccatttgcttaattggggttcaaaattagtgttccctcgcatcaaatcaattgcagatgttcatctattaatactaatctgtgatgacattttacatatttcattttgaaaatgtattttcacgcagataggtattgccagacattgatcatcaacccacgaggatgtgatttaattgggcatattcattgcttggaagacacttatagaattctgtttgtttctcggtaatttcttcttaacacatcattacattgcagactaatctccttccagttgcaggttaggaggaagcttctcaattgcacagttagatggatattcaaatgtggatatttcctttgtgcttgcatcagggtccaaaaaatgttgctggaactgtagtttgaatttggaaagatataactgctatacatttgtgcgggagtggaagtataccacaagttgctgactttgggcccatattaatggagatggtgggctgccaggggacaagtcagtgctgctttaagagatcctgactttcttcctgattctaggtcayagcctgcagtgctacaactgtcctaacccaactgctgactgcaaaacagccgtsaattgttcatctgattttgatgcgtgtctcattaccaaagctggtaagagcctcccctgtctgtctcctaaatgtaatggggtaataagtgcctgggaaaaaaattgtgccactgtaatcctcattaggcttgcatcaagtaatagctaccatttattagcgtcaggtgtgtattgggctaagcactttcttcatacattttaaatttaatgttttgcacttctaagggtgatcttttatttccatttgataaatgtggaaatggaggttcagattaagcaagaaattatggttaagtaaccgactcaggaattgaacatggaagtccatctgattccaaagcttgtgctcttttacagcagccctgtgctgcctcccagaccttggagaacctactgtgtgcccagcagagggttaggagctagggatgcaaagataaagaaaggacacatacaattaaaattatgacaaaggcctgtttggctgtcctaaatgtcattatatatgcctctgtctcattccatggggtatctggtatattcagagtcctgaggagactcaagctgagctcaaaggacacgtaggaggtaagagggctaagaagggaagggtgtgcctgggaggggcaacagcaggtgccagggctcggtagcctcagagcaaggtgctcatgaatttggggatgggcaatrctaacatgcacaagtcctgtccagtctgcattttccaaatttgttagactacagaatattcacctccatcaccctgttaaaatagagtttaggaagtggtagacagaggaaagaaaccagcaaagacatgccctctgttcttgctggggtgtggttctggatagaatcgatgtgtgcaaatgatgccagcgaggaatggcagtttcagaatgttcttagtgtccaaggtaaaaccctcaggcttagatttctaagagattaataataaaaacactccacaaggttatttgtactcttagaccttctacaccagctccccccagtgtcaacatcaagaaatggtgaacatgtcaggtaaactcagaaaagccttgggacacccacatgttcagaaaaacctgagataaagatgattaacttccccagaaaggagaaatccctcaataactaaagacaaattatagttaccctgtctaaaaaaacaggggcatctgataattttgatatatttagctggatttgataaatttgatrtagtttagctggattgcagctaaaactccaaaccttccattcagagctcttgattctgtagggsaccagtccctctgcccccactggaagaccatattcattcactgttaatgtaggaagcgtagtaaggcccctagcgagaacatggtcattatgtacgagcacagaagacttggctctttagcttgatcaactgtgtctcttggactcctcactactaagtataattaaactaagtatagtttccaaatgagacgataagggcaattastatgtgttgaatgaatattacagcagcaattagagctctgacttctgtcctgccaccagctagctctctccacctctgtttttcatttatgaaatgtatgtgttggacagcagaggtagggaggagaggaaaggaggtcaaagccaagatctttttccagctcttaaatcccaaaatttcttataaatggttaatgtaaacaaaaatgagacacacctattaaaatggccaaactccaaaactctgacaactccagatgctggtgaggatgtggaacaatgggaactttgtttttctggttttttttttcttttttgagacaaggtcttgctctgtcacctaggctagagggcagtggtgcaatcttggctcactgcaacctctgcctccagggttcaagtgattctcatgcctcagcctcctgagtaattgggattacaggcataagccaccatgcccagctaatttttgtatttttagtagagacggggtttcactattttgcccaggctcatctcaaactcctggcctcaagtgatctgcctgcctcggcctcccaaagtgctgggattacaggcgtgagctaccacgcccagcagcagtgggaactttgattcattcctagtgggaatgcaaaccagtatagctactgtggatgacagtttggtagtttattacaaaactaaaatataacacaatatataatacttgatattttgataattatatacagtatataatattttataataaatgtgttactggtttgtgtatttactatattttttatcatgttagcatgtagtccttctacttactaaaaaaattaactataaaacagcctctcgggaggctgaggcagaagaattgcttgaacccaggaggcrgaggttgcagtgagccaaggtcgtgccattgtactctagcctgggtgacagaacaagactctgtctctacaaaagaaaaaaaaaaaaaaaaacagcctcagcaggcaggtccttcaggaggtattccagaagaaggcattgctctcctaggacaggacagccccatgagtattcttacccctaagaccttccagtgggacaagatgaagaggtggaaaacagtgatactgatgatccagaccctatgtaggactaggctaatgtgtgtgcttgtgtcttcatttttaacaaaaacaagaaaagtttttaaaaatttttttaaataaaaaagcttataaaataagaatagaaagaaaatatttttgtgccactgtataacatgtttgtgttttaccctgttttattacaaaggtaaaaacatttacaattaaaaaatttctaaagtaaagtggcagtaaactagggttgattttttaaaataagcttagtgtggactaaatgtacaatatttaaaacatctacagtagtgtacagcaatgtcctaggccttcacattcgcccaccactcattcactgacttccaatctcacaagctccattcacagtaagtgccctgtacaggtgtaccatttttaaaatcttttgtgtcatatttttactgtatttttctatgtttagatatggtcagatacacaaatatttaccactgcattacagttgcctacagtattcagtatagtaacttgctgtacaggtttgtagcctaagagcaataggacataccacatagcctgagtgtgtactaggctattccatgtaagtttgtgtaactacacgctatgacgtttgcacagagacagatatgatggtgctatacaaagtaagtctaraagagagacaggttggctgctaattcaaccaatatttactggcatcctagcagtataaaccatggaagtgtaagcaaggttaaatgtacttagtcttgaaggagcctctgatgacagtgtcaagtggtcactgctgtaatgacgttctgaacaagggccacatttaagggtgcctaggacagctgaagactgttgactttagatagacttgagccgaagtcttcaaaaagagtgaggaggagaaaacctgtaacactccagggattctgatataagccacttttatgtggataattccaaggctggctttggtgagattattaccatcgttaaggctgttgtttgaatatgataattcaagtaaagcactttggtacgctgcacgacacatagtaaatgattaattggtagcaattattcataaattactgtctgttctccccaagcttctaggcttccctaattaaaattctgatagctttaaagcttttcaagttccaatgcgtaattactgttacaaagcagtaacttgtctgaatcaccagcagcctctagtacaatattagaagcttccagttatttagttaagacttcagcaactagagccatttctggaatactctatgtggactctgccacttgactaaacttcattaaattccaatccagatacccatcccctcagaggaggaggacaggacagttatgcctgcagttataaactgagaagtgttgtgttccaagctctgcatggaattgggtaaattagctacaagcctgaaataaggaagtatgcatctgcgtttttttctttccagcacagaagataagaaaccactttcagggcaaggacaaataccttcttataccccagtatctagcacacaggcactcagttatttttggagaagaaaatctaccataataccactctctcaactaatacatttttcacctaacatgctttttctgaatattaaaaaaactgtgataagatacttggagtatatacttctggcctttattttcctgtgtgcccaaggctatttttccaaaaatgggaccatgatggcgtgttttttgtagaaacttttccagtattactgaataatctaatgatttttaaaatgaagtttcaaatattttaaaaataaatcatccatgtggcaaattaaaaaaactcaatagaaacataaacgaagtgtattcttccatgatgataacactattaaattacttgggaatccttccagagaaaaataaatgcacttacctcaatgtatatgtgctttatttccacaaatgggtcacattctatacactgttctgcatctagggtttttattgagatataattcacagaccagaacgtttacattttaaagtgtataattcagtggctcttagtatatttacaaggttgtatgacttatcgcaactgtctaattccaggatctttctgtcaccttgaaaagaaacctgttagcagtcagtcctcattcctccctcctgcatgccccagcagtgactgatgtactttctgtcttcatagatttggctctcctgggcacttcatatgcaaggaatcatacagtattgtggcactttgcgactagcttttttttcactaaacataatgtttccaaggttcactcatgctgtggcatgtatcagtacttcattctgttgtggccacatagtattctattgtgtggatatatcacattttgtttatccattcaccagtaatggacatatgggttgtttccactttttagcaattttgaatcatggtgccatgaacattcatgtggaaacttgtgtgtgaacgtagttttcaattcaractacgataagatacttggagtgtatacatctggcctttattttcctgtgtgcccaaggctatttttccaaaaatgagaccatgatagcatgttcttatagaaacttttcctgtattactgaataatctaatgatttttaaaatgaagtttcaaatattttaaaaattatccatgtggcaaatttgaaaaactcaatagaaacataaacgaagtgtattcttccatgatgataacagtattaaattacttgggaatccttccagagaatggcagaagtatatacacttgtgagtggaattgctcagtcaaatggataactctatctttaactttttgcagaaatgccaaatttgtccagagtatctacaccattttacattcccaccagcaatgtttgagggttccaattttttccacttccttgcaacatttgctatttaccattttcttgatcttagccatcctagtgagtataaagtggtatctcactgtgattttcatttgcatgttcctaatgactaatgatatcaagcatcttttcatgtacttattggccatttgagaatcttctttggagaaatgtttattcaaatcctttgcccatttttttttaaagaggcaaggtcttgctttgttgcctaggctggaatgcagcagtacaatcatagctcactgcagccttaaagtcctgagtccaagtgatcctcctgcctcagcctcccaagtagctaagactaaaggcgcaacaccctgcctggctaatttttttattttttatttttgtagagttgggatatcactatgttgcccaggctggccgcaggcaatcctctcacttcagcctcctaaagtgctgggattacaggtgtgagccatcacactggcctcattgtccatattttaattgggttagtctttttattgtagagtttaagaatgttttctatatcctggatactatgctcttacatatgactttaaaaaagaaatagagagggggtcttgccatgttgaccaggctggtctgaaacttcccgcctcaaacaattctcccatctcagcctcccaaagtgttgggattacaggtgtgagccaccgcacctggtggtttacatgtgatttgcaaacattttctccctttctgtgagttatctttttattttttgataatgtcctttgaagcacaaaagttttaaattttgatggagtccagtttacctatttttctgccccccccccacctttatttttttttttttaaatcaagctccttccatgttagcacttgaaggcccacgtcatttcttatctgcatggaacttgcattgtaaggaattctattgtaatttctttaacactttttaaaaattaatggactgggtttttcaggtttttttctgaccattcttgagcatatatcttatacatagctttggctgggcatggtggctcacccctataattctatcactttgggaggctgaagcaggaggaccacttgagcccaggagttcaagaccagatgaccgggcaagaaagtgagaccttatctctctaaaaaaaaaaaagaaaagaaaaggaaaaaatccccaagtaacttcatagcgtaaattctaaaagtggaattgctggatcaaagggggcatgtgtttaaaatcttggcagatattaccaaatttccctcttaacagtataaatgcctgttcctcctccgtcccacccccataactatactggctctgatgagaccttggttttctgtaaaagctctatttagaggtgtatcattatttacttaattgttctcctttacaacccacctgggatgagcatcttgcctagaagtctctacttgcacaggatacatacgaaatagaattgaggattcaaaagcagatacagaactcttcccacttactttcttacccttgtgtgtgtctccccacaggrttacaagtgtataacaagtgttggaagtttgagcattgcaatttcaacgaygtcacaacccgcttgagggaaaatgagctaacgtactactgctgcaagaakgacctgtgtaactttaacgaacagcttgaaaatggtgggacatccttatcagagaaaacagttcttctgctggtgactccatttctggcagcagcctggagccttcatccctaagtcaacaccaggagagcttctcccaaactccccgttcctgcgtagtcygctttctcttgctgccacattctaaaggcttgatattttccaaatggatcctgttgggaaagaataaaattagcttgascaacctggctaagatagaggggctctgggagactttgaagaccagtcctgtttgcagggaagccccacttgaaggaagaagtctaagagtgaagtaggtgtgacttgaactagattgcatgcttcctcctttgctcttrggaagaccagctttgcagtgacagcttgagtgggttctctgcagccctcagattatttttcctctggctccttggatgtagtcagttagcatcattagtacatctttggagggtggggcaggagtatatgagcatcctctctcacatggaacgctttcataaacttcagggatcccgtgttgccatggaggcatgccaaatgttccatatgtgggtgtcagtcagggacaacaagatccttaatgcagagctagaggacttctggcagggaagtggggaagtgttccagatagcagggcatgaaaacttagagaggtacaagtggctgaaaatcgagtttttcctctgtctttaaattttatatgggctttgttatcttccactggaaaagtgtaatagcatacatcaatggtgtgttaaagctatttccttgccttttttttattggaatggtaggatatcttggctttgccacacacagttacagagtgaacactctactacatgtgactggcagtattaagtgtgcttattttaaatgttactggtagaaaggcagttcaggtatgtgtgtatatagtatgaatgcagtggggacaccctttgtggttacagtttgagacttccaaaggtcatccttaataacaacagatctgcaggggtatgttttaccatctgcatccagcctcctgctaactcctagctgactcagcatagattgtataaaatacctttgtaacggctcttagcacactcacagatgtttgaggctttcagaagctcttctaaaaaatgatacacacctttcacaagggcaaactttttccttttccctgtgtattctagtgaatgaatctyaagattcagtagacctaatgacatttgtattttatgatcttggctgtatttaatggcataggctgacttttgcagatggaggaatttcttgattaatgttgaaaaaaaacccttgattatactctgttggacaaaccgagtgcaatgaatgatgcttttctgaaaatgaaatataacaagtgggtgaatgtggttatggccgaaaaggatatgcagtatgcttaatggtagcaactgaaagaagacatcctgagcagtgccagctttcttctgttgatgccgttccmtgaacataggaaaatagaaacttgcttatcaaaacttagcattaccttggtgctctgtgttctctgttagctcagtgtctttccttacatcaataggtttttttttttttttttggcctgaggaagtactgaccatgcccacagccaccggctgagcaaagaagctcatttcatgtgagttctaaggaatgagaaacaattttgatgaatttaagcagaaaatgaatttctgggaacttttttgggggcgggggggtggggaattcagccacactccagaaagccaggagtcgacagttttggaagcctctctcaggattgagattctaggatgagattggcttactgctatcttgtgtcatgtacccactttttggccagactacactgggaagaaggtagtcctctaaagcaaaatctgagtgccactaaatggggagatggggctgttaagctgtccaaatcaacaagggtcatataaatggccttaaactttggggttgctttctgcaaaaagttgctgtgactcatgccatagacaaggttgagtgcctggacccaaaggcaatactgtaatgtaaagacattwatagtactaggcaaacagcaccccaggtactccaggccctcctggctggagagggctgtggcaatagaaaattagtgccaactgcagtgagtcagcctaggttaaatagagagtgtaagagtgctggacaggaacctccaccctcatgtcacatttcttcaatgtgacccttctggcccctctcctcctgacagcggaacaatgactgccccgataggtgaggctggaggaagaatcagtcctgtccttggcaagctcttcactatgacagtaaaggctctctgcctgctgccaaggcctgtgactttctaacctggcctcacgctgggtaagcttaaggtagaggtgcaggattagcaagcccacctggctaccaggccgacagctacatcctccaactgaccctgatcaaygaagagggattcatgtgtctgtctcagttggttccaaatgaaaccagggagcaggggagttaggaatcgaacaccagtcatgcctactggctctctgctcgagagccaataccctgtgccctccactcatctggatttacaggaactgtcatagtgttcagtattgggtggtgataagcccattggattgtccccttggggggatgagctaggggtgcaaggaacacctgatgagtagataagtggagctcatggtatttcctraaagatgctaatctatttgccaaacttggtcttgaatgtactgggggcttcaaggtatgggtatatttttcttgtgtccttgcagttagcccccatgtcttatgtgtgtcctgaaaaaataagagcctgcccaagactttgggcctcttgacagaattaaccacttttatacatctgagttctcttggtaagttctttagcagtgttcaaagtctactagctcgcattagtttctgttgctgccaacagatctgaactaatgctaacagatccccctgagggattcttgatgggctgagcagctggctggagctagtactgactgacattcattgtgatgagggcagctttctggtacaggattctaagctctatgttttmtatacattttcatctgtacttgcacctcactttacacaagaggaaactatgcaaagttagctggatcgctcaaggtcacttaggtaagttggcaagtccatgcttcccactcagctcctcaggtcagcaagtctacttctctgcctattttgtatactctctttaatatgtgcctagctttggaaagtctagaatgggtccctggtgcctttttactttgaagaaatcagtttctgcctctttttggaaaagaaaacaaagtgcaattgttttttactggaaagttacccaatagcatgaggtgaacaggacgtagttaggccttcctgtaaacagaaaatcatatcaaaacactatcttcccatctgtttytcaatgcctgctacttyttgtagatatttcatttcaggagagcagcagttaaacccgtggattttgtagttaggaacctgggttcaaaccctcttccactaattggctatgtctctggacaagtttttttttttttttttttttaaaccctttctgaactttcactttctatgtctacctcaaagaattgttgtgaggcttgagataatgcatttgtaaagggtctgccagataggaagatgctagttatggatttacaaggttgttaaggctgtaagagtctaaaacctacagtgaatcacaatgcatttacccccactgacttggacataagtgaaaactagccagaagtctctttttcaaattacttacaggttattcaatataaaatttttgtaatggataatcttatttatctaaactaaagcttcctgtttatacacactcctgttattctgggataagataaatgaccacagtaccttaatttctaggtgggtgcctgtgatggttcattgtaggtaaggacattttctytttttcagcagctgtgtaggtccagagcctctgggagaggaggggggtagcatgcacccagcaggggactgaactgggaaactcaaggttctttttactgtggggtagtgagctgcctttctgtgatcggtttccctagggatgttgctgttcccctccttgctattcgcagctacatacaacgtggccaaccccagtaggctgatcctatatatgatcagtgctggtgctgactctcaatagccccacccaagctggctataggtttacagatacattaattaggcaacctaaaatattgatgctggtgttggtgtgacataatgctatggccagaactgaaacttagagttataattcatgtattagggttctccagagggacagaattagtaggatatatgtatatatgaaagggaggttattagggagaactggctcccacagttagaaggcgaagtcgcacaataggccgtctgcaagctgggttagagagaagccagtagtggctcagcctgagttcaaaaacctcaaaactggggaagctgacagtgcagccagccttcagtctgtggccaaaggcccaagagcccctggcaaccaacccactggtgcaagtcctagattccaaaggctgaagaacctggagtctgatgtccaagagcaggaagagtggaagaaagccagaagactcagcaaacaaggtagacagtgtctaccaccatagtggccataccaaagaggctaccgattccttcctgctacctggatccctgaagttgccctggtctctgcaccttctaaacctagttcttaagagctttccattacatgagctgtctcaaagccctccaataaattctcagtgtaagcttctgttgcttgtggacagaaaattctgacagacctaccctataagtgttactgtcaggataacatgagaacgcacaacagtaagtggtcactaagtgttagctacggttattttgcccaaggtagcatggctagttgatgccggttgatggggcttaaacccagctccctcatcttccaggcctctgtactccctattccactaaactacctctcaggtttatttttttaaattcttactctgcaagtacataggaccacatttacctgggaaaacaagaataaaggctgctctgcattttttagaaacttttttgaaagggagatgggaatgcctgcacccccaagtccagaccaacacaatggttaattgagatgaataataaaggaaagactgttctgggcttcccagaatagcttggtccttaaattgtggcacaaacaacctcctgtcagagccagcctcctgccaggaagaggggtaggagactagaggccgtgtgtgcagccttgccctgaaggctagggtgacaatttggaggctgtccaaacaccctggcctctagagctggcctgtctatttgaaatgccggctctgatgctaatcggcgaccctcaggcaagttacttaaccttacatgcctcagttttctcatctggaaaatgagaaccctaggtttagggttgttagaaaagttaaatgagttaagacaagtgcctgggacacagtagcctcttgtgtgtgtttatcattatgtcctcagcaggtcgtagaagcagcttctcaggtgtgaggctggcgcgattatctggagtgggttgggttttctaggatggaccccctgctgcattttcctcattcatccaccagggcttaatggggaatcaaggaatccatgtgtaactgtataataactgtagccacactccaatgaccacctactagttgtccctggcactgcttatacatatgtccatcaaatcaatcctatgaagtagatactgtcttcattttatagatcagagacaattggggttcagagagctgatgtgattttcccagggtcacagagagtcccagattcaggcacaactcttgtattccaagacacaaccactacatgtccaaaggctgcccagagccaccgggcacggcaaattgtgacatatccctaaagaggctgagcacctggtcaggatctgatggctgacagtgtgtccagatgcagagctggagtgggggaggggaaggggggctccttgggacagagaaggctttctgtgctttctctgaagggagcagtctgaggaccaagggaacccggcaaacagcacctcaggtactccaggccctcctggctggagagggctgtggcaatggaaaattagtgccaactgcaatgagtcagcctcggttaaatagagagtgaagaatgctggacaggaacctccaccctcatgtcacatttcttcagtgtgacccttctggcccctctcctcctgacagcggaacaatgactgccccgataggtgaggctggaggaagaatcagtcctgtccttggcaagctcttcactatgacagtaaaggctctctgcctgctgccaaggcctgtgactttctaacctggcctcacgctgggtaagcttaaggtagaggtgcaggattagcaagcccacctggctaccaggccgacagctacatctttcaactgaccctgatcaacgaagagggacttgtgtctctcagttggttccaaatgaaaccagggagcaggggcgttaggaagctccaacaggatggtacttaatggggcatttgagtggagaggtaggtgacatagtgctttggagcccagggagggaaaggttctgctgaagttgaattcaagactgttctttcatcacaaacttgagtttcctggacatttgtttgcagaaacaaccgtagggttttgccttaacctcgtgggtttattattacctcatagggactttgcctcctgacagcagtttatgggtgttcattgtggcacttgagttttcttgcatgcttgttagagaaaccaagtttgtcatcaacttcttatttaaccccctggctataacttcatggattatgttataattaagccatccagagtaaaatctgtttagattatcttggagtaagggggaaaaaatctgtaattttttctcctcaactagatatatacataaaaaatgattgtattgcttcatttaaaaaatataacgcaaaatctcttttccttctaagggcctttaatatgtaataacaagagctaatgttgaacacaagccattgccaggtacttaaactgtctcacttagtcttgccaacctaagcaagtagatgccattactattcccattatattgatgaaaaaatgaggttgagaaaggttcagccgcacagccaaatacatagtggatccagggtttggtcccaagtcttgagtccaaaaccctggttcttaccattactgtggttctgtaggggtgaaaaaatttttcttctaatctcttaggttcagagcctggggcctgagaattaaactgacaaagacagattaacagaagacaaagtttattacgcaggtacatggggttcttacagaaacaaagtgaaaacccaaagaagtggcttgagagcttatatacaattttaacaatgggcgattgtagaaaagtgataagacaaaggaaaagaggtttgagcttcttgggcagtaaattatgggaagttaaatatgtgggggaaactaatggaagataagggtattttttattttattttattttatttattttgagacagggtcctgccttgtcacccaggctggagtgcagtgctatgattgtggctcactgcagcctcaacctcagcctccttggttcaagaaatcctcccacttcagctcctgagtggctccaggcaaatgccaccacacctggttaattttttaaattattttatagagacagaatctcgctatgttgcccctggctgttctcaaactcttggcctcaagagatcccacctcagactcccagagtgctgggattacaggctgggtgctgagctatcgcacatggcctgtattagccatagactgaggggaaatacattttcttgagagcctcagcctagtgatcacttgtatgaataaacaatgatgggtggctgccaaagtcagagagcaaatactgcgtgtgacaactaagtgtgggaagctcagtgtgggaagaaaaagcttcccagtttcagacatgccccttagtagggacagctgcctcttgtgtttggacaaagtgtccaagttcaagtgtttcacacacacactgttccgtcttctgtttgatcacaaccctatgaggcagcctggttttcttatttctattttatggaaaacctacttaaaagtcaagcaacttgtccaaggctacccagcttgaatatctgactctctccactttgctgctacacacacacacacacacacacacactttgcactgtgtgtgcagatacatatgcatatatatatttaacttgtgaagctgatactgactctttaactgccctccacccatcactattcataccagtgatcattaggcagaggctctcaagaaaatgtattagttatttcccctcagtctatggctaatacaggttactcacataaatgagctgtcatgtcctttggacaaaatgtccaaatcgctcataagcaatgggtgaagtatttgaggtagggcggacaggatttccttttggtggttagctcgttgcctgttagctcctggtgatatctgtgtttggaagagaactaaactgcatttcactgaaaacactccttcaggtctattacaaaccagatgaggatccccttttctagaatcttcctcaacactgctaacgtttggcagatacataggttggctctaacagccattcccaatcaatcctcttctcctttgtctgcctcccacagtagtggatgaaaaatcagacactgattttctcagacttctttgctgtgggcgcggccagtgaggcaatgaggtaagtctgctggtgcaggggccaggtttctaggaaatacttttctccctcatgggagaaagagaggaagcctgaagtaagctttcttctgcagccctggcccgctgcctgttctggatgagggtatgctgggatatgacaacggaagccagcggggtcgcagagcaagagcgaggcggtgggcggagtcgagggacgggaggcgaggcgaggcgagccagggggcgtggctttctaactgcggggtgcggccagccgcaggtgggcggggccgcgttccgggacgtggtcgtccgggctttggaaccccgcctgttaggggccgggctgaggcgaaagggtggggccgcgctccatcggggcggggcttgtggaacctcgaaaccccggcgactcggggcctgagcgcgcgtctcccggcgcggggttcctcccacgcagaccctcattcaaacgatgccaaaggggcggcgcggcagccacagccccaccatgagccagcggtcggctccgcccctctatttcccgtccctgtacgaccgcggcatctcctcgtccccgctcagcgacttcaacatctggaagaagctcttcgtgccgctgaaggcgggcggggcgccagtgggcggggcggcgggggcccggtccctgtcccaggcgctccccgccccggcgcccccgcccccgccaccacccggcctgggtccctccagcgagcgcccctggccctcgccctggccctccggcctggcctccatcccctacgagcctctgcgcttcttctactcaccgccgccggggcctgaggtggttgcctcgcccctggtcccctgcccctcgacccccaggctcgcctctgcctcccacccggaggagctctgcgagctggagatccggattaaggagctggagttgctcaccatcactggggacggcttcgactcccagagctgtgcgtgacctcgccagggccaccgagcccagccttagcctgccctagctccctccttggctccgtgccccgacccgaaatgtagcctggtttgactccagcccccagtagtcccagatccaaaatctatcccctagcacccagactcccttatcctggacttaaccgactcctccccccaccacagatctgaacttcatgagcctcttagtcccaaactccatcctccctccatcctaaaccctttgggtcatctggactctgagcctccacacctggaactccatccgccaccaccccgtcctgaactttaatcctcctgcacagtcatcctcctaccctgtactctggagctccacccaccacagacagtccctaagctttaatgttcggtcctaaaccggggctctccatggggggaaggtgaagtaaggtgactgtcagttgtctgtagggggaggtgggagttgtgcaagaaccacaaggcccaaggccgtttccagggcagctttgggacactccacttctcaatgctggggggcagcccccctgggactctgtggccttggcgccggtagttctctcaccaggatcctgggctgatatctggtcttacgtctgaagtcttagggctctggaccacgtgtgctgatgcgggcaggatccctcagcctacgagctgaatgactcctccctgttggagggtaaagttgttaaatgccttgtactccaagaaggacctattgcaaagtagaactttcagtagcggt

SEQ ID NO: 97337 - DNA, 283102 bp, Homo sapiens
ctagcaactttattcagaaaatggcatttttacatgaaagaagtgataaacaaactacaataattcagacatgggtatttgaaatatttgcaaaaataaatagagtgcgcctgtcatttttagaagaacaattgacattatttgttgccaaggataaaatttaagcttctaagtaaaaattagaaatttgaggccgggcgcggtggctcacgcctgtaatcccagcactttgggaggccgaggcgggcagatcacaaggtcaggagatcgagaccaccctggctaacacagtgaaatcccgtctctactaaaaaaaatacaaaaaaaaaaaaattagccagtcgtggtggcaggcgcctgtagtcccagctactcgggaggctggagcaggagaatggtgtgaacctgggaggtggagcttgcagtgagctgagatcgtgccactgcactccagcctgggtgacagagcaagactccgtctctgaaaaaaaaaagaaatttgaaaaacttttaccaaccattgtgagtatgaaaactttccaatacttaaaggctttctgatgtatgtgaggtttttttttatgttatttaatgaaatgtgttagcattttaaagctctgtataagtcagcaaacaattattttgatgaatgcataatgttacaaaattatgtataggtgaaagatctattcaaagtacaagattttaatataaggagtacaaaattcttactgataggctttcatattccttactgcaactcatctttaagaaactacctcttgttgggggcttgacgttgggtacacaaggacataatctttatgccagacactggagactaccagaagggggcagcagggagcagagaaagggttgaaaaactattgggtactatgctcactccctgtgtgatggattcaattgtaccctaaacctcagcatcatgcactgtacccatgtaacaaacctgcacgtgtaccccctgaatctaaaataaaagttgaaattttaaaaactaccacttgttgacttttattgtagtgtcaacaattatctaaaaaacatattaaaacactctttttaccaattacatatacatatgaagccagattaccttcatatacttcaaccaaaagagaatagtgtatataagaatccagctgtctttaattaagccaaactataagcaaatttgcaaaaaaaaaaaataagctataacacttttctcaccaaatattttttgtgatagaaaaaataatagatttttttttctgctgagtagtctaagggaaattttttttaatttaaataaaaaatagattttttttgagtgagatggagtctcactctgccacccaggctggagtgcagtggcgtgatctcgtctcactgcaacctccacctcccaagttcaagcaattctcctgcctcagcctcctgagtagctggttttcaccatgttgggcaggctggtcttgaactcctgacctcaagtgatctgcctgtcttggcctcccaaagtgctggcattacaggcatgagccaccacacccagccagaaactattctatatgatactgtaattgtggatacatgaccctatgcatttgccaatactcatagaactattttatagcatgtagaatgaaccttaacgtatgcacattaaaagaaatcagaggatcccactggaacacaaaatgtgacaaaataatcaaactgtattataagtatgaaacaacctcactaaagaaggtgtagaaaaaggtacttatttgggaatgagtggaatctgtaagactaaagacaaaagaaaatgtacatatgcacggtactctagttaataaagttgtttctcatgggaaagtaggttaacaattctgatactgttatacatgtatactgcaataaaataagtaaatgtttggtatatggtgggaaccaagtatcttattgttggagtgggagtttataataagtaaagggagaagggtagaatgattcatctagtaatggattagagttgaggcaccacataggtattaattcatgtttagcttaatacagatacagatggttatgtacagaaatatttataggtatgtgtatatagatgtgctagtaaacatatgtgtgcagttggccctctgtatccatgagtgctgcatctgtggattccaccaactaggaatcagaaaaaaatggatggttacatctgtactgaacacacacagactttttttttcttgtcattattccctaaacaatacagaataccaactatttacatagcatttacattgcattaggtattttaaagaatctagagatgatttgaagtatatgggtgggggtggggcacagtggcttacacctgtaatcccagcactttagaaggccaaggcaggcggatcgcttgagcccagaagttcaagaccagcctgggcaacatggtgaaatcccatctttactaaaagtcaaacaaattagctgagtgtggtgttgagcccccaggaggcggaggttgcagtgagccaagtttgcaccactgtactccagcctgggtgacagagtgagactctgtctcaaaaaaaaaaaaaaaaaaaaaaaaaaaaaaaaaaaaagaatagtttcaccaccctaaaaaatatcccatccttcacctattcaatcttcttctccctcccctcaatcctcttgcaaccactgatctttttactattgctataatattgccttttccagaatgtcatataactagaatcatacagtatgtagcattttcagactggcttctttcacttagcaatatgcatttaagtgtcatacatgtctttttgtggctcaagaactcatttctttttattgctgaataatattccattgtatggatgtaccacagtatgtttattcatttaactactgaaagatatcttggttgcttctagtttttggagttaggaataaaattgctataaacatttgtgtgtaggccaggtgtggtggttcatgcctgtaatctgtaaccccaacactttgggaggctgaggtagggggatcccttgaggccaggagttaaagaccagcctgggcaaaatagtgagaccttgtctctactaaattttttttttttttttttttttttttttttgtgagatggagtttcgctcttgttgcccaggctggagtgcaatggcacgatctcagttcaccgcaacctccgcctcccaggttcaagtgattctcctgcctcagactcccgagtagctggggttatgggcacgcaccaccactcctggctaattttgtatttttaatagagaaggggtttctccatattggtcaggctggtcttgaaatcctggcctcaggtaatccacctgcctcggcctcccaaagtgctgggattacaggagtgagccaccacgcctggccatctactaaatttttttttaattagctgggctttttggcacctgcctgtgttaccaactgcatgggaggctgaggtgagaggattgcttgagtccaggaagttaaggctaaagtgagctgtgactgcaccactgcattccagcctggatgacagagcaagacccagtcactaaaagaaaaaaaatctagttctcacaagcaatatatatatatatatatatatatatatatatatatatttttttttttttttttttttttttttttttttttgagacagagtctcactctgtcaaccaggctggagttcagtggtgcaatcttggcttactgcaacctccgcctcctgggtttaagcaattctcctgcctcagtctcctgagtggctgggattacaggcgtgccccaccacgcctggctaatttttttgtatttttagtagagacggggtttcaccatgttggtcaggctggtcttgaactctcctaaccttgtgatccgcctgcctcggcctcccaaagtgctgggattacaggcatgagccaccgtgcctggccctcacaagcaatatttcaaaggtatatttctgggttttatttccatgataattatgtctgctgtggggaagacttatctttcaaagaattttaatatttaaatcaatgggaagagaaaaaccaggcagtgggatgggtgtgccatatgtaaattacattatactagtttgttttgcaatggtgttttcattttttctcaggtataccagccatataattatttttaacgatatgttacatttttattctctaaaattatgtcactcatttgccaaacatttactgagtacttgcgcaagagaaaggaagggacagtgacattcgttcttctattcgacacagatttattgagcctatcttgcaaagagcactttgcaagaagactgggatacaactttagacaatctatacagtctctgtcctcagggagtttacagtctcatgaaagagagaatctgtaaacagttacacaaattactgtatttaaattctatgaaggaaaggaatgttatgagatgtgtcattatagatgtaactttcaatacttttctcacctaattatcacaatcactgatgtagtttacaaatgaggaaaatcaggctgagactgaactacatgccaagggcccgagagcaagtaagtccttgcaagtgaaaaacagaatgtctaatttaggtctatgtaattctaaagatcatgcttgaaaacattgtattattgcctaaatttcacgaaactgtgagggacagaccttattttgattttattaataagaaaactgatgctgagaggaactagaactaaaatctcttgaacaatccccttatttttctattatgttataagcttcctcaaaacatgtatggcttgtaagtttgatgatacaaacaaaccctacatgtagaaactgaataaattttttgtactttaaaaaatataggattgttgttgaaacaaactaccattaagcaaagcactatattttaacataattttggcaaatgtcttacatctctcttctttgctgattttgttatttttctatgttaatcacatatttcattggacaagtctattgctatgggtgagaacatagaaggaaacagttcaaacaagcaaactcactctttatcaaattattttgtggaggaaatgttcctggccaggcgcagtggcctcacgcctgtaatcccagcagtttggtaggctgaggcgggcggatcacttgagtctaggagttttagaccagtttgggcaaaatggcgaaaccccgtctctacaaaaaacacaaaaattagctggatgtggtggcgcgcacctgtggtcccagctactcggtaggctgaggtgggagcatcacctgagcctgggagttcgaggcttcagtgagctgagatcacaccactgcacttctgcctgggacacagagaccctgtctggaaagaaaaggaaaaaggaaaaaaaaaaaaagggttccaataaaaatttcaatttatgtcattcagaatttcacggatttttttcagctattgcagattcttcagatgactccatcaatgtaataagaaccttgaattcttctttgcagaggaaaaactgacaatatattcatctttatgtggggtgcagatggggaaaagatttttaaaagcacaatagaaaaggaaagcaagattacttttatttaaaaaacctagatacctctgcttaagcctttctgttgtcaagttgtttgcagcaaaaaacagggatattgcaaatagaaaaaatatgaaagaaatcacatacatagtgcaggaaatattattagtaatagatttaggacagaataaattgcccaactgtaacttcgtttatctttctgctagaggatctggtggccacaacaacttatgcacattttcaaagataaatcatggacatatttaataaagattacttctctttgcttattactatcatttggcttacaatggagcacgcagtaactaccttccttgcctttcttgagattctcctttggctgcttacacaggaaaccaaggcggggagtgccacgggtgatctcatgctggcatgacgtcaagaactcttgacgtcagaaggcggttgccacggwcaccgttcgccaccgacggcagagtcgtgaaaccccatcactaccacactcgtctccgtttcggcctctgcagggtgtaagctgctaaagaagcttcaaccttaagggggcctcagggagagagttgtgctcctgccgccgagagctccaccttcgtggctctgggtccggggccccggcctgtggcggcgagcggcggccgctggagacgagcggcggcggcaggcggccagcccgggtctrcctcgctccgtgcagggccgggagagggatccgccatattggagctggggccgaaggtgccttggagccgcggcgcgaggcgggtggaggtggcggccctggcctggatcgggaaggagtcggctctgccctggcccgcaaggctggggagctaatgagcctctctggctagtctcctccccgtccactccctccactttctgccgccgggacccggctgggagccggctgtggcagtggcagtggcagtggcagcgacaggatgttctccaagaagccgcacggggacgtgaagaagtccacccagaaggtgctagacaccaagaaggacgcactgactcgcctcaagcacctgcgcatcgtcatcggtgaggagcgaggggtggcagcgccgaggcctgggttgcccggccttccctctcctgggagcccctgcggactctctctcgggacctggcgcggtgcaggagagggcaaatcgtagcctctgcggagacgcgggagggtgaataattcggagaagcgaaaacttggcagttggcagcactgattactgttaacacagtaatctaattttgagttaatagtctgaacttattttttaaaattggtattactctaaaaacttagatctttaagactttgtggggagacctggcgttgtggataatggtgtttataggatatgtttgccagatgactactgccaaccccacccaagtaaaaagaaaaataaaatcctctctcagacaatataaaccttaatctttcaagtttcttggcagatgaagacaaggaggtagcagttacacctctttgggaagtgggcggttcccaaaaagctgtgggaaggagccccgcccttttgttaatgcaccttgttcatcactagtcatttagagggagaactattataggtagtttaactcatcctttgcttctcgagaattgtatataattctatttttaattaaaaatattttttttatcgtctgcccttaagttctgttttgctggtagaccaaacagtgctctaagttttgaatataatgttaatcgactcttttgaatacttagtcatttggtaggctgataaaggctgtaataatacttatggaacatctggtccagtagttggattttttagatgaagacatttgagatgaaaaggaaaattatttcgcctgtgttgatacttagagttaatggtggaactggctgaagaagatgcattcatccagatgcctgaatcctagttcagagtttatctcgagctgtcytcctgatgcgtatttgttttggaaagtgatgtttatttagtgaaaaaagtaagtcccttatttgaggtacatgtttctctagtctattgtttactcataccaccaggataccaccaatattacccaacatttctatgatgctttactgtttacagtgatttcacgtaaattatgataatccttgcaataactctataggtagatgatattattctccattttttaccaacaaaaaagctgaagtttgggaacatcgagtagtcagccagctaccaggaggctgagtcagaattggaacccagattttgtgtctctagtttgtttttttactctttctacatttatgacagctaatctttgtcacaagtaaattgtatttattccagtggagtagtaagaaagcagttaatccagtttagcgctataaaaagctcagttttcaagaaaatgtaaagcttctaaatatagtggagattgtgatctttttgttttcattcttcttgagagttaagccattgaaataaagatttagccgagaataggacacagtaagttaatgtgtgaatgcaggcgagggattcacaggtaatggcagtttgaaattgaacacttaatggagcttgacacctacttgggataagctgtaggttaggtaatgacacagctataaagttgagttccaataaagtatcgagatttcytaaattaaaggccatactttatttatagactggttaaggaattatttatatatacttttttggcatagagtttttttccatctggcagacatggaaaattaaaaggtaaattaagagagaggtcacacatataaggcattttgtaggacttagcttgcttggtttgaaaacaaaacaaaacaaaaacaagtcttttattgttgtcgttattttgtttgaaatacagttaatgtaatttctaagaaaatgaatgagagaaagtagaatgacaaaaactagtgtcttttagaggtctgccaatcaggtatttgattttgcagatggaaaatcctttctggaagtaggtgcgggctttaaataaggtaaacacaatgaggaaactagtttgcagagtaattgggcattgccagttacacaggcttttgatttttgtttggtcccatagttcatagttcatatgggaccaaacagaactgccattcactcagggtacttatgggaggattcagtgcatctatatgtatgagaacataatcataatttaaacatccgctgtaaacttttttcctggcatgtgttcccactgtaggacaatccaagttaaatttatagaacttgactctgaagatttagatttaaatctggtatgtttattgatactgttgcataattgatttgtaaaaactagaagtcagggttttcttaaaacagaaaaaaaagccttgtctgatttctaaagctgttatcctttctacctaccccctcccccccattttacaactaatggtaatgatattataaattagcacatgtaaattggctaacataatgcttggcatatagtgggtattgacttagtgttagttttgttctactttacagctaacagttcagtcctcttgatataaaaataaaaagtgcttatttagctaaaaatatttattgttaaataattctgacagctttattgaggtataattggcacacaataaactgcacatatttaaagtacataattgaataatttttacatatgtatatctcctgaaaccatcataacaaatatttaaaatatccaatcaagataacaaatatagacagtgacaatcaggataatatatgtataatcagctgggtgcggtagctcatgcctgtaatcccaggacttggggaggccgaggtgggcggatcacgaggtcaggaattcaagaccagcctggccaacagagtgaaaccgggtctctactctactgaaaatacaaaaattagccaggcatggtggcgtgcacctgtagtcccagctactcaggaggctgaggcaggagaatcgcgtgaacctgggaggcagaggttgtggtgagtcgagatcacgctactgcactccagcctgggcaacagagcgagactccgtttcaggaaaaaaaaaaaaaaaagaaaaagaaaaaatatatatatgtatgtatgtataacctcccaaagttttctcatgcccctttgtaatctctttctcccacctcagttgtaccctcccacctttcctgagcaaccactaatctgctgtcaccctagattagtttgcattatctagagttttatataaatgggattatacagcataaaaatggaattatgcagtacggtcattttatgtttgatttcttttttttttttttttgacacggagtctcactctgtcacccaggctggaatgcagtggcgcgatctcggctcactgcaacctccgcctcccgggttcaagcaatccccctgcctcagcctcttgagtagctgggattacaggcgcacgccaccaagcctggctaattttttcttttttttttttcttttgtattttagtagagacagggtttcactgtgttgcccaggctggtttcgaactcctgagctcaggcagtccccccgcctcagcctcctaaagtgctgggattacaggcatgagccacggcgccccgccttttttttttgtattcctaatagagatggggtttcaccatgttggtcaggctggtcttgaactcgcgacctcgtgatccgcctgcctcagcctcccaaagtgctgggattacaggcgtgagccaccacacctggccttggtttctttttctcagcctcattattttgaaattaatctgtatcctggtatgttaatagttcattgcttttttttcttgtgacagggtcttctgtcactctggctggagtaccgtgttgcaaacgtggctcattgcagccttgacctttcagggtccagcgatcctccttcctctacctccctagtagctgggacatgcaccaccgtgtrtggccaattaaaaaaaatttttttttgtagagatggggtctcatgttgcccaggctggttgcaagctcctggactcaagcaatcctcccatctcagcctcccaaagtattctgggattacaggtgtgagccactgtacctaactgttaatctctttttatttctgaatagttactcactatttatttatttatttatttatttatttatttatttatttttgagatggagtctcactctgtcacccaggctggagtgccatggcacgatctcggctcactgcaatctctgcctcccgggttcaagcaagtctcctgcctcagcctcctaagtagctgggattacaagtgtgcaccatcaggcccagctaatttttgtatttttagtagagacagggtttcaccatgttggccaggctggtcttgaactcctgacctcgtgatcctcaagcctcagccttccaaagtgctgggattacaggtgtgagccaccgcgcccagccgttattcacaattttttgtttgtttttgagatggagtctcgctctgtcgcccaggctagagtgcagtggcttgatcttggctcactgcaacgtccacctccccagttcaagtgattctcctgcctcagcctcccaagtagctgggattacaggtgggtgtcaccatgcctggctaatttttgtacttaaatagagatggggtttcgccatgttggccaggctggtcttgaactcctgacctcaggtgatccacccacctcggcctcccaagaccattgtataacttctttgatgagtttgtgtttaaatcttttacatgtcttttaatttttttgctttcttaattcagttttgaaagttctttaggccaggtgcagtggctcatgcctgtaatctcagcactttggaaggctgaggcaggtggctcacttgaggtcaggagttcgagaccagcctggccaagatggtgaaaccccatctctactaaaaataaccaggtgtgatagcacatgactgtaatcccagctattcaggaggctgagatgggagaattgcttgaacctgggaggtggaggtttgcagtgagccaagattgtgcaactgcaccctagcctgggtaacagagtgagactgtctcaaaaaaaaaaaaaaaagttctttatatattctagatacagatactgtatgagacacatgatttgcaaagatttttttttccccagtctttgggctgtctcttcgttctcttaaagttttctttgaagaagaagttgtttctttgaagaagcagaaatggttaatttttattgtctatatatcaatttttaatttattttttttattttgtatctaaaatctttgcctaacccatgatcacaaagattttcttctatgcttttttctagaagttttacagttttaggatctattttcctctatgattcatctgagttttaactatggtatgaggtggctagaagtttacgtttttgcatgtgaatatccagttgttccagctctgtttgttgaaaaaggctatctttactgaattgcctttgtacttttgccaaaatttagttttccagaaataygtgtgggcctatttctggactcttattttgttccagtgatctgtttatctttgttggtgccagtaccgcagtgtttgattactgtaactttataataaatcttgaaatcaagtagtgttgtccctcctactttgttcttccttttcaaagtttctttttttcccaaatgccaggtcctttacatttccatatgagtctaaagattagttgagcttggtgtggtggctcacacctgtaatcccagcactttgggaggctcaggtgggcagattgcttgagcccaggagtttgagaccagcttggacaacatgctgaaaccccatctctccaaaaaagagaaaaaaaagaaatagctgggcatggtagtgtgtgcctgggatcccagtcacctgggaggctgaggtgagaggatcacctgggcctgggaggtcgaggttgcaatgagccatgattgcaccactgcactccagcctgggtgacacagtgacactgtatttttttttttaaaggtcagtttcttaaaaaaaaaaaaaacccaccaccaccaaaaaacctattgggattttggttgggattatgttgaatctatagatcaatttgggaaaattgacgatattgaatacactgattcatgaacaaggcgtttctccacctacttaggacttctttaatttctctcagcagtgttttgtagttcagtgtgcaggtcttatacatcttttgtcagacttatacctaaatactttctactttgatcttttgtaaatgttacctttatatctatttctgattggatctcatatcaggaaataccactgatttatgtatagtgagcttatgtcctacaaacctgctgaactgacttagttctgttatttatttatttttttgagacagagtctcactctgttgcccaggctggagtgcagtggcatgatctcagctcactgcaacctccgcctcccaggttcaagcaattctcctgcctcagcctactgagtggctgggattacaggcacacaccactgagcctggctgatttttgtgtttgtagtagagacggggtttcaccatgttgataaggctggtctcgaactcctgacctcgtgagccacctgccttggcctcccaaagtcctgggattacaggtgtgagccacagcacccagccagttctgttagttttttgtagattcttttggatatttttcatagagaatcagtctgcaaatacagttttacttcttcctttctaatctggatgccctttatttctttttcttgccttactgaagtgactagaacctccaatgtgacatagattagaagtaatgagagtgggcagtcttgtcttgttcttgatcttaggggtaaagcaatcgattgatttttttcactgtataatatgatcctaactgtaggttttttgtagatgccctttatcagatttagagagtttcattctattcctggttggctgagggtttctatcaggaatggatgttggatttattgaatgctttttctgtttctgttggtataaacagaagatttcatctaagttgtcaaatttataggtataaattgttgattatactctcttattatccttttaatattataggattcatgtccaggcatggtggctcatgcttataatcccagcactttgggaggccaaggcgggtggatcactagaggtcaggagttcgagaccagcctgaccaacatactgaaaccctgtgtgaactaaaaatacaaaagtagctggaccttgtggcgcatgcttgtagtcccagctactagggaggctgaggcaggagaatcacctgaacccaggaggcagaggttgcagtgagccaagattatgccactgtactccagccagggcaacagagcgagactctatctcaaatgtgtgtgtgtgtgtgtgtgtgtgtgtgtgtgtgtgtgtctgtgtatatatatatagcaggacccatggtaatgttatccttctcgtttcttgtctgataatttgtctttcttttcctgatcagcctgactagagtcttatcgcttttattgatcttctaaaagaactatcttttggttttattgatttttccgtgtgtgtgtggttttttttttttttttaattgatgtctgctttggtctttgctattttcttttttatttttggaggcgggacgcaggagacagagtttcgctcgtcgcccaggctggagtgcaatggcgcaatcttgcctcactgcaacctccgcctcccaggttcaagctgttcttctgcctcagcctcccgagtagctgggactacaggcatgcgccaccccgcctggctaatttttgtatttttagtagagacrggttgttaccttgttggccaggctggtctcaaactcctgaccycaagtgatccaccwgcctgggcctcccaaagtgctgggattacaggtgtgagctaccatgcctggcagtctttgttactttctttcttctacttagtttagtttaatttgctctttttgttgtttcataaagggaagctgtgattattgatttgaaactgttcttctttctactgtaggcatttggtgataaaaaattttcccctaactagcatctcacaacttagaatattttgtattttcattttcatttagttccaaaatactttcaactttccttttgattttttttaatccatgggttatttacaagtctgttctttagcttcacatatttatggattattcagataccttttggttgttgatttctaattcaattccattgtagttagaaaacactattttttataacctgaattatttaaaagctaatgaaatttgtttgatggtccagagacattttaacttgataaatttcttgtatgcacttgaaaggaatatatattctgctcttggtaggttaggtgttcgaaaaatgtcaattaggacgagttgcttgttagtgttgttcaagtcttctctgtccttactgaatttctgtctagctgttttcatcaagtactgagagaagagggctgaagtttctgactgtaattgtgggttttgtctgttttcttttgaacttctatcagtatttacttcatatgttttgaagctctgtcattagctgcctaaacctttaggattatttctttttgatgaattgacttctttatcattttgaaatgatatctttctccctggtaatagtctttgctttggaatctactttgatattaatatagccattgccacttttcatttgattagtgttagcaggatatatatatattcccatcttttaaatctacttgtgtttttatatgtgaagtgggtttatattgttggcagcatatggttgggtcttttttatctaacctaattatctatgccttttaattgagatgtttggatagttacatttaacatgattgttgatatggttaggtttgagtttgtcatctttctatttgttttctgtttggcctgtctgttccttagtacccttttttctcccttcttttgaattagttgagtaaattttatgattattttccctcgatttattatttcagtgactgctttatgatttatagtatataccttttttctttttttttttttctgggaccgagtctcgctctgttgcccaggctggagtgcagtggtacgatcttggctcactgcaacctccgcctctcaggttagagcgattctcctgcctcagcttcccaagtagctgggattacaggcacgcattgccaygcccagcttatttttgtatttttagtagagacagggtttccccatgttggccaggctggtctcgaacttctgacctcaggtgatccacctgcctcagcctcctgaagtgttgggattacatgggtgagccactgtgcccagcctatagtatacatctttaacttgccagagtgtacacctttaagtgatactataccacttcccatgtagtataagaaccttgtaagaatttacttccatttctycacccaacctttatgcttttgttgtcatatattttacttatcatgttatcagccatacactatattattttgtttaaacaagtagtgatcttttaaagatttttaagtaataaaaagtctcatacccatgtagtaccatttacagtgctcttcatttctttgtgtacttttttttttttttttttgacacagacagctgtgttgcccaggctggagtgcagtggtgcaatcttggctcactactacttccacctccttggttcaagcgattcttttgcctcagtctgcaaaatagctgggattacaggcatgtaccactacgcctggctaatttctttttttagtatttttagtagagatgggttttgccttgttggccagactggtttcgaactcctggccccaastgatcgtgtgcctgggcctcccaaaatgctgggattacaggcatgagccactgtgcccagccgatatttctattcagtataattttgtttctgcatgaaggactgcctttaacatttttttctgtgatgatgatctgctggtaatggattcttaaaaaaatgtttttggatacataatttgtacatatttatgggatacatgtgacattttgataatcaaggtatttaggrtattcgtcaccttgaacatttattatttatttgtgctgggaacatttcaagtcttctcttacaggctgggcatggcgggtcatgcctggaattccagcactttgggagatcaaggcaggagaattgcttgagcccaggagtttgagaccagcctgggcaacaatgcaagaccctgtctctacagaaaatttaaaaaattagccaggtgttgtggcatgcacctgtggtcccagtgtttcaggaagctgagatgatgagattgcttgagcccaggagattgaggctgcctacagtcagccgtgttcatgcccctgcacactagcctgggcgacagtccaagaccgggttttagggaaaaaaaaaaaaaagccgagcgtgttagctcgcacctgtaatcccagcattttgggaggctgaggctggtggattaattgagcccaggagttcaagaccatcctaggcaacaaggcaaaaccccacctctacaaaaagcacaaaaattatgcagatgtggtggcagccgcctgtgatcccagctacttgagaggctgaggcaggaggattgcttgagcccaggaggtcgaggctgcagtgagctgtgatcatgtcagtgcactctagcctggacaacagagcaagaccctgtctccaaaaaaagaaaaaaaaagtctcttttagctatttttttttttttttgagatgtaattttgctcgtttcccaggccagagtgcaatggtaggatctcggctcactgcaacctccgtatcccgggttcaagcaattctcctgcctcagcctcctgagtagctgggattacaggcaggtgccaccactcccggctaattttgtattttaagtagacacggggcttctccgtgttggtaaggctggtctcgaactccagacctcaggtgatccgccctccttggcctctcaaagtgctgggattacaggcgtgagccactgcacccggcctcttctagctactttgagatacacaatatattgttaactattgtcaccctaccatgttatcaaatgacagaacttattccttctaactagctgtatgtttatatgcattaaccaacctttctttattcctcttcctctgtatgtgatggattctttatgcttttgtttgtctgaaaaagtctttactttggcatctttttttttttttttttgagacggagtctcgctctgtcaccaggctggagtgcagtggcatgatctgagctcactgcaacctccacctctcaggttcaagtgattctcctgcttcagccccctagtagctgggactacaggcacgcaccaccacgcccagctaattttttgtatttttagtagagatggggtttcaccattttggccaggatggttttgatctcttggccttgtgatctgccygcctcggcctcccagagtgctgggattacaggcgtgagccactgcgcctggctttggcttcttttttaaagatactttcgggaggctgaggtgggcggatcacgaggtcaggagatcgagaccatcctggctaacacggtgaaaccctgtctctactaaagatacaaaaaattaacccggtgtggtggcacgcgcctgtagtcccagctactcaggtggctgaggcaggagaattgcttgaacccaggaggcagaggttgcagtgagccaagatccgagatcgtgccactgcactccagcctaggcaacagagcgagactccatctcaaaaaaaaaaggatacttttgttctgtttagaattctaggttgatggctttttttttcctttgttctttgaagattttactctactgtattcttgtttgtattgtttctgataagaagtctgttattatctgtatcttactttttatggaaaatgtcattttcttttctgggtgcttttaagacctcttcatcactggtgttgaggagtctgattatcatatgccttggttagttatttttcatatttcttggcttaagattaattgagcttcttggatttgtgggtttatagttttcatcaaacttggaaaaattttggtcattattttcccttctttctccccgccttacgtttagaactccatttactaccgtattagggaatattaatattagattagtaagaagtattattagtatattggaaggtctcatagtttactgatttttttcctctgcgtgtttcatcttggatagtttctattgctatgtcttcaagttcactaatcttttcttctgctacatgtaatctgccattctatctagtttattttttaatctcagaaactgtagtttttatctagttcatcttgggtcttgttttatatcatctatgtgtcttcttaactttttgaacayatggaatacagctaaaatgatatacttctctgctaattgtgacatctctttcagttctagaatttcaattgatcatcctcttttcttatcctgggttgttttcctgattctttgtgtgcctggtaacttttggctatctgatattctgaattttactttcttatattttggatattttcctatatctgtaaattctttttttgtttcgttctgtttttgggggcagggtctcagtctgtcacaacctcctgggctcaagcaatcctcctacctcagcttcccgagtagctgggaactacaggtgcatgccaccacacccagctaatttttttttttttttttttggtagagaaatggggttttgctatgttgcccaggctggcctcaagctcctggtctcaagtgatctgcccaccttggcctcccaaagtgctgggattacaggtgtgagccaccgtgtgtggccacctataaattcttgagcttttttccgggatacaatcaagttatttgaaaacagttttattattttgggtcttgcttttatgatttgttgggtgggtccatttagggttaattattgtctagtataaggcaataccttcctgagtattcgacccaaggccccacaaattatgagattttatttttatagtccagcttttgggaacaagcactcttcccagctctgtgtgagcacctggtactgttccctccaatacttcagcatggttctttcttctgtcttgggtagtttcctcataagtatactatcatcatacttaaaggggaccctctctagtctcctggattctcactgtgtgtagctgtctccttcttggtgctgtgtcgtgtgaactctgattgccttggtcttcctgggtgcttggcttcactttcttaattcatggagtttgctgggtccacctggatttgctttctcctcactacgacttagaagctctcctaagtcagtaagctggagtggtcataggacacaccttgtttgtttgccatctttcagaaatcactctcctcacctgatgtccatacatgctgaaacaattaaaataacacacacgagargcaacagttttcaagacattggacatcagttgctgataataagaggttctcttaaatgaatgagactgaaagttggctttataccaagcaacttggtccccattttttacttttttatatttagagaaggaatttgttatcataaattgattagtaaaaaatgtctttctgtaatctgaatgtatttatgggttcacaaagaaatatctttctgagtaaaatatctttacttacaaagtattcagtaggtataaatggcaatacataaatacagattgtatattttattaaataaatgacttaaaaagagtatggattggccggtcacagtggctcacgccttaatcccagcactttgggaggccgaggtgggcggatcacgaggtcaggagatgagaccatcctggctaacacggtgaaaccccgtctctactaaaaatacaaaaaaattagccgggcgccgtggcgggcgcctgtagtcccagctactcgggaggctgaggcaggagaatggcgtgaacccaggaggcggagcttgcagtgagccgagactgcgccactgcactccagcctgggcaacggagggagactccatctcaaaacaaaaaaacaaaaagaaaacaaaaaaaatagtatggattaacagatttggctgaaaatctaagaatgtgtgaactgtaacctgcctataaaagtaagccaactaactgtatatgcgtgtgtgtgtgcatatatatagatatatataaaataaatttatatagagatgggggtttccctatgttgccctgactggtcttaaactcctgggctcaagttatctgaccgcctcgacctcccaaagtgctgggattacaggcatgagccactgtgcgcagccaaacttgattatttttagagtttgatatacagtgttagtaatcctgtatacatgacattagatgcttttaaattctttaatttatatataatgtaatgtatgttctttaatttgaatctgtctgatttgaaaaatgaacttgacctcattgaactactttatatatttatgaagaattgatttactttgcagattattgacataaagtgttactgattgaccttaacagaacaagctttttcaaatattgtaatcatctttatattaacattttgtttattaaggattttattgcatctaaaggattttacgtggcttataggattgaataaaatgtggaatagaacaattaatgataaaacaagcaacaactgaatagccatcacttaaaggaaacatcagttttcagagatgagctgattacagccataaggcattgaatttggttcttagatttcctggtacctaaggtggaaagagaaatgtgttgggttacaagctttcagtatcttagaaaagaaagcatccctttgttgttgttgtgtttggttaaaacatttttttaattctaaattcactgtgtgtgtgtgtgtgtgtttgtgtgtgtatctaatgtctcttctcactgaaggtacacattatagaaatagaccttggagagccaggcgcggtggctcacgcctgtaatcccagcactttgggaggccgaggtgggtggatcagctgaggtcaggagttcgagaccagcctcaacatggagaaaccctgtctctactaaaaatacaaaattagtcgggcatggtggtgcatgcctgtaatcccagctacacgggaggctgaggtgggagaattgcttgaacctgggaggcggaggttgtcgtgagccgagattgtgccattgcactccagcctggacaacaagagtgaaattccgtctcaaaaaaaaaaaaaaaagtagactttggagagaatagcagaataggtgatgaatacgtctactttaataaatggcatcaccatcctcttgtcataggttactaagacaagaaactttcatctttaacaatgtggtagaaaaagataaatttatgttgggactgcagctggagtttgaaatgtctrtggggcaacctcacatctccctagcccactactgctcttttctggctttataataatatttgaacctgttccttttttctcggttcttaccatcatttctttagtttaaatttttattgtttcttgcttgaacttttgcagcagcttactagttgatctccctatgcaggtcttttttttttttttttcccctcttgaatctcttacatggccttgtcacaatctatctttctttctttctttctttctttctctttctttctttctctttctttctttttttttttttttttgagacagggtctcactctgtcgcccaggctggagtgcagtggcacgagctcactgcaacctctacttgccgggttcaagcaattcttatgtctcagcctcctgagtagctgggattacaggcatgcaccgccatacccggctagttttggtatttttaatagagatggggtttcgccacgttggccaggctggttttgaactctgggcctcaaacagtccacccgccctggcctcccaaagtgctaggattacaggcatgagccaccatgcccagccaggtcctgtagcaatctttctaaagcacattaagagcttgtcactagctggcatggtggttcatgcctataatcccaacactttgagaggctgaggcgggtggatcgcttgaggtcaggagttcgagaccagcctggccaacatggtgaaaccacgtctctactgaaaatacaaaaattagctgggcgtggtggcaggcgcctgtaatcccagctacctaggaggctgaggcaggagaatctcttgaacccaggaagaagaggttccagtgagctgaaatcgtgccactgcactccagtctgagcagcagagcaagactctgtctcaaaaaaaccaaaagagcatgtcactaactgctctaaaaccctctatggctttcctttgcctatgtgatacagtacaaaatccttggccaatatttaaggcaatctgttatctgatcctagcctcccttttcagytaagtgttgaagtagttgaattatataaaaaaacaaagcagtgtaataacattcttcaagatgtctattatataaataatttttaggtgacagtgttgcaaatgcatgctttttttttttttttttttttttttttgagacagagtctcgctctgtcggccaggctggagtgcagtggcagatctcggctcactgcaagctccacctcctgggttcacgccattcttctgcctcagcctcctgagtagctgggactacaggcgcccgccaccacgccgagctaattttttgtatttttagtaaagacggggtttcaccatgttagccaggatggtctcgatctcctgacctcgtgatccgcccacctcagcctcccaaagtgttgggattacaggtgtgagccaccgtgcccagcccatacttttttttttttgagacagagtttcgctcttgtctcccaggctagggtgcaatagcgcgatctcagttcactgcaacctccgcctcccaggttcaagcaattctcctgcctcagcctcccgagttgctgggattacaggcgcctgccaccaatgcccggctaatttttttgtatttttggtagagacggagttttgccatgttggccaggctggtctcgaacttctgaattaaggtgatccacctgccttggcctcccaaagtgctgggattatacctttttaatgtaaatactttgcacgttaagttaaggtgaaagacatatgttgcatatgcccttatctgaattctaattctcctctgaagatgcagatctccttgtatccgtgctctaataagtgatggattctcccatgcctgaagaagtcagccttcctactattgtaatattgctactgttatgcctctkttgctgctattatacttcagcacccatctgaaaattcttcttgttttggggtgcatgctgctggagcacaccatctttcaaactttgtcgctgctcttatttctcaacctcctgggtcacttcattaagtttatcaaggacttcagtacctggtttatcatcttaagactgcttcatctgttgctaccattttaaggacttttaatagataatgaaattgctcttttaacttctcatgttcactgtatttgatatacttaaataactacgctactattccatttaagcgattacccttttgcagacttctgttacaaaagtttaacaaaaagtttaatatgaaaatgtacatgacctgatttttacgtaataataaaattggccctttggagaggggacttgaatttctctgctgaacaatcattatttatacttgttccaaggtttctttttttttttttttttttagacagtctcttcttgtcacccaggctggagtgcagtggcgcgatctaggctcactgcagtctccacctccccggttcaagcaattcccccgcctcagcctcctgagtagctgggattacaggcacccgctagcacacctggctaatttttgtatttttagtagagatggggtttcaccatgttggccaggctggtcacaaactcctgacctcaagtgatccgcccgccttggcctctcaaagtgctgggattacaggcctgagctaccgcgcttggcctgttccaaggtttctaacactatggtactatttcctcatattaccaccattccaatatcattgttgcccaaagatccccacaattctttgaacatgtctgccacagtttaacttcaattctaacttctttttttttgttttttgtttattttttgagacgagtctcactctgtcgtccaggctggagtgcagtggtgagatctcggctcactgcaaccactgcctccagggttcaagctattctcatgcctcagcctttggagtaactgggaccacaggtgcatgccaccatgcctggctaatttttgtatttttagtagagatggggtttcaccatgttggctagactggtctcaaactcccggcttcaagagatccacctccttggcctcccaaagtgctgggattacaggcatgaaccattgcacccggccaattctgacttcttgtctataaatttttttcaactcaggagggtgagctttgctcgtggtgactacttcatgggcccagagctgctgtgaaatggaatttgtggcttcacttatgctcctgtgattcaagccctggtgttttgtggttgaccaaagttttcttatgtaaccaaatcctacctttaatgttgatattttctggtgttctgtcctccagatctcttttcttctaactctttatatcagtggtccccaaactttttgacaccagggaccagtttcgtagaagacagtttttctacagacagtgggggtgaggaatggtttcgggatgaaactgttccacctcagaagatcttcaggcatttgattttttttttgagacagggtcttgctctgtcacccaggctgcagtgcagtggcacgatctcggctcactgcaacttacaccttccaggttcaagtgattctcctgcctcagcctccctagtagctggggcaacaggcgtgtgccaccacccctgactattttgtatttttagtagaaatgggatttcaccgtgttgcccagggtggtcttgaactcctgacctcaagtgatccacccacctcggcctcccaaagtgctgggattataggcctgagccaccaccaatcaggcattagattcttataaggaggktgcattctagatcctttacatgtatagtctgtgatacctgtgccgtagctaatgatatttatactagactgccttccsatcacccttatatctgaaagcttctagtcttctttaaaatctcagggcagaatcaatagatagcctctatgaagtcttccctatcatgtaggtataggagttttttgtacactgagcatctttccctctastagtttgatttttttattacaacatatttatttatttgcttgccttcctgagggcagatgtgtatcttttcatgttcatattcctagacttagcatggcgcctggcatataatcagtgttcagtaaatattatttagttcatgaatgaatatactaggtttgaggggagcaaaattgctgttttgtgaacaactcatgagcaagcaatggacaatgatagaaaagacattaaagtcagcattccttgggttgtcttaagtattggtgcaaagaaatttggttcataaactaaggtccataatgtaatagagaaaaacaaacaaaaatataaaacaggactttaactgaaaaatatttatgacattatggcagagggtataagataatcttccttgttaaaaactttagacaaattatgtttaacagagtttaattgagcaaagaatttgtgaattgggtagcttctccacccctcactatgttgctgaagctggtcttgaactcctggcctcatgtgatcctcctgccttagtctcctaaagcactgggattacaggcatgagccactgtgcctggcttcagctatattatttatttaaaacttttgatcttcagtttacctgtatataaaattaaaataataacacctcaaatatgaatgaaaaaatgaatttgaaccacagtttatggaaaaaattcaagcatcatttgacttttcataggaaccttaaggaaataaaattgaatcagggatgttgtgacttgcttaatgttaagaagtagaatttgttcttaaaaaaacaaactgagtaccaggtgcagtggctgaagcttgtaatcctagcactttgggaggccgaggtgggtaaatcacgaggtcaggagtttgagaccaggctggccaacatgatgaaatcccgtttctactaaaaatacaaaaaatgagctgggcatggtggcgggtgcctgtaatcccagctacccgggaggctgaggcaggagaatcgcttgaatccaggaggcagaagttgcagtgagctgagatcacaccactgcactccagcctgggcaacagtgtgagactccatctcaaaaaaattaaataaaataaaaaactgagtagaaatccctgaatgatcttgatgtggtttagattctgttcttctgtctcagtctttattagaaatgggtaaattagggtctgggtgcagtggcttacaactgcaattccagcactttgggaggccaaggcaggaggattgcttgagcccaggagtttgagaccagcctgggcgacatagtgagacccccatctctacaacttttttttttttttaattagctgggtgtggtgacatgtacctgttgtcccagttacttgggtgactgaggtgagagaattacgagcccagaggtcgaagctgcagcaagaccctgtctcaaaaaaaaaagaaatgggtaaattagaaaattatttaagctatgtgttagaaaacaaaggagaattaaatgaatgaaaggaaataaaatttcttgttggtatttatttcaaaaaatgcaaggaattcacctagcaacaattactctttccttctccacccaaacctaaaatagaataactaggataagaggtgtgtttgtgttaccaaaaatttgttgttttaatgtgaattcttttagattgttagcttcaaggttcccagtcgtcttcccttttccatcaattgttcttagggctaagccacttactgtaaatatgccatttcttataaaatgtgtttaataaaaataattacccgttcttgcttatatcttgttctttgaaatctgaaaatgatggagctgatctgatctctatctgatcttcacagatagtgtgagaaccatttgaataaatagatacagtgctttgctaaattttgggtaactaaaggagtaaaggagttaatggtatagtaaaagagaatcatgtgtcaaatatgaaacatgttatgagtataagagagaagagtcatatctaaatgagtggctcagagaaggcttcatggggcagggacatttgatctgtgccttggaagatgatgattaaaatttcaatagatagaagtgaaggaagagagccttttgtagttcataagcatgatgattgggttttcacactcatatatgagatgtacgtcccacaaacctttttatgatgttggcacattactcgtctgatatgattttttttgaaaaaagacatgaaggaaaagcagttaggataagagcacagacatgaatgcaggcaagtggaaggcagtggtccttctagcttttaaaaataaagatattaggcctcgaccttaaaatttcgatttaatagcaaggtaaatagaaaagaactagtgtttgtgagagatactgtggagagatactttatggatttggtaaccagttttttgttttttgtttttttttgagacggagtgctggaatgcagtggtgtgatcccggctcactgcaacctctgcctcccgggttcacgccattctcctgcctcagcctcccgagtagctgggactacaggcgcctgccagcacgcccggctaattttttgtattttttaatggagacggggttagccgggatggtctcgatcttctgacctcgtgacctcgtgatccgcccgcctcagcctcccaaaatactgggattacaggcctgagctaccgcgcctggctggtaaccagattttaatgaagatttcagaagtggagatgatgccacttccctgactgtatcactctactttttaaaaccctgttttactggtgaatttataacaggaacatatttcttacctccagcaccactatcaaggctgttcagcctacacactgaaactctgtatcattccttctcttatgtttttttttctttttgagacaaggtctcactctgtcacccaggttggagtgcagtggcacaatctcggctcactgcaacctctgcctcccaggctcaagcaattctcccagctcagcctcctgagtagctggaaccataggtgtgcactaccacgcccagctaattttttgtatttttttgtagagatggtttcgaactcttgagcaagcacaagtgatccacccacctcagcctcccaaagtgctggtatcaggcataagccactgtgcctggcccattccttcttcccatagtcaaaaccactgctactcaaaatgtagtccacaaactggtactagtttactgactgttattacagttctgcaacagcttaattatggaaattgagtgtgttgagaaggtcatctcagcttgacagtactgtgatatccaagcatgtgattagtggacttgtcttatgaaatggggtgtagaccaatcctggtgcttttcaccttattttctagtaatacatttgtcgtaaagcactggtctgtgacaaattggaatttaaaaaccaaaacaaaaaaactggtccttcacagacagtttgagaacacgagctatactgtgcatttagaattaacttcctctgcctttatcctctgttgtttcaaagtatattttctcttcccagtataataggattttccttattcagtgtaatgcattttccagtatataaaacctctttttacttctttataatttaaagtatttgcaaagcactgtatctatttattcaaatggttctcaagctatctgtgaagatcagatcagatagagatcagatcagatccatcattttcagatttcaaggaacaagatataagcaagaacgggtaattatttttattaaacacattttataatttaaagtatttgcattgtgcaaaaacttaatgtttataaaatgtctgcctatatttgttttagccactttagattttaaatttccagataccatatgtttaattattttcagtatccaaaataatgtctttgagtgttagggaaatgatttaatgaatcaagaaattatctgttttggacatgtacaattagatacagaatactggcagtactgtttcatttttatttatttatttgcttgtagagatagggtctggctatattgscaggctaatttcaaacccctggcctcaagctatcctcccacttcagcctcccaaagtgttgagattatggatgtgaaccaccatgcatgaccagtagtactgtattttgattactcgcctatyatcggactactcaattaaaaaataacattattttgtattctgtaataatgrtatactagtaactagctagtcttcaactgcataaatgtgaaggtaatgctttgcttgcaataaatatcagtaacttgatgatataacagtttgtaatatctagacttaggaaaaaaaaatttgcctttctcagtctgatctccatgagctcttcagcttctttttaggttaattcttttcagcctggccaagaaggtatagctctcagattcagttagccaggtagggtctggcagatctcacaaattaggatgtcaaggggttgaatattagatgagctaaaaggaatagatcagcaaaaaaggaaaagaaacggaaactcataccttttagcaatcactccccatttctccttacttcctgcccctgccagccattagatactttccatctctgtggttgactcttctgcatgtttcatataaatagaataataaatatatggccttttgtgtctggcttctttcacttagcataatcttttcaaagtccatcacattgtagcttataatactatttcgtgctttttacggctagataatattcattgtatggattataccatattttgtctatccattcatcaattgatggacatttgggttatttccactgtttgaccattatgaataataacattataaacatttgtgtgggcatacattttctttctttttctttttttttttgatagagatgagacacttttgccatgttgcccagcctgatcttatgttttcaattcttgggtatgtaatgttctaggaatggaattgctgggccatatgataactctatattaaactttttagggacctgccacactgttttccagagtggcttcatcatttatattcccaccagcagtgtacaaagattcaaattttcccatattgccaacacttggtattgtctgtctttctgattatagctatcatagtgggttagaagtagtatctcattgtggttttgctttgcatttccctgatggctaatgatgttaaacgttttttcatgagcttactggctatttgtatatcttcttaggagaaatatatattcaaatcctttgaccattaaaaatttttgttttacaattgaattataagaattctttctatattctggagactaatgttttaaaatcaggtatataatttgcaaatattttcttgcattctgtasgttattttctcattttcttgatagtgtcctctgaagcaaaaaggttttgaattttgatgaagtcaaatttattttttcttttattgcttgtgcatttagtgtcatatctaagaaagaattgactgattcaaggtcatgttttcttctgagttttataattttagtttttacatttaggtttttggtttttgatccattttgagttaatttttcaagtatagtcttcattcttttcaactgtgtgttgaaaagacttttgaagggtaccaaacaactcaatgaggaaaaaaaagtcaaccatttgttaaaaatactttttttttycctccttttcctccttgagttgtttggtacccttgtcgatgatcagttgatcatcagtgtaaggatttatttctgaactctcaattgttccattcatctatatgtctatccttatcccggtactacactctgttgattagtgtagctttgtagtaagttttgaaatgagacaatgtcagttctccagcattgttcttggtggctcatgcctgtaatctcaggactttgggagtagaggtgagaggatcacttgagtccgggagtttgagaccagcctgggcaacatgtggcaatgcctgtctctacaaaaaatttaaaaaatgagccaggtgtaatggcataaacttgtagtcccagtgactcaggaggctgaggtgggaggattgcttgagtctgggaggttgaggctgcagtgaactgtgactgcaccactgcattccagcctaggtaacagcgagactccatttaaaaaaaaaaaatactgttttgactattctgggtcacttgcattttcttttgaattttaggattagcttgtcagtttttgcaaaaaactatgttaggattttggtaaagagtacattgaggctgggtgtggtggctcatgtctgtaatcccagcactttgggaggccatggcgggtggatcaccttaggttaggagttcaagaccagcctggccaacctcgtctctactaaaaatacaaaaattagctgggtgtggtggcacatgcatgtaatcacagctactctggatgctgaggcaggagaatctcttgaacctgagaggcggaggttgcaatgagccgagatcgagattgagccactgcactcctgcctgggcaacagagtgatactctgtctcaaaaaaaagaaaaaatagaagaaaaaaaagagtacattgaatctttaggtatatttggrggctgttgctatcttaacagcattcagtctwactcatgaacacagaatgtctccatttgttttagtctttaatttttttcagtaatgttttgtagtttccagtgtacaagtcttgtacttcttttgttaaatttaagtattttattctatttcaaactattgtaaatggaattgtttgcttaatttcacttttagattgttcattgccagtgtatagaaatacagttgatttttcttattaatcttgtattctgcaacctagttgagcttgtttgtcagtcagayaggattttttggtggattccttaggattttcgatatccaagatcatgtcatttatgagtagagatagtaatgctttggactttacaatgtgtgtggcttttatttctttttcatgcataattgtcttggctagaatttacagtataatattaaataaaagtaacaaaaagacatccatgtcttgttcatgcttttaggggtaaagctttcagtcttttttcactaagtgtgttgttagttgtgaccgtttcatagatacctgttatcaggttaagaaatacttttcttttcctagctttttgagtatctttaggatgaaattatattgggttttgtcagatgttttttctgtgtctattgaaactatcatgtgagttttgacctttatgttaacataaggtattacagtgattgatttttatatgttgaaccaaccttgccttctgggatgaatgtcacttagtcatagtgagtgtgtgtgtatgtgtgtgtgtagatagatagatagatagatagatagattcagttttctagtattttgttgaggatttttacattcatattcataaaggatattggtctgtatttttcttgtaatgtttttgtctgattttcatatgagaatattggcctcatagaatgagtgggaaatatactctattttttggaagagttggtaggattcacccataagccatttgagtccaagcttttctttgaagtagttttttttcccccactaattcaatcttctcattcattgtaggttgtttcagaatttctatttcttcttgagtcagttttggtggtttgtgactttctagtaatttgttcatttcatataggctgtgtaatttgctagcatacagttgctcatagtatcctcttataatttttatttctgtagggttagtagtaatgtattatattccagtccagattagtgatttgaatcttatgtctttttcagtttggacagtctagctgacagtttgtcaagttttttgagtgtttcaaagaaccaatttttgtttaatgattttttttggggggtctctatttcttttatgtcctttctaatctttatttccttctttgtgctttargattagtttgctctttattttcgtatatatgtatgaccacacctggctatttttaatttctttgtagaaatggagtctcactaagttgcccgggctggttgtaaactgctgggctcaattgagactcctgcctcggccttccaaagggttgggattacaggcgtgaaccaacgcacccagccaatggtcttacttcctaaggtggaacattatggttcgattttcagatttctttctcatatagcaatttaaagctatagatttttctgtcagcactggattagctggatgccataagttttggtatgttgtattttcatttacattcatctcaaagattttctaacttctcctgtgatttttctttgaccaattggttatttagttgtgtattgctaaatttccacatatttgtgagttttcttaatttccttatgttattgatttctaatttcattccactgtggccagataacatactttgtcttcagtccttttaaattactgaagtttattttatggccttacatatggtctattttggatagtataccatgtgcatttgaaaagactgtattcttttgttgttagatgggcattcgatagatgtctgttagatctggytgcattatagtattgtttaggtcttctattttcccttctgtctagttctattcattattgaaagtagagtgttgactcttaaattaccattgttgaattgtgtgtatattccttmaattcagttctgttcagtttctgctttgggggttgggagttctgttgttaagtgcatatatgttcacaattgttatatcttcttaaaagattaaccctttaactattataaaatgtccttcttctctagcaataatttttttttttttgagacagtctagctctgttacccaggctggagtgcagtgatgcgatcttgactcactgcaacctccacctcctgggttcaagcgattatgctgcttcagcctccctggtagctgggactacaggcgcccaccaccacgcccagctagtagagacagggtttcaccatgttggccaggatggtctcaatctcttaacctcatgatccgcccacctcagcctcccaaagtgctgggattataggcgtgagccactgcgcccagcctaattttgatcatttttattagcgttagaaagtaaataatttccagactttgttagcatgccttatgggaaggaaattgagagagaatactttggctcctaatatgtcgcaaaatcttgagttgattcatgtttgcttttgttgtgtttttttggtttgctttgttattgttctcattttcttttttttcctcgaacattgtgtctttgaaacattaattttaggaaatttagaggtaattgtagcagcctatttctttattattatttattatttctttattattatttcattattattattattattatttagtgacaaggtctcgctttgttgcctagactggagtgcattggctcaatcatagcacactgcaacttaacttaaattcctaggctcaagggattccctcaccttagtctccagagttgctgggactagaggcacatgccaccatgcttggctgattttttagttttgtagaaatggaatctcaatgtgttgcccaggctgatctcaaactcctggcctcaaacaaccctcccacttcagcctcctaaagtactgggattacagatgtcaaccaccttgcccagcccaagcctgttttattctaatttcataattctttaaactactctgtgggaaaactagaacacctttcctctttatttcagttgtatgtgyttttattttgatatttgataaactatatttaactagtatttgatgactattattcttataggcagataatagataaatatttagtattctttttttacagatgtattacattggaggctgaatagatctagggttacctgttgtttaaatcctgactctacttcttatgagctaagtttcttagactctctgtacctaaattttctcacctgtaaaatggagataataatggtactaatttcatagtattgctatgtagattataggaattagtttctgtggagtgctgagaatagtgtgcattgtttagaaaacattcgctttgtgttacacattattattttgtctagttctgtgaaaagtcacataggtagtaagtgttacagacaggagtgaaatctgggtattctaattccagtcaagaggaggcagttctattttgcctgtcagtaggttatgcagtcttttccaaggtaaaaatttccatattgtatgaactgaatataatgaagtaaaaataattaattttgttagtaataaaacacatttgagtacatattgtttgctcagcattgtgccaatttttagaaatcctgaggtagacacagtttctattctaaagatgctagactagtcctggaagaaagacaataagacatttgaaacattgttctttccataaaagagaaatgtacagaatccaagggaatagagaggaaaggcatatatccctttccttttggaatggcagaacaaaaaacagtcttggaaaatcacatagataagacatcactaaaaagttactatgccaggtgttgtggctatcgcctgtaatctcaacactttgagaccaaggtaggaggattgcttcagcccagtagtttgagaacagcctgggcaacataacaagaccccatctctacaaaaattagctaggtgtggtggggagacctgggtcccaggtacttttggaggctgaggtgggaggattgcttgaactcaagaggttgaggctgcagtgagttgtaatcatgccacagcactctagcctgggtgatagagtgagaccctgtctcccccccaaaattgtaatgaatattcgtaggatatgataatacatgaaagagtttaaagtgctatctatatgttgttactgtactttattttgaaatcttatgttgagccttagtgcattctaagaaattaattgatgtttacctttaacttgagtttatttacaatggtttctttgtttcctttcaaaaatcttttattttttcagttgccttttaaaattatgttttgaggctggacacagtggctcacrcctgtaatcccagcactttgggagactgaggcgggcggatcacttgaggtcaggctggccaacatagtgagaccccatctctactgaaaatataaaaattagccaggtgtgatagtgggcacctgtaatcccagctactcgggagtctgaggcaggagaatcgcttgaaccctggaggtggaggttgcagggagccgagattgtaccactacactacagcctgggccacagagcaagacaccatctcaaaaaaataaaacagaaacaaaaaattctattttgtattgtaagagaagtaatgtgctttttgtaaacaatttggaatagtaggaagtacataaagtagaatttctccactctttttcaccagcattctcacttacactgaaaatgagctaagcaacaataaaactagtcatgctccctagaggtaacgctgcctagttgtttggtatcttctatgcataaatacatatacatatgcataagtacatgcaagcatatctcaagtctacttgtttatttttattaaaatgctctaagctttagccaaaatggattatttttctggatactatcatacctcacgtttttcttttcttttgtttttcgttaataggttcttattggtagcacttaaaaatggtatcttaaatatattttgttaacaaaatatattattacaattaatttccccgtgtcattttatttcttaaaatgtgattacaaggaaatttaaaatcacatatgtagctaatatttgtggcttgcattatatttctaggagacagcactgattgagacagattgctgattatgcatttgctaatctcttccaagagggacccagaaactacagttctccaatctggatctcagagattatgagagaaccaggccactttgactttttttttttaaagcttcatagtaaatagtaaatttaaaaaaaatttttattatactctaagttctagggtacacgtgcacaacgtgcaggtttgttacatgtgtatacatgcatacctcacgtttttcttgctccatgtattttttatgccttgaatgccctttccattcaactccaccactttatgtctagtgttcttyctgtccttaaaagtcttttcagatattatgtactctgtcaggccttttttctttccccacctttgtgctttattgagctttgaaagtactcttgtgtttctaaactgccatatactttgacatctcacttttagtactaacacttctactgttcatatagttattcatttaattttgcatgccctgctcttactgacagtttctttagagcagtactgtctgtgtttgagctttttaatccctaagtacctatttacaaagcctattgttaggtacctatttacagaataaatatatttcagacattataaattcttcttttttttttttttccccaaggtggagtctcactctgtcttcccaggctagagtgcagtggcgcaatcttggctcactgtagcctccacctcctgggttcaagtgattctcgtgcctcagcctcccaagtagctgggattacaggtgcacgccaccacacccagctgatttttgtatttttagtagagatgaggtttcactgtgttggccaggctggtttcgaactcctgacctcaggtatctgcccaccttggcctcccaaagttgggattacaggcgtgagccaccatacctggccttcagacatcataaattattattctgattttcaactgtcttggggagaagttaggaaagctgtagctgtgaattgaaaatagaacttaacttctttttttggtatgattaatgattttgaataagtttttctgagctattgttttcttgatcagtttttaaaattaaaactaaaatcggcaaagactaaagttttaagaacgaggatatagacatagaaatatatattgtaaatattttaatagaatagaattttaggagcagttctttgactttgaaggaaacttgtcgctgaatatttgctaaacttgatttaacatacatgtaaataatcagtaatttttttttatttttcagagaatgcagaatctattgatcttaaacagtttttcgaccaacatttttcacatatatactatgtgttctttgaaaattttgtgactattgaagctagtcttaaacagaaaggtaagatgctaacatatatcttggcktatgttaatatttctamtaattgtcataaacataacttaaaggctgttggacatattgtttcacttatttttgtcggacagctttttgctttccctctcacactactatcataggtctagtgacctgtattttaaagacaactgatgggttagtattactatccttattactttacaatggcttgaagatttgctttttcactggtcaggttgatttgttccctcattgtgccttctttggttctgccctaggagcatatgtcacatttgagcagtcattttcatattttcattttcagagcttatttgaagttctttgtaatatatcatgatttgtttctagacataaatatgtggaacctaaatttaattacagtactcaaaagagtaaagagagtgactgtgatattgtctacacaatgaatggaatatgctttaaacattttactaaataattgctgggaaaaaaaaaaccttcattcttgaaatattttargttcattatgaggacaaaatgatatgttttaaatgttttcttataaaaatgttttaggtcacaagtctcaaagagaggaattggatgctatactttttatttttgaggtaagtgcttctgaacctaacttttccctttttcaaaaataatttttggaacatacaaaggaatatatttaaattataaaacatgtaatgaaacactctgaayttgccagcctttctaagaactaaatctaaattttttaaatatgcctgactgaatcctatactttttgaggtrcaatgtattactttttggtacagatataattatgtttttatacatttgacaccacaaaattggtatgatattcagtgtgtttgcaaacaatgaagattttaatttgtcgaaggtttactgaaatggaaaatttgattttgttttaactccaaaacattcttacctaagaaggtatattcctgtaacttttatgtgcctaagggatttattgtttcttggttcactgcttttcattgcaaacttgtttaaaatagtcttaaatattttaaaaattgtcattttacattagattggaaatggggcaagtctttataaataaaagtcaggaaacatagctcataggtaaatgaacaaaattttgatgctctgctagtttttttttttaatttttagcacacttaaaaattaagacccttttactccccttttaaaataactccttgctctttattgtctttcaaagtaaacagataaacagtcataggagtattctgatcttcactgagaatttcgagacctgtagaaagccaggaatatgcatagaaaataatttggaaatcagtttctgaagattgagctattctgtctggtgctaattaaagataattcactcttggctgtatgtggtggttcaaagtaatccctgcactttcggaggctgaggtgggaggttcatttgagctcaggagttagaaaccagcctgggcaacactgcaagacctagtctctattaaaaatcaaaaaagttagccaaggcatggtggtggcaggcgcttgtagtgctagtgactcaggaggctgaggtgggaggatcccttgaacccaggaggtcgaaactatagtgagccgtgattgtgccactgcactcttgggcaagagagtgagaccctgtctcaaaaataataataataataataataataattcactctttagtattttgatgtaatttagaatttgaacaacctcatttatatgtctcttagctgttgatttagttaaggggggaaaaaaagaattttttttaagagttccaaacagyagtaacgctgatgttagtatctgttctgcagttaattttcattagtcgtgacccctgaggaatttgattatattacttcctgaagtgtttgcatgaactgttcacaaggggaatattgaaacgtagttgctttgagaaagaataaaaatatccacagagaaagcaagctaatgattcttggaaagtattccttcaaatgtttacgcttgccttagattcaggaaactgagatgattgattagttaatagaagcccttttggagtattccttatatgtaaaaataactatttttctatatgtaatatatattgattattttttattctttacatagaaatgtttgtctttaatggatcactaaattttattagaaaaaagatctgagataccaggttttcatcttttgaaaaaatcatttgatttttgtgctgacgttctacttatagtagggggcctctacctttagaaactgatgatgaaaaagaaatcagaaataaaatgatttccttcttctggaataaaaagcatcattatgtgttgttactaataatatggtagaggttttatattctgtgcagtttagggcacatgtaatctctttaatcttttatttaccatataaaaatataaggggctaaatctaaagtataattattagttgtaatttagaaatgcttttgaatagtttacaaatttgtcttttcaacttttctataagtttatctctttctatacaaaaataaatataattatgcagttgttggccagctgtgggagacatagggaggacaaaggtaraagagtttatgtgtctcatgtgggaccagyatttatctgtgtagaactttaaaatttctttatcatcctttcatatggggtttactaaagaagatgatatcaacgagaagacaaggaaatataaaatatgcatgtcatcatttgagcagtatattatcaaggcagaggttttagaaataggcgtattgaatttggaacctctgttctttcactttctagctttgtaacctaagtgcactacttaacccatttcttcatttgttgaatgagataaaccctccttttggaatgattgcaaggattaatgcaaggtatattaattaatatacatatataataaagtgcctagtgtttggcccttattagcattcatttaatggagttctaaataatagtaagaacagcaataacagcaaacacacaaaaatgtcattcagcaagtggatgagtattgagagcactgtttagcagtaaggtagctcttgatcgagaataatccaaacaggtataatattaagggaaataaaaggcagaattttgaacatatttgtgtaaagattttattaccaattaatggaaacctatatatgttagcttaactacagggctcctaaaattttaaatcctgctctctgtccgggtgcagtggctcatgcttgtaatcccagcacttttgaaggccaaggcaggaggattgcttgaggcctgaagcttgggcgcagcctggacaacatagtaatactccatctccacaaaaatagtaaaaaaaatttagctgggcatggtggcacacacttgtagtcctatttgggaggctgagacgagtggatcacttgaacccttgagtttgtggctgtggtgagttatgattacaccactgcactccagccagggtgaaagggtgaaacccccacctcttaaaaaaaaaatttgctctcatacctatatccatcatagcatctaagtacctctagtttcacatgattaactcagtataaatatttgatggggttctcatgaaatcaaaatactttctctaggattatcaagataggagaaagaaccattagaagaaagagaaaatgtcacaaatattaatatctgaaagaattgaaactcatcagtgatatccacaatatagaaattctaggaattgctagacatagtggtgtgtgcctgtattcccaccttgttgggagactgaggcaggaggattgcttgagtctgggagttaaggctgtgatgcactatgatcatgcttctgaatagccagtgcactccagcctgtgcaacatagcaagactctgtctctaaagggggaaaaaaaagaaaatctagaaatagtaaataagcattttaaatatattagaattagcatttaatcattaggaaaacatataccttctatattattgtaaaagatgtattttgttaatttcttgttctaagtactggttagtattgcttgttgttttttgaggctttcaaatagtgatcaacatgccagtgctaaaataatgtcaatactatcaaattagctcagggactattttgtagttttttgtttgtttgtttgttttgttttgttttgtttcgagacggagttttgctcttattgaccaggctggagggcagtggcgtgatctcggctcacggtaacctctgcctcttgggttcaagcgattctcctgcctcagcctcctgagtagctgggattacaagcgcctgccaccacacttggctaatttttgtatttttagtagagacagggtttcaccatgttggccaggctggtctcgaactcctgacctcaggtgatccacccacctcagcttcccaaagcgctaggattacaggtgtgagccaccgtgcccggcctattttgtatttgttatacttagtgagccctttaatttttcacattttgcaggatgtgaactcattacttggttttattcttttctttttttctctttatattgatttttagaaaattttacaacttcttccagaaagaattcatcagcgatggcagtttcatagtattggtaagtaattcaaatatgtatttcatatttgaaacaaaggataatatatgaaaaatgttctttaatgggttgttagttgaaatgaattaataggtgatgctttaataaaaagaaaataaagaatacaagaacagattgactaggaatataagaaaaattatagatgaaggatttgcagtcaaaatgccataggaaatttttggatccactgcttcctttattctgatacattaacattgatgataaaactataaaacaaaaaagcaagattagcatcaagacaaatatctcctgatatcagaaatctctatgaatcagagatggaagaaaaatgcaaagtgctaaatagaatggacatttgtgttgtttctagtttatttacttattgtttgctagttctatttgttttattgtatattcctttggattttctactgtagggttatatcatctgtgaatgagtacagttacttttttttttaatcagatgcctttgatttcttctttctttcttttctgtttattgtgcctccagtacaatattaaataaaagtggcaagaaagagcagacattcttgcattattcctgatttcagggagaaagataatggtcagtcttcaccattatatgtgattttagctgtagtgtttttgtagatgccttttatccagttgaagaagttctgtttctagtttgagagtttttaatcataaatgtgcattgtagtttgccaaatgctttttctccatctattgatgcgatcattatcagtgtcattggtgcttttgtcatttattctattaatattatgtattttactaattgattttcaaatgttaaaccaactttccatacctgaggtaaatcctatttactcactatttatagtcctttttatttgttgcttacttcagtttgcctctctgtttatgaggaatattgtattgtagtttgtcaatctttatttggctttactattaagatagctatagaagtttagaagtggtccctcttgttttctgaaacagtttgtgaatgagtggtaggtaacattttcttctttaaatagttgataaaattcaaaagtgagaccatttgtacttggacttttctttgtgatatttgtaattattacttcaatttcttgttataggtttattcagattttatatatctctctgagtcrgtttgataatttgtttctttctaggaacaaatttgttagtagaaagttgttcaagttattccttagagtaatcctttcgattcctatagggtcaatagtgatgtcccctttcattctttttttttaatattacataaactttttatttattctttaatggtttcaactttatttttagattcaggggatgcatatgcaggtttgttacatgtgtatatctcatgatgctgaggtttagggtatgactgatcctgtcacccaggtggtgaacatagtacctaactgtttttcaacccttgtccctctagtacttcccaatgtctattattgccatttttacgtccatgagtacccagtgtttagctcccacttacaaatgagagtatatgatatttgattttctgttcccatgttaatttgctttagaataatggcctccagctgtatccatgttgctaaatgttgctgcaccggacatgatttcattctttttaatggctatatccgctttcatccttgattttgttaatttatgtcttctctcctattttattggccagtctaactatttgtcatatttgttgatcttttcaaagaacaaacttttgatatcattgattttctttatactttttctgctttctattttcttgttttccattctagtctttgatattttatgtgtgtgtatatatatatatatatatatatatatatttttttttttttttttttttttttttttgagacggagtttcgcccttgttgcccaggctggagtacagtggcactatctcggctcaccacaacctccgcctcccagattcaagcgatcttcctgcctcagcctcccgagtagctgggattacaggcatgcaccaccacacccggcttattttgtatttttagtagagatggggtttctgcatgttggtcaggctggtcatgaactcccgacctcgggtgatccgcccacctcggcctcccaaagtgctgggattaaagacgtgagccactgtgccctacctatttattttttgtagtactgtattttttttaagagacaggatcttattcagtcaccaggctgaagtgcagtgccatgattgatcatggttcactgaagccttgaaatgggcttaagccatccccctactcagcctcttaagtagctgggaccacaggtgtacaccaccaggcccagctcactttttaaaattattttttgtagagacggggtcttgctttgttgcccaggctggtctcaaacctccggcttcaagccatcctcctaccccaacctcccaaagtgctgggattacaggtgtgagccatcatactcaacctcttttatattttataaaacattctgtggcaggcatgatgccccatgcctgtcatctcagcacttggcagagrctgaaagaggatgatcacttgaggccaggagtttgagaccagcttgagcaacatagtgagactctgtctttaaagacaaaagaaatttttttaagctagcctcacttgttggtatgtgcctgtagtccctgctactcaggaggctgaggcaggaggatcacttaagtccagaaattcaagggtgcagtaagctgtgatcacactgctacactccaattggggtgacagaatgagacacaatctctaaaacatgaaaataaggacagatgtggtggctcatgcctataatcccagcactttgagagcctgaggcaggtggatcgcttgagcatgggagttcgagaccagcctgggcaacatggtgaaaccccatctaggaaaaaaatacaaaaattatccagacgtgatgactccttcatgtcgtcccagctccttgggaggctgatttgggaagatcatctgaacttggtgaggtcaagactgcagcaagccaagatcatgccactgcacttttagcctgagtaaaaaaatgataccctgtctcaacaataaaaaaaaawtttaattaaaaaagagagaaattctgcttcctttgggtttaatttactcttctgtttctaggtttttgtttatttgtttgtttttttgagatggaatcttgctctgtcgcccagactggagtgcagtgacgctgtcttggctcactgcaacctctgcctcctgggttcaagcaattctcctgcctcagcctcctgagtagctgggactatacaggcacatgccaccacgcccggctaatttttgtatttttagtagagacagggtttcaccatgttggccaggatggtctcgatctcctgacctcgtgatccacccacctcagcctcccaaagtgctaggattacaggtgtgagtcactgcgcctggccctgtttctagtttttttaagatgtaaccatagaatattaatctgatagctttcttcttttctgatataggtatttaaaactataaatttccctctaagctttgccttatatccatcccataaattttagcatgttgtatattcaataaaaattattaatgtatggcaattatgtgatcattgaagaacaagaaaggacttgaataaacagaattttatgcaatattcataggaaataaacttgatagtataaaggcaataatttttaaaaattttgcatgatatatttatctctactgtgttagagagacagagactaacttttcattttcaaggattgatgaacaatcatccataagttcttgaagttgaataacaggaaactttacttgtttttcaagccatctggctactgtaagaagctgctagtcacaaaatgcatgtccagtaaacggcagccctgtgggcaacgcttggtttgagagtgcaacagggttactcactgctgacagtcctgccatgtttacagcctgtgtaaaaatatcatcctgggcacttcctgttctgtggtcttctttgatgaattccaggtatggtactgccttactcaaggtggtgggagttagcatactccagagttaaaagcattcacaaaatcattagcaatgaggcatctcactttctgtgctttgatgaaataattttcatatttttattttaacaagaaaacatttcctgagagaattcttcctcttacaaaatcattgaacccttctcgtctggttgcagcatacatggcttcagtagatacatcagtgtcacatctgtgaccatattgtagcccatcagatcttgctatactcgatgctgcttctgatgtgcacaatagatggtagcagacaattgaataagtaatgtgagaaaaggatacttcaattgctttggccccctcagactcaaagaggtcagcagctttggaccaaagagactgtacttcacttgataattccagtacaagatattcctctggaatacctatacatagtttgctcacatttgtcaaactgggaatcatgaatggtttaacaggatcctgtgctgtggtagaatccgtagggtcatgttcagccagtacacccaagacaattgctgcatcatccacacatctggttaagattccttgcacttccatcaaatcctccagggaaatgagaccatgatgggaaactaagccatagtttggtttgaaaccaacaagcccacagtaggcagcaggatttctggtcagccctccagtatctgatcctaaagccgcatagcatgtgaatgccgatatggcaactgcactcccacctgagcttcctccagttatcagccagtctgaatcttcattctcaaagtrgagattctgcttcctcttttctctatattgttttgaataactccaggggtttttaactggtccaaataygccttctgcatttccagatctcatagcaaactcatctaaatttgtttttccattagtagagctccctaatccaacaatttcggaactactatagcattacctttcagcatatttgatgcacatgtaagacagtaatttttggctggctgtagtggctcacgcctgtaatcccagccctttgagaggccaaggtgggtggatcacctgagcccaggagtttgagaccagcctgggtaacatggcagtaccccaactctacaaaaaaatacaaaaattagctgggtgtggtagtgtgcacctgtgttcccagctactggggaggtgagaggataacttgagaccaagaggccaaggctgcagtaggccatgattgtgccactgcactccagcctgggtgacagagcaagaacctgtctcaaacaaataaatttgttaagtatatatataaatatcaatatcacacaatatttatcaatattaaatatatataccatgtatatcaaatatatatcatatatatgtatgtacacacacatataacaattcttaacattcctatagggatttttaaatgtagcctaacaaatatatcttaaagtttatatgtaaaataaaagccaaagcaatttggaagaataacaaatcggaccaagagggtggtggtgttggctattttcatgcctgataacaagataaattataaagttatactaacaaaggcactgttactgatgtagggatggacaaatggatgaatgaaaaggaacatggagatcagccaaagacctaagcttatgtatggaaacttgaaatatgattgagatggcattttagttcatttgaacatcataaatcccgaaatagtactacacttggttttccatttgtgaaaaaacaaattctgttccacccacaaggaaataattttctgataggtttcaggacctacatgtgaaaagcaacacataacaactttttgaagtgagtatttggtttataattttaatgtaaggaaggatttctttagacatacaaagaacacataagaaagaaaaacactggcaaattgattatattaaaatttaaggccaggcatggtgtcttatgcctgtaatctcagcactttgggatgggaggccaaggtgggcagatcacttgagctcaagagtttgagaccagcctgggcaacatgacaaaaccccatctctacaaaaaatacaaaaattatccaggcatggtggcatgtgcctttagtcccagctatctgggggctgaggcgagaggattacttgagctcaggaggtcaaggctacaatgagccatgatcatgccactgcactctagcctgggtgacagagtgagaacctgtctcaaaatgataataaataaataaataaataaataaaacttatctgcatcagaagataccacctccccacccaacaaaaacatgattgaattgtttgggataatgtattttcaattcatagaaatagacacagaattagtaatacagaaggaactccatatatatatatgtatataaagaaggccaggtgtagtggcccacacgtgtaatcccagcactttgggaggccaaggtgggaggatccttgaggccaggagttccagaccagccttggcaacataatgaagccctctacaaaaattacaaaaattagccagacctggtggtgcacatctgtagtcccagctactcaggaggctgaagtgggaggatcacttgaacccaggagtttgargctgcagtgatctatgattgcaccactattttccagcctgaacaacagaacaagaccccatctctttaaaaaaaaaaaaaaagaacaactaaattgaaaattgtgcaaaggataaaacaaggaaaccttgaatagccaaattaaaagatgttcagtgtcactaggaaatatcaaatgaaagcaacattaagatagttaacatacatcagattatcaaatattagagcatctgtcaatgttttgtgctgccaacaatatggtactagagccctcccatatacggctggtagtactgttaattgttacaactactttggagaaaattatctaatatttggtaaagctgaaagtaattttattcctctctctctctctctctctatatatatatatatacacaccccggggaaactcaggtgtgtacagggaatcatgaacaataactatttattacggtactcttggaatagcaaaaatttgaaaaaaaccaaatgtcttaatataaagacgataaataaattttggtatgttcatacggtggaatagtatgcamctcttaaaatgtattaactagagctacatagataagtatagataaatttcttaagctaatgttggatgtgaaaagtaacatataaataactttttaaaaaaataaatgagttatatgaaacagtttatattattttttatggatttataaatgtgtagtaataatataaaaatattttttgaaatgattaataccaaagcctagataatggtttcctctggggaagaaaggaacaatatgatttgggcctcagtgatacctgtacagttaagtaaaacattggagataatgcaggtaagtgaaataaacatggaactacgtgtagatttattcatactgagtggtggtcctctgcaggtttgttcatgttattttcagtattttattataggtttgaaatatttcataatttaaaagaaaaaaggaaatattaatgacttttcaaaacttagaaaattagtataatggaaatattcattaggaaatattacagttaaggatgttcatgtggttaactaaatgaaaattttctatagtggatttcatttggatagtgataaaagtattttattttattcttagtctaaataagagatttataatagattgttgtgttaaatgcaatttcgggcctaggttttgttaataaaataaatcatgtttaattgcaataaagcatgtgttgaaaaggtgattctttttatatgcccttctgatcccaagtatggcagaaggatataaaggtcaccaagaataatttggaggttgccaaggacttatttaaaagtgttttcaagtccgaccgagaactctgacatttacaaatagataagatgtgaatatttaaaatcatattttcttttcaggattgattttaaagaagctacttcacacaggaaactccttaaaggtacaactatgtttactttccatgactttaaaaatactgagtagaacatacatcccacctgttaacacttttcctacctaagctttttcctaaagatctttgaattgtcttcagtttatttaattgaagtgagttcccttaaaatgtagcaagaggctgggtgcagtggctcacgcctgtaatctctgcactttgggaggctgaggtgggtggaccacttgaagccaggagtttgagaccagcctggccaacatagtgaaaccctgtctctactaaaaatacaaaaattagccgggcgtggtggcacgtgcctgtactcacagctacttgggcagctgaagcaggagaattgcttgaaccctggaggcagaggttgcagtgagctgagatcaagccgatgcactccagcctgggcgacagagtgagactgtatcttaaaaacaaaaacaaaaacaaaaaaaaaacgtagcaagagtttgtttgacaaaccattctaggttgactggggacattgaaaaaactgttgtactttgccactcaatggactcattcaccagcaatctttcctctttatggtccccagaaggaaaacattgtttagtcattcaacagattattcttcattccaccatagccactattagatgtagagggaagtaggggagatacacatatatatataaacatttttgtttctttttcattatgccattgtactgtagtaagagaagctgcccattccgaaaatatcttgctgtaggttaggtaaagtaacattattacaggtgcttttggcatcatggcttgggtataaaagtacaaaggaataagccttcctgtagcttttctcctgttatctggctgaaccatgaaagtaacagcagttgaatacctttgacagtggccatgaacaagctctggtaaggtaatttacaaagctatcagtgaggttaggttagtggaagactaagtgttttgcttgtcagagattgaattttcctctatttctcttttactgtttttatgctgagagaatgttcattaatcagttaaaatatttattgtcttctgtgtacagggtattgttttagatgctttaatagagtagaacaaagttggtatcttggagcttagaatcaaataataagtacatgagataattgcagagaggttttaaataatttttatttaaattaaatcattttatttttaataatttaattgtaacttaataattttaataatttcagaacttttcaggggcaagaacattgaattcgcrgtgtgccaggatccccataaccattcctccttttaccaaactcattctcaccactaacagtcattgctctctctcgcttcttggtttagactagtggtgatgggaggtaggcaaggagggaagtagacaagaaggaaaagattttctaatttttataaatggaacttacagaataaaaattacctgatggctttaaatagagaacaagttcattctatacttgttaaaaatccatgcatttgtatttctaaataatgatttcaatagatgctgtctctcttctcctcaacttccccttccttccctaccctgcctctcgaaagtatcattctgttgtcatcatctagagaactttgtttttcaaaggaagaaaatatttccattataaataaaaatactgtctattttcattttattttagattaggcgggaaggtgttcgtcttttcttactatggttgcaagctcttcagaataactgtagcaaagaacagctctggatgttttcatgcttaatccctggattttcagcaccacagtctgaacatggacctcgaactttagataatctcattaatcctccactcaaccttcaagaaagtaagattcatgggatgttatcygtcagtaggtttaagctctctatgtagtctcttagtgtattttttcaaatgtctgtgcattcattaactgggtaatccaaggcaatgctttaaaacatagcttttattattattcaggtatggtgaagtcagcagatcaagaaagctgttgaaataatagtttgttactcacagttcccaagaggaaggggcatgccatgccacaagggctaygtgggggaagcaccagagttggtcaggaggcagagagaacaggggaaaacatgggcaagagtctttattatggtttctatgggaagaaacaggcaacccagattaagcaagtttaggattagctagtttgaataattccagtgggctgtagattgttaagagttgtccctagttgtctggtacccagcccctttgtaattaggacagaggagcagtcaccctgaatgtgagtgtggaggaggtggtagcggtgtgggctctggactggttggtttgaatatgaaaggcatgctcacaggctagtcacttactgtctctaggaactggctagccctgggaaggacatattcactctagagtcagtaaagccccagaggtataagcatcaaaaacctatggttaatacagatcatttaacatttttcattaattattacatatcaccttgtatcctggagttaatttggatgtacattgaagtacaagtgtgttttattttgtccattagatgactgtgaaaatgttatatgtaaattgaatttttataaattttcataaatagtactgctatttaaaaatgtataatttcagtaatgtttaatttttgctttcattcattagtgagtctttgtggtttaccttaactttttctaatattcctttctttttttttttttttttgagatagaatctcactctgtcacccaggctggagtgcagtggcatggccttggctcactgcaacctctgcctcctgggttcaagcaattcttctgcctcagcctcccgagtagctgggactacaggtgtgtgccaccatgcccagctaatttttttgtatttttagtagagacagggtttcgccatgttggccaagctggtctcgaactcctgacctcaagtgattggtccgcctcggactcccaaagtgctgggattacagacatgagccactacacccgaccagatttttctaacattcacttttttttttttttttacttctttaattctcatcttcgtgtacgaatcctgttatttaaataagttaaagttatttctttattctttcatgagcaaacattgtcatatacagtgctacattagtcagccaaggctgcaataaccagactgggtggcttaattaacagccaattgggcccattcacatgatctcatgtaactttacctccttaaaggccctctctccaagtgcaaccacactgggggttaggttttcaacatatgaattttcagggtacatagttcaatccagagcaagtactctgttaggtactacctcttatttataatttttatttctataaatttaggttttgtggtaaagcaaaactatgtttgtagaacaaaattttagaaacagtaccaagctggcataaaatgtattaatgaaccagttcaaataggctacatatgcatgcttatttacattatgtgttattttgaagttttttgttttgttgcgttttgtttttgagtgagacagggtcctgctttgttgcctatgctgtagcgcagtcccatgatcagctcactgtgacctcaaactcttgggctcaagtcagtagctgggactacaggcacatgccactcaccacacctggctaattttaaaattttttgtagagatggggtcttgctatgttgcctggctggtcttaaactcctaaagtcaagcagtcctcccaccttaacctcccaaaatgttgggatcacaggtgtcagccactatgtctggtctacttaacagatgttctataagcattttttttctctgcctctcattatagagaggttttctttcatcactcttttttaagagataaggtctcaaagctatgttgcccagattagagtgcagtggctattcacaggtgcgatcataatgcactgtagccttgaactcttgggctcaaacaatcctccagcctcagccttcccaagtagctgggactgcagatgcacaccaccacaccaactcttttatcagtgtttttgtggatgactttaaaaataattattatttattttaaatatatttgtgactgacttctgccccttctctttttaagaatagaagttttgctttttagtctgtaagatgtggaaaatatggagtctctgtatactccccggcagagactaagacgtctttatgggaacagtggattttaagggggtttttatagcttcacaaaataaagctttcataaagtgtgttcttctgtatgatgacagtggtccaggaagtccagagtacagatgataaagtttgtattttcttacttcttttcttttcggtttgtttttttttttttttttttttttgagacagagtcttgctctgtcgcccaggctggagtgcagtggtgcgatctcggctcactgcaacctccaccacccagttcaagcgattctcgtgctccaaagtagctgagattacaggcgtgtgccaccacgccaggctaaattttttgtatttttagtagagatggggttttaccatgttggccaaggctgatctcaaactcctgacctcagatgatccactcgcctcggcctcccaaagtgttgggattataggcgtgagccactgcgcccagcctaaagtttgtatttttaaagaataatttttaaaatactttttagaataatttaaagaataatttttaaaatgagtggcagaataacataccatgtattatttaaaaactgaaatctacctctgttgtgagcttgttggttgatatttattgggagtcaggtttagggacctacatatgtttaccaggtactaattgttcagcttaggaaatatttaagagaattcagctagttgtgggttgactttcttgcatttgcatttgttataatgaatttttctgaacatctgaaaagtaaacaatatagaactttcttattttgtaagtgttaacagattggtactttgataaataagtgcattattactaatgtttgtcatcttatggaatttttgtaatgggcagttttcatgtgaatttgaaattaccagaagttctttctcaactgagatgttacatacttgtaatcactgtgttatttgtctgtccatccckttgtcacattctctcaatcaagggttcacagaacagctgattgttaaaatttgtggccaggcacggtggctcacacctgtaatcctagcactttgggaggccgaggcgggcagatcacctgagatcaggaatttgagaccagcctggccaacatggtgaaaccccgtctactaaaaatacaaaaattagctgggcatggtggcaggagcctgtaatcccagctacttgggaagctgaggcaggagaatygcttgaacctgggaggcrgaggttgcagtgagccgagatcgtgccattcattgcactccagccagggtaacagagtgagactccgtctcaaaaaaaaaaaaataataataataataataataaataaataaataaaatttatttttgtgatcaactatcagggatgatcttaagatttatttcaaggatcagtcattagaaagttttcaagcaattttcattgcatactcattttgcagttaaagtttatttggttatattattgttttattaaatttgttttgtaactatatactattcttttgtctttggatagctcaagtcactatagaagaaatcactcctcttgtccccccacaatcaggagataaagggcaagaagatctcacaagctattttcttgaagcacttctaaaatacatagtcattcaggtacttgttatcttctttgatatcacactccttactatcctatgtgggtgattcccttttctgtctcttaccattattctgtcatagtagatatttgcttattttctttttgtcagggaggttggaggggaagggtcaatggcttgcttttaattagctttagcttttaagcttttacaagtgtaatcaaccaagtgatggtggtaggggatatttcctacacttctcatgtaaactcaagttttagattcttctttggagtaaaaatagactcttcactctttagaagggtatcccttagttaaaaaaattccctcttcgtgttttttccctgtatccctctattcatccttggctgccacaataaaaaagacagaaagtacaaggacatgtttttcttgcatctgtagtggaaaccttagcagcagacaggaactgctccaggtctgtcacatagtagatgcatatagttgcttattttctcgaagaagaagtgacaaatttttgctattgaaaatatgttaatatctctttctcaaatcactggagggatgatgacactcttaggaatctagagagggacaattttgtagactctttgcgtataccttcttatgtgagacagttgtgcttattttctaatcctttcatttgtgatcagcagttgtgatacttcaaatgaaaagctgaaaattgtttgatttaggaatcaatctgccaatatgtaacaactagggaggtaggctgcaggataatgattaggagaaatgtaatttacacttaaacctgtttgtaccttttgaatttctaggtgcatgtattttgcaaggtaacctattcacctttagatataaaatgtgcataccctgattgactgatgaaaacgcttttattcacacatttcttataatggctccaaacacaaaaattcctcatacctcagaaacaaacattataaagttaatttggaccctaaactagattgccagagtttgaaccctgattccacattttactaatagtgtggctattggcaaattacttaataaccacttagtgtttctgtgtccttatttgtgaaatagagataaaaataataccattttggtgtatgaggcctaaatagtgcacagtgcttagaataaaataatgcatagcatgccataagtgttctgtagtgggcaggtgttatgatcatcattgttattactaatttttctttaaaaatacttttgtacttcatatagattttaaagattgctttactgatttattgagctataattgatacacaataaactgcaatatttgaaatttacagtttaatgaattttattatgtgtatacatccatgaaacctttacaattaagataatgtatatatttatcacctctaggcattttcttggatctttgtttgctttgtttttttgtttgtttgagacaaggtcttgctctgtaacccaggctggagtacagtggcccagttatggcttackgcagcctcaacctcctgggcccaagtgatcctgacacctcaacctcccaagtagctgggactacagaccactgagcctggcgaactaaaactttttttttttttgttagagagagataaggtctcactgtgttgcccaggctggtctcaaactcctgagctcaagtgatcctcccaccttggcctcccaaaatgctgtgattataggcgtgagccaccatgccccttggatccctttgtaattcatccccttgaattctcacaccaccattttatctttagacatccattgatctgttttttgtcattatagaatagtttgttttccatagttttatgtaaatataatcatagggtacatagtttttttggtcttgctttgttttctgtttgattattttgagaattgtctatcttcttgtatgtgtcagcagttygctccttttatrgcattccattgtaggggatgcaccagtttattcagttatttgtttatggttatttgaatggtctctaatttttggctatttaaagtaaaactgctgtgaatattggtaaacaagtttttgtgtggacataataacagtagaatggctgggtcaaatagtaggggtatatattgactatttaagaaactaccaagctgttttccaaatgactgtacctttttacattccaccagcaatatgtaagacttatacaattgcttcacatcctcaccaacagttggtacggtcaatttgtaattttagccattctagtgaatgtgtagtggtatctcattatgattttaatttgtatttccctaacagctaatggtatgttgaatatctttttatgtgcttatttttcatccatatatcttgggtgaagtgtctgttcactttttttgcccatttttaaattggcttgtcttattaagtttaagctttttatatgttttagaaagaagtccttagtcagatgtatgttttgcaaatattttctcccagtagctcgtctttccgttttcatagcagtctttttagaagctttttattttgatgaagtccactataccacttttttaatggatctgacttttggaattgtttctaatctttgcctaatcaaatgtcacaaagatattctcctacgttttgttcttgaagttttatagttttatgttttacattaaggtctgtggtccattttaagctaattctgatgtatgagcaatgttgactttaatcctttgattaaggtagcgtctgccaggcttttccagtgtaatatcagtaagtattacactggaaaatcaacaagtattttgtggggaagtactgtgtaactacctaaatatcccctttcttacagaaatttcacatgttttaggatccattgaaggcttttgactttgtaattacgcgggttaccaaatggtaatttttaaaaaacagctttattgagatatgatgcacattttatatagttcactcacttaaaacgtacagttcagtgtgttttaagtgtattcacagggttacacagccatcacagtataattttagtgctaataagaaacctcatacccattaggagtcagtcctcttaccctcaaccctttcatccccacccctatggcaaacatgaattgattttctgtctctatatatttgcctattctggacatttcatgttaataggatcatacaatatgtagtctttattgactagcttcttttacttagcaaatgttttcaaggtgtatccatgttgtagcacgtatcgatacttcatttttattgcggtgaataatattatattgtatacatatacagtattttgtttatctcttcatcagccgatgagtatttgagttgtttctactttttggccaactggtgatattaattccatcattacttctacattcaagagttggctacatactgtaggaaaaagctttctcccctccccatttgtttacttacttatttatctcaagacggatttatgcattcctgtgaattcatgtgttaatgtttactacagttaccaattttgatgctcaggttgtcctaaatttgtctagtggaagttccttcaagctgaatcctatgcctttgaattgtttccgtcattgtctaagcacttccttacttcctggcaccacaagatgttccaagctcatctcgtaccttccttgtccactctggaatctgctgcttctctaaggagctgtcattcattttaatgaagaattgtattcacagacacagacacacacaaatccatgtttctgcctgtctgtctgtttatctatctmtcttaatgttaattcatacccattttccagattttagtctagtaccacagggttcattctggtttcttcctttccatatttrtaactcttacctgtcaatgagaaatgtggctcatattattcttagtatatatacttatttaatcagtcccccttgtgtataatcaatctcccgttgccaccattgccctcctctgcagacattctccttaacttgattgggttccagtaccccactctgggcctttgccaaccacctgcttggatgtcttcgtcaccttcttagagttctcataccctatattatactgctgtatctctttctgtcctcacttcttccacttcatggacaccctcctcactcctctcagactgtgagtcaccactgggttactgtaccccctttatggatgccctgcgtcctgtgtcaggctctgatcgtctgcacttgactgctgctactgcttacatacacacacccctgccacatatgcttatgtattttgtatggttttttaggstgaattattcaggaaggggcaaaagggaaagaactttaatatttttgtcattagtagggccacttttgtgtaattttcatagtcttttgaagcatacttctaaggttttttaaacatatacataatgtacttgtttgacattagaccaatttaaaagatttgtccttatgctatgtatcatgatctttagtgttaacagttcagtgtattgcaaccttttacaagcttgtttataattgctaatacttgcatttaagagattctttcttctggaatgattctaattatrtaatttatttttaggtaaaaagtttagaatggaagaacaaagaaaaccaagaaaggggattttcatttttgttttcacattttaagaaatattacttgccttatatttttccaaacatctgtaaggaaaacagtttatatcatcctatacttggtaggtaatgtttgaaattttctgaaagatcacacttaagagtaaaataatctcttactgtaaagttggcatttgttactgcaggaaactgatcatatttaatacttgtattggttggtatagatatgatacctagattcatactgaaagcaaatttatattaataggaaattttcaatgaggatgagtttttctttttttgtttttttttttgttgttgttgttgttgttttttttaagagacagggactcactctgtcacccaggaggctggagtgcaatggcataattatagctcactgcagccttgaactgctgagctcaggcagtcctcccatctcagcctccccagtagctaggacaacagtcatgcaccaccacatctggctaattattttttttttagagatgggatctccctatgttgcccaggctggtcttgaactcctggcttcaagtgatcctcctgccttagcctcccaaagtgctgggattataagcatgagccaccacacccagccaacaatgaacagatttttaaaaacacttgttctctggatcttatcaattataaaagttagcccaccagaaatatttgcgattgtaaattaaactgaattcttgtttggcatgatccttagactatattataaattttctttttaaggtccccccatatgggggttcaatcaagtgttagtcttattcaaattctgtgtgaataattacatagccatgtttcatccagtatttatatagattggtgcaaaagtaatggcagtttttgcaattacttttaataattattgtgccaacatatctcttggaaccttgagcctagagccttgtgtacaaatcctgggttagaagcatatctctgccatatatagaaggtattggtagtccgtaggtaaattgtctctttcccagaaagatgttcctaataccaagtttaggcaactaacaggctcaggtaaaacctcatattttgtatgacttcaaactatgtgtttcagtggtaggttaattgaagtgtgagctcttatttattttaaatggttctggaagcttctttgtacttaggtaggttcactgaactttttgatattttgtaaaaatacatgtttccacatatcatcctggtatatatggttcactcttctgagttccatgcaaacatctggcaaattttgaaatgtcatttctgtgctaaagctacttctgaaaccagagtagcataacaatattttctcaagtatttaaaaatgtaggttttttctaaacataatttctttcttaytttggttttcatcttccttttattttgcacagacatcccgcagatgagaccaaagccacattatgtcgtgataaagaaagatgctgaaaccaatgaagcaatctattgtacaaaggagcctttcattaaggctcgtgttattgtcattcgttggctggtttctttctggctggagccaaaaccacatacaggacctcatattcctgggatggaaggtgaagtcttgccaaagaatattcaggtaatgcacaaatgaggcaggcctgttaaagttagaaatggcttttgagatttagtccattgagttcagttgccttaggtggagcgtacacttaaataatagtgctattttatttgtataaatatattttgtaaatgcaaattttaattatagaattaataagtttcttaataaagaaatgaaacgggaagtatagaagataatttcattagtatgtcagtctcagcttcttatttctgtattttaattatacaatactaaaaatattctttattgtacagataaatcttacaagtgaaaagaactgtgatcaaatggtagaaccttgatggccctttttaatttgggggcattcacaaaatgcagattaaaagacctgttcacacccccttcccccctttttcaacaaagacgccaagtctagaaatgtgatataaaattacaaagcaatacagtagaggaactaatatttcaaactgttgttttggatttaacagtttacttttttccctcatacttcttttttatcttctattttccctcgtacatttttctaaacatgtctatattacagtatttttactacttttattttcctctcctcagattttcttagtttttaaaatcttaaactatgtgtgttttttctataacaccttaaatcttttataagtaggataaaggtataacgtgtgtttagttcatcagaattcagaaaatttgacttttattcctcttagtttatttatctttagcaaactgtattgtgtgtcttcctccaaaactttgctctaacttctgtattaagaactattaagtgcgaaaattctcaagcagaactatctgctttctgatcctagaatgtaatggatgaaaatcataaatgtttttggttggaaaggtatatttgaggtcatttatttaagctctgttattttatggatgacaaaactgaggccaaaaattgaataacttaacagaaagtaatttataccacagaatagtgctacttttaccatatagtaatttgcttatcaccaccttaagacttaatttttccctatctggttaggcttgatcttcagacttggtgaaaattccattattagaattatagaattttctctcaagttttctaatattttctgttagttttgttcctacttctgtcataaattttgttcctttgttttttgttttgtttaggaaacttttacttgtctaaatttttgtccacagtaaaatagagataattttaaacattaagtttttattaggtaaacattctgatgttaagttatttacttattcttgaaggtctgagctgtctctaattccattattcatccacccagctttgattaataacttgtttgaactgcaaacttactgagaagaatatataactataggtgggtagatgattaattaccacacattttggagtatctgtcacttagatgttgagttacttgcattgccacttaattatttagaatggcttttaaatgaaactctatgcccggagtttaagcagtggtataaattacttgggaaatgttttggattttgtcagtattacctattaaaagacaaaatacatagttaaatgattatgatattgtttctctcttttttttttttttttgtattttagagagcagctgctagtttagtatccagagaagaaagcaaaaatgataatgctgataaaacagacagaactacagaacccgaacagtctcattccaatacaagcactctcacggagcgagaacctagctcatctagtctctgtagtattgatgaagaacatctcacagacattgaaatagttcgcagagttttttcttctaaaaggagtaatgtaaactttgtgacagagatatttcgtcaggtaacatacctctcagtatttttaatttataaggaaggcttttatctttaatattaaacatactgatttttagctgggaacagtggtgtgtacctttagttgtagttgttcaggaggctgaggtgggagaatcgcttgagcccaggagtttgaggccactttggacaacatggagagaccgcatctcttaaaaaaaaaaaaaaaaagagygagagagagaaattactgattattagctatttaaaatatattcttcatgtagatttttaaactaatttaagtaattcttagtagtaattcttagtttaagaattttaaactaagtaattattaaactaagtttatacttagtttatataatttacatctaatcctctagtattttctattctttatatattttagtttgtgatacttttagcgtaataattattttccccttatactcctgttactagaataattttttaaattactcattatagattgaaactcttctatcatttgattaataaactatggtaaaattattttatcttccactctatcatcagtaaatggtttatgatataagaagggaggtttttattgcttttaccctcaaggcttagttttgtcctctaaggcattctgaagtcaaagttgattaagacagatatttcttaaggaaagtatagaaaaaaaaaagggaaaataaaagaacaaaaagctatttcacatgaaacagctggaaatccctaagtgcatgttctcaaatatgtagaaattttgtggaagagaaaccttatgaaaactactatttgctcttgatggcaaaggcacttaacttttacaggtaaacaacattgagttttgcagctgagggggatcattcaggtgtctcagcaagtaagtggtagatcttcaaataaaatgcccacatcctggttcccatgtcagtgctctttattcagtgccacactgcattcacattccagggagctctctaggcaaagcaaataatcttgatctccacacatacttattgatgtgtaaaacaaagcatgagacagcattagccttgtcagcctaagttaaagaaacaaactcattttcatttttgtccagtgttggcagtggttccagccagatttaaggtttgtgtttacagaatatgtaacaattgggaaaggaaagacatttgacaaattatgttggaatactcatggggaattttaaagcttgtagaactattcaggctttccagttgttgagtcagtttaaataagtttatttttctaggcatttcttcttgtgtttgttttcaaatttgttgacaaagcttatcacatcctcttataatccttttaacctctgaagcatttatagtcatgtttctccttttcattcccataaatgcagtatttaattgcctggtgatttttaaattttttttgtagagtggggtcttgctctgttgtccaggctggtcttgaactcctggcctcaagcaatcctcctgccttgggcctcccaaagtgctgggattatagacatgagccactgtgcctggccctatcccttgtttgtttttctctctttctttttttcttttttttaatgatgattcttgccagagatttgtcagttttattagtcttttctttctgtctttttctatcttttccccccagcccccattccttttcctttagtggttatcgtataagttttaacatgtatacttcacttttcaagttctaaagttatttttttaccctcttcctaatcaatacaaggaccttagaaccctactagtctgattttccccccaacatatatattaytatcaagtaatttagttctattttttgtgttggtgtgtatttgttatatatttgccactttattttatcatgatttcttccctttcagatcttctatttagaatcactttcctctgcttgaagttcgtcatttagaaattactttagtggatgtatgttggtatcaaacacttctaattttatggggttttcccaactttattgaggtatacccgacaaataaaaattctatatatttaaggtgtacattgtgatgttttgatatacctgtacattgcggatgattactacaatcaatctggttaacataatcatggccttacatagataaaatttcatttgcttgcatatggtaagaacacttatgataaaatcttctagcaaatttcaagtgtaaaatatgggattattaactatagtcaccatgctagatatccagaacctgttcatcccacataactgaacctttgtacattttgatcagcatctcccattttgcctgctgctcagcccttagtcactaccattctactctgtttttataagtttgattttttatattgcaaatttaagtgagattatacagtaagttgtctttctgtgtctagtttatttcacttagaataatgtctgctggattaatccatgttgttgcaaatgtgggatttccctctttttgtttttttgaaacagggcctcactccatttcccaggctggagtacagtggtgtgatcacaactcactgctcaactgatacctatgcctcagcctcctgagtagctgggactacaggtgcacaccaccatgcctacctaatttttaaaagttattttgtagagaggggttctcgctataatattgcccaggctggtctctaagtccttgcctaaagccatcctctctcgtcggcctcccagcgtgctgggattgaaggcatgagccactgtgcctggccctaggattttctgccttttttttttttttttttttttttgagatggagtctcgtgctgtcacccaggctggagtacagtggcactatctcggctcactgcagactctgcctcccgggttcaagtagttcttctgcctcagcctcttgggtagctgggattacaggcatgcgccaccatgcccagctaatttttgtatttttggtagagatggggtttcaccatgttgatcaggctggtctcgaactcctgacctcgtgatctgcccgcctcaacctctcaaagtgttgggattacaggcatgagccactgtgcccggccagattttctgctttttaaaggctggataatactgtgtgtgtgtgtgtgtgtgtgtgtgtgtgtgtgtctgtctgtgtgtctgtgtatgtgtatttctggctgtctgttccattgctctatatgtctgttttttatgctggtaccatactgttttgattactgtttagtaatgtattttgaaatcaagacatgtgggtacctcctgctttgttctccttgtcaagattattccaggtcttttgttgcttcttcatagacgaattaactgctgatttatgaacttgaatattctgatttctttgacagttagttctcattgtaaattgataaattatcactctggttttatacatcagtttttagctatggctaataacagtctttcctcacaattcatatttagcatgttggcaaaatcatattttggaacctgcaaggacataggtctctggtctatagtaaattcaagctgctaggttgtagtctgacaacttgtgtaatattttagctctggatgatattaattttttaagattattaaattttatttttcagtgttttagattgacagcaaaattgagtgggaagtacatactaatttttctgtatcttagaatttctttgggatcattttaactattttaatgttttaaattttattgtgaatctttttaaggaaggctgagctgttgctacaactgtaaaataaatattcttaaagcaggcagtgatgatcaaaatcttgccatttgaccattaagctgctagaatatgagagtgataatttaggaatgagttgattaaagaaaataacaaagtagtttactaaggaattaataatagcaaataaaaggtttaacaaacaacaataaatattctgttgatattgcaccttaactttccatcatcatcttgggagctgacttttttgctgatttcattccgataagataagttcatttgaccacgtgattattatttaatacatctactgataactctataatagaaagtggcagattttagataaagggtttgtgatttttaaggttgatattaacaggtagtatcataaaaaaataaaaagtaaaagcaatttaattctttttttttttttttgagatggagtcttgttcttgttgcccaggctggagtgcagtggcgtgatctcagcttaccgcaacttccatctctcgggttcaagcgattctcctgcctcagcctctcaagtagctggtattacaggcatgcgccaccacacccggctaattttgtatttttagtagagacggactttctccatgttggtcaggctggtcttgaactcccgccctcaggtgatctgccagccttggcttcccaaagtgctaggattacaggcgtgagccaccgcgcccggcagcaatttaattctatttgcacctaaaaagtaaagtaaaaatattaacccataaacacaaacacacacaaggaaaagactttgggtgatgagattaagcgtatttttgctgttttatttttccctgtctggattgtgtaaattttttttctatgaaaatgtgtatttgtgataaggaaaatattttttttaagatcccagaaaatactggaagaaaagaataacaatgagatttttcttttaaattttgccttattgttaaactatagaacttgattatacataaaatgaaatatgcaagccttaatttttttctttgtatgcttagaaaaggtgaggtaccttattacatatgatttttattagtttctggaggcaaatttaatttttattttaaaatcaaaatctattttaaaagaaatagttctcaaaaagacaatgatgactgggtgtggtggtgtgtgcctgtagttcaagctactcaggagacagaggcaggagaaccacttgaggccagttcagtctagcctgggtaacatagcaagaccctgtccctaaaataataaaaaatttaaaaaccacaataatgtgagttacaaaaaagtgtaacttatgaaaagtcgtatttatattgacctttgtaagagctcaattatttcaggaagcaaggaatatcaccattctgagtaatacaatttcaactaatctttatttcttctacttgaagtcagtgcctatctaccacaaacattcctatatcagtgtgcaaattaatttggagacaataggctttttacgacaatgaattggttaacttttaaaagttgttttttatctcacattttataatacgataaataaatgtacagcagatctttaagaacattgtttaactataatgttgatggcaaaaaaaaaaaatagattcccagcaggggccactgtctgtgtggagtttgcatggtctccccatgtctatgtgggttttctctaggtactacagtttcttcccatatcccaaaactgtacacattaggtgaattggtgtgtctaaatggtctcagtccgggtgagtgttggggtgtatgtgattgcaccccacaatggaatggcatcctgtccaggactgggttcctgtcttgcccctgagctgctgggatacactggccaccagtgaccctgaattagaatatttgggtaattaattgtcttacttatttttattaatctttcttaagtgtacatatagctcacatttatttcagtgtttaatattgtaagtgttgtggtctctatttagaagtttggtgatttttttttttttttttactagaaatataccttaggaacttaactcttatttatatcaattagcttatggcaaaatgagttttgttttatgtcattgttttgcttaaagttgcagtttccaagaatctatgatgtgatgtgaaaaacattactgcgttagtggtttgtggcaaaggaaaaagkatcattatcttgattctcctttttttccctaggcatttttattaccaatttgtgaagcagcagctatgagaaaagtggtaaaagtatatcaagaatggatccaacaagaggaaaaacctttgttcatgcaagagcctgaagaaattgtgatcacttcttcagacctcccttgcattgaaaatgtcacagaccatgatatttcaatggaagaaggagaaaaaagagaagaggtgaagttataagatttatatattttagtgttagtctaatagattaagagttttgcaraaacataataatgggttaacacaaatatacttattaaatgggaagataaagatatctttcagtatattttgcaacaatttaggtaatataagtagtcatctcagtaccgtatagcaaagccctgtgataccacaacttttaaaaattagtattgaggttgtatactgattctttaagccattgtctagataaaaattaggtactgttataaaggtataatatttcaaactgtggtactacatcaaaatggattttaaaatacatactttcagggggttgttattaccaaaccacagttcctcctttcctggaaggagtaactatttaggagtggctacccagcataagctacagtgtttgtgycccctccttggaatcttttgcactagagctgatttcagaatgtgaaacttcttgacttggtaaaataagttattctgtsataagaaagactagagtttactcacagcagggaaaagatgagaaaagagagagtagtagaggtggcatttgggttcctggggttccatttattcctttgattgttcaacctttgtcacaggtcagactctccaacagcagatgctaagatggagttaggagtgcagaaagtttattgaaagtgatttatctgttttgtctgatttgcctttcaccataaagttgtctgcgattgatacatatcttgctaaatctagataggaatgattgagtaatgcttattcactttagtggttaatctaacctcatcagtggaatttagtcaggatactaatgtgtggatgaataggccagttctgtagggatttgatgagcctgagcgtgtgtgtgtgtgtgtgtatacgtgtatatgtatatatacacacaaacatagagcaccctccccccttctaagaaagggaaaaatgtaactgagaaatataattgaagtaaataaaattaaccatatgaattatgaaataatatctacagtcctaattcttacacaccaatgaaaaatatcaaatttattgatatttttatgctggaaaataaacctatgagtttaaaaagaatttgttttctctgacttttttagtcatgatgtgccatatataatgagcctaccccacatcatttactattcttaaataagaatgatggataatataaactatctacatacataattgaaaaacaaacaatggaaggaatgaaaggagagaggaaagggtagattggtgatgttaggtatgttgtgtaggtttgttctattcgttactcaagtagtgtaaccagcactggctgccattagagatgtggtttttcgaagtgccagcgactcttgcaaatggtgtggaccaaacccaaaaggtataatgttctggtttacatttctgataaattcaatatataagggagtcatttaaatttttggtgttacagttataaagtggaattatgttataaattcagataattgtaaatgggtttttaattttatttattattattattattttgaaacaaggttttcctctgtcgccctggttggaatgcagtggcatgagctcagctcactgtaacctccacctcccgggttcaagccatcatccagcctcagccacccaagtagctgggactacaggcactcgccaccatgcctggctaatttttttgtatttttaatagagacagggtttcaccatgtttcccagctggtctygaactcctgagctcaagtgacctgcccacctcagcctcccaaagtgctggggatgacaggcgggagccacagcccctgacctaagtgggcttttaaaattctcatagcatctgtgagacatttgaaagacatacagaatacaagacagtttcttttttgtgtgtaggactgtcatgtgctgtgtaggatgcttagcattctctgtcctatttcattaaattccagtggtatcttttatttattgtgacaagaaaacactcacaaatttcaaaataccatacaaagcttttggttgcccacattgagaacaagtgttggaggtagaaacatgagcagacattatttctaccttcacataacttctggtttagctggaagacaaacatacaaaataagtattattataaaacagtgttactgctatgatcctagagcatgaaagagagaacacctaactctgcttggggaaatcagggaatgcttcatggaagagatagtataagataaaagaacaggtagacaaatgggaaaggtaacacaccgtgtgaatagcacctgcaaatgtatgagaaaccttgaaaatatttttatttggctgcagcgtagagtagatgagacagaacagcaggaaatatgagatagacaggactagattctgttcagtaacttgtatgccatgttagtaggctttaattacattctagaaactggaaagcctttgaataagagagtagcatgaacagttacatacttgagaaggtcataccaggcccagaatggaggatagattgtaggtcagtctgtaggcaaggagaccagttaggaaggattagcaaagtttggaagtgagatgataagtacctgatctaggacagcggtagttgcagtggaaatataagggagaggacagatatactagtgtttttgaggaatggggaggtgtcgcaagtttctttcttttgcaaccagagtagttgccattcacacatggatgggaattttaaacagctcaagtttggtgatggctaaggcagctggagggattgggttggcaggaattggggggaatctgattaataaacttattttaaaatatctgaagtttgagatgcttgtgggtcattcaggaagggctcttcagaagacacttgattacagggacatggagcttaagagaaaggctagactagaccatggcatgttttattggctactcagggcagggttccagtactgtttctggtaatggcagaactgtttgtattggactaaaccttttgcatattacaaaccctatacaaaatatttttgtaaaacttaactatttaaagatattggtgaatgacaagaaggaagaaaatggagggacactttaaaaagagaactgcagagtggcatttctgtttgtactttttaactgagggaactcccttgtctgtaagacttgttacagctaaaatgcaggcagaaagctgtagtctcagtgatttgaagtttcagtattctttgaataatgagaattttagtactcctaagtaggataaacataagccatttttttttgtcatttatttgaattctggcatttaatttagaacagaattcatctttttacaaagctataggtagtataatcccattcttgagtgtgtgagagtatgaaagggaggtttatacattagacctatagaagaatactctctggaatgatataatctctggctgctcattatgggttttgttgttgttttttactttatatttttgtcattgagaatccttttttacagtgaatatacattgtttttggatttggataagacatcatctattttgagagaaagaaacctgtttagcagtgggacctaacaatttcatttaccttttcaacttaactgactagttgcagcattcttagtaatgaaatattaaaaacttgatattttgcttcaggaaaatggraccaatactgctgatcatgttcgaaattccagttgggcaaaaaacggctcctaccaaggtgctcttcataacrcctctgaagaagccacagaacaaaacatacgagctggtacccaggcagttttgcaggtggatcactttatggctatttttaaaaataaaataatcattaaatatttctgttcagtatttcagtatacagtatacttttcacaatataataaattcaccacctatatttatcattatgccatattttattttttcctttcatcacttaatatatatattaataaacattacatattattctagataattttaaatgttatataaattatgttatggtgtactgtcatctgcaactgattttttttattagccattctgtttatgagatttgttgttactatacagccataattcattttaactattttgtggtattgtactttatttcacatttgacttattcatttttctgttgatggtcttttgtttccagtttttcactattccaaatagtactacagtgaacttttttttttttttgagatggagttttcgctcttgttgcccaggctggagtgcaatggtgcgatcttggcccactgcaacctctgcctccagggttcaaatgcttctcctgcctcagcctcccaagtagctgggattacaggcgcgtgccactatgctcagctaatttttgtatttttagtggagacaaggtttcaccatgttggccaggttggtctcgaacctcctgacctcaggtgatccacccgcttcagcctcccaaagtgctgggattataggtgtgagccaccatgcctggctgtgaacattctttttttttttttttttttttttttttttttttttgagatggattttcactgttgttgcccaggttggagtgcaatggcacgatctcggctcactgcaacctctgcctcctgggttcaaatgattctcctgcctcagcctcccaagaagctgggattacaggtgcccgccaccacgcctggctaatttttttgtattttcagtagagatggggtttcgtcatgttggccaagctggtctcaaactcctgacctcaggtaatccacctgccttggcctcccaaattgctgtgattataggcatgagccaccacgcccaactgtgaacattcttatacatgtatttttatatgcagctgggaaaatttccctaggttatataccaaaagtggcattactgagttgtaggatttgtacattaataactttactattatcgcccaattgttctccactttgtcagaataatttacattccctctagtagtgtttgggagttctcatttccttatgttctccctattacttgtactgtcagattttaattttttgctggtcctttatatgtgaaatattgtctcatttttaaaaaaaagtttgtgtttttccattttaatttgcttttccttcatcagtactgaatttgagcatcttttcttatctatgaattcatatgcttttccattattttgggtgttggtctttctcttaatggtttgtaggagttcattatattcattcacttttttttttttttttttgagatggagcctcggtctgtcacccaggctagagtgcagtggcacaatctcagctcactgcaacctctgcctcccaggttcaaccaattctcctgcctcagcctcctgagtagttgggattacaggcacacgccaccatgcctggctaacttttgtatttttagtagagatgggtttttgccatgttggccaggctggtcttaaacccctgacctcaagtgatctgcctgcctcagcctcccaaagtgttgggattataggcatgagccactgtgcctggccaatcattcactttttaaatcaaaatgtccttgtcaaggccacatgtgacctctacattgttaaatcagatgtacattttttcattcctaatcctgcttgatttatcagaagcatttacagagtagatcattccttccccattgaaatgcttctttgcttggcctccagaatagcatatcctcctgtttcttctcacttcattgtccacttcttaaaacagattctttcactgatttttctgtaaagccctgaccttttcatgttgaagtgcccaggaatcagttcttgaatctcttattctcttgtctcatacatatagatggctttaaatatcatctgtatgctacagcttcagatttttatatgtagtctaggatctctcatctgaattctgtgaatccttaactaaaatattcaaatatcaaattgtcattttcacttggctatctaataagtatctcaaatttgagtgcttttcctgcagtcttccttgtttcatttactggcaactctgttttccatttcccttaacgtttgtctaatttgatgacaaatcctgtcagctctcccttcataatgtgtacagaatctgactactgctcagcacacacactacctcttgtgtctaagtttctctctctaatctttcatctgtaatattgtagtaaatttctaattagtctccctgcttctgccctgcccacctgtcactctgctctggccagagggatcctgtaaaatgtaagtcagattatgtcatttttctgctcagaaccctccagtgactttccattatcactaggcagcaatgcagaagtctttataatggtctataaggccatcattgctcctcagagtgtggtgcatagactagggctggcccacagcataactgcaaaacagagtaaaactttagaaatgaaataatttaatatctcttgattctgttaaaaaatttgcatttgaattttgtcttactcttttttcatttccttttttctattcatttttcccccagttgatagtctttatttttattttttattattccatgggttattggggtaccagtggtatttggttacatgagtaagttctttagtggtgatatgagattttggtgcacccatcacctgagcagtatacactgcaccctatttgcagtcttttatcccttgcccccctactacccttcccacaagtccccaaagtcccttgtatcattctcatgcctttgtgtcctcatagcttagctcccacatatcagtgagaacatatgatgtttggttttctattcctgagttacttcacttagaataatagtccccagtctcacccaggttgctgcaaatgccgttaattcattcctttttatggctgaatagtattccattgtctatatgtaccacagtttctttatccactcgttgattgatgggtatttgggttggtaccacaatttgcagttgcaagttgtgctgctataaacgtgtgtgcaagtatctttttcatataatgacttgttttcctctgggtagatacccagyagtgggattgctggattaaaatgacagttctacttttagttctttaaagaatctccacaccattttccatagtggctgtactagttcacatccccaccagcaatgtaaaagtgttccctgatgaccacatccatgccagcatctagtgttttttgatttttttttttttttattattatggccattcttgcaggagtcaggtggtatcgcattgtggttttgatttgcatttccctgatcattaatgattttgagcattttttcatgtttgttggccatttgcatatcttcttttgagaattgtctgttcatgtccttagcccactttttgatgggatcgtttgttttttttcttactgatttatttgaattcattgtagattctggatattagtcctttgtcagatgtctagattgtgaagattttcccctactctgtgggttttctctttactctgctgactattccttttgctgtataaaagctctttagtttaattaagtcccagctgtttatctttgtttttatactgcttttgggttcttggtcatgaaatccttgcctaagccaatgtctagagggatttttccaatgttatcttctagaattttcattgtttcaggtcttagatttaagtccttaatccatcttgagttgatttttgtataagattagagatgaggatccagttttgttctgctacatgtggctaacctatcatcccagcaccatttattgaaaaggtgtcctttccccactttatgtttttgtttgctctgtcgaagatcagttggctgtaagtatttgggtttatttctgggttttctattctgtttcattggtctctgtgcctgtttttataccagtaccatgctgttttggtgaccatggccttacagtatagtttgaaatcaggtagtgtgatacctccagatttgttgtttttgcttagtcttgctttggctatgtgggtccttttttggttccatatgaattttagaattgttttttctaattctgtgaagaattatagtggcattttgatagagattgcattgaatttgtagatcacttttggcagtatggtcattttcacaatattgattttacccatccatgagcatgggatgtgtttgcatttgtttgtgtcatctgcgatttctttcagcagtgtttcgtagttttccttgtagaggtctttcgcctccttggttaggtatattcctaagtattttatttatttatttatttatttgtttatttgcagctataataaaaggggttgagttcttgatttgattctctgcttggttgctgttggtgtatctcctgttttgtttcttaatgagcttatttgaattttctctcttcttggttaatctttctaagggtctatcaattttatttatcttttcaaagaactagctttttctttcatttatcttttgtattttgtttgttgttttaatttagttctgctctgatcttggttatttcctttcttctgctgggtttgggtttggtttgttcttgtttctctagttccttgaggtatgaccttagactgtcagtttgtgctgtttcagtctttttgatgtaggtttttagggctatgaactttcctcttagcaccacctttgctgtatcatagaggttttgatagattgtgtcattattgtcgttcagtttggagaattttttggttcgtttgcttatttgtttgtttttgagacagagtttcactcttgttgcccaggctggagtgcagtggtgcgatctcaactcactgcatactccacctcccgggttcaagcaattctcctgcttcagcctcctgagtagctgggattacaggcatgcaccaccatgcctggctaattttgtatttttagtagagacggggtttctccatgttggtcaagctggtcttgaactcccacactcaggtgatccgcccgcctcagcctcccaaagcgctgggattacaggtgtgagccaccgtgcccagccagaagaatttttaaatttccatcttgattttgtttttgactcaatgctcattcaggagcaggttatttaatttccatatatttgcatggttttgaaggttccctttggagttgatttccagttttattccattgtggtctgagagagtgcttcgatataatttcaattttttaaaatttattgaggctcattttgtggtttatcatatggcctatcttggagaaagttccatgcactgttgaatagaatgtgtattctgcagttgttggatgaaatgttctgtatatatctgttaagtccatttgttccaaggtatggtttaaatccattgtttctttgttgtctttctgtcttgacctgtctagtgctgtcagtggagaattgaagtcccccactattattgtgttgctgtctatctcatttcttaggtctattaataattgttttataaatttgggagctgcagtgttaggtgcatatatgtttaggattatgatattttcctgttggacaaggccttttaccattatataatgtccctctttgtctcttttaactgctgttgctttgaagtttgttttgtctgatacaagaattgctacccctgttcgcttttggtgtccatttgcatgaaatgcctttttccacccctttacttatgcgagtccttctgtgtttgktgagtctcctgaaagcagcagatggttggttggtgagttcttatccattctacagttctctatcttttaagtggagcatttagaccatttacattcaatgttagtattgagatgtgaggtaccattccattcattgtgctatttgttgcctgtgtaccttggttttttttttttgttttcgatttttaaatcgtatttttgttttataggccctgtgtgatttatgctttaaaaaggttctgttttgatatgtttctaggatggtttcaagatttaaagcaccttttagcagttcttttagtggtggcttggtattggcaaattctctcagcatttgtttatctgaaaaagactgtatctttccttcatatatgatgcttagttttgctggatacaaaatatcttggctgataattgttttgtttgaggaggctgaggataaggctccaatcccttctagcctgtagggtttctgctgaaaaatctctgttaatctgacaggttttcctttgtgggttacctggtagttttgtctcacagttcttaagagtctttccttcatcttaactttagataacctgatgacaatgtgcctaggtgatgatctttttgcagtgaatttcccaggtgttctttgtgcttcttgtatttggatgtgtaggtctctatcaaggccagggaagctttccttgattattcccctaaatatgttttccaacttttagatttctcttcttcctcaggaacaccaattattcttagatttggttgtttaacataatcccagacttcttggaggctttgttcatattttcttattcttttttctttgtctttgttgtgttgggttaatttgaagaccatgtcttccagctctgaatttctttcttctacttgttcaattttattgctgagactttccagagcattttgcatttctataagtatgtccagtgtttcctgaatttttgattgctttttctttaagctatttaattccttgaatatttgtcccttcacttcttgtatcattttctggatttccttgcactgggctttgcctttctctggtgtgtccctgattagcttaataactaacctcctgaattctttttcaggtaaatcagggatttattcctggtttggatccattgctcgtgagctaatgtgattcttgggggtgttaaagagccttgttttgtcatattaccagagttggttttctggttccttctcatttgggtaggctctgtcagagggaaggtctaaggctgaaggctgttgttaagattcttttgtcccatagagtgttcttctgatgtagtactctcccccttttcctatggatgtggcttcctgtgagctgaaccgcagtgattgttgtctctcttctgtgtctagccacccagctagtctccccggctccaggctggtagtggagtttgtctgcacagagtcatgtgatgtgaactgtctgtggttgtctcggccatggataccagcaactgttctagtggaggtggcagcaggtgaaatgaagtctgtgaggtttcttagctttggtggtttaattctctgtttttgtrstggttggcctcttgccgggaggtggcacattccagagagcatcagctgtggtagtatggaaaggaactggcagtggatggggccctagatcttccaagagcatatgtcctttgtcttcagttaccaggatgagtagggaaggcccatcaggtgggggcagggctaggtgtgtctgagctcagactctccttgggtgggtcttgctacagctgctgtgagggatgggggtgaggttcccaggtcaatggagttgtgtacctacgaggattatggctgcctctgctgagttatgcaggttgtcagggaactcagggaaagccggcagtcacaggccttacccacctcccaagcaatctgaagggccagtctgtctcccaccatgcccgccctaacaacactgagtctgtttccaggcagtgggcgagcagggtttgagaactttccctgggctaccttcctcccagctgtgaaagaaatgggctttggttcttcccctgcctgtggagtctgcacaccggattcacaccctcctttgagttctggccaggaggcttcttgcctggttcaaatttttacaaagttcatctggagacttccttctccctgtggcattttccacacgcctctggccaccctcccaaaggatccctgtggtgccaggcaggaatggcctgcctggggacccagcaagctcccagggcatttcctactgcttcctctacccctgtatttccctcggctctctaaatttactccgctccaggtaaggtcggaaatttctcccacaaactagaccttcagtttccccaatgggtgtgtgttttcgggagagaaggatctccatttcccacttctgccgtttgggcactcacagcatttggagtgtctcctgggtcctgcaggagcagtttgcttccttcagaggtctgtgggtccttttgggattcctggtgtttgttcttgcagttgttctggaggtaaaattcatgatatgagcctccacacgctgctctgtctgtccaagtcggagctgcaatttagttctgcttcccgtcagccatgatgatctctctcccaatctctgttcatttttcattgtattttaaaataggattgatctgcaaaagtttggggctggggaagacctgttctttcactacaggtagtgtgagaatctctgctccacatactctggctgtttttcagcatcatcttccactgcttttcccctggtttacttcactctgtactccttgccgttcctcaagcatgttaggcaggctctcacctcaggtcctttaaacttgattttcctctttttctgaaatactattctcctagacaggaacgtarctccatttgtcttttccttttcagtttgctgatacttattctctaccacccactcttccttttatgcttactgggcccctcagatccatgggatgagagtgagcacccttgtcttattcttggctttttgtggtatttctcaagttctattactatgtatatacttttttttatacttttttataaatgctcttttttatttcaatgaatgtgtgcttttttcttagtttgctaaaaattgttttcagtcataagtgttgaatgctttttctgcatacatagtgataatcagttttttccattttaatattttgatgggatatagtaatttttctaatggaatcttctgtcaccaaaacagatatacaaacataaaaataaataagaaaaagaggataaaatgttttgaacaactcattcagaaaattcttcctgatttaggtgtcatcttttattctaaactatgtgtatttatttttttttcaatttattatagcaatagagttattaaagcttctcagtttagaagtactgtgttttaggccaggtgcagtggctcacacctgtaatcgcagcaatttgggaagccaaggtgggcagatcacttgaggccaggagtttgagaccagcctggccagtatagtgaaaccctacctctagtaaaaatacaaaaattagcctggcatggtggcacacatgcctgtaatcccagctacttgggaggctgaggcaagagaatctgttgaacctaggaggcagaggttgcagtgagccgaaatcataccgctgcattccagcctgggtgactaaacaagactctgtctcgaaaaaaaaaaaaaagaaagaaatactgttgtttgcacttggtttattttctttgggtacctactattaactttatatttgtctaggtaaacataaaaataggtaggtttaatgagtttatgtttcagttattaagcttgtagaatttacccacagtgtgatcagtgtctgtttctstttgaataagaaatttgccattgaaattcctttgtgaatagctaatgatttcttttgtcttaggtgtttattataaactcatcaaatatatttcttcttgaacctgcaaatgaaataaaaaatcttctggatgaacacacagatatgtgtaaacgcattcttaacatttatcggtacatggttgtacaagtatcaatggacaaaaagacttggtaaaaaaatttttatcctttatgtctatgtgtttttattgtgtacacaggtatagtaatttttagagaaatagtgtctgtgaagagggtttgtttacagtattatagaggctcctattattgaataaatataaaattaatcatagtggcaatagttcctttcagcttatctgaaactttgttcggacttccgcaagaccccttggactgtcttcctgaagtgagcatataatggcctcatcctcctcaacccctaaggaaagaatacatgcatacaaatgtatatgagtaaatgaagtttacttgtgtgtgaatgagttaatgaataagttgatgattgactgaatatgtgaatgcctgaatccttaatctggcattcagagctgtataccgtcaggccctgcctacttttcctgtctgaagtctaacctccagctttcaggataagatcctgcttcccagctttatcaagttgttcttccctgggcaccttctgaactttcctttagaatgtctaattctgctgtttttcctgttgtcaccgtaactgtcccttagattcaccttcctgtttctacatatccttacttaaattttttcttcacttgtttccattctatatttgtacttctgtatagttcttgtgaaaactgtcttgatccctaaaatacttgtgtaaatatctgtttaccaccatagaactgagaacccctagaaggtatttactggttttcttatttttatatttcctacatttcttagtatagtacattatatatcattggtgctctataaatagttgtctaattgattggaaaaatagaccttttggggagatgggaaagtggttctgcagtttttgtaaaaatgaaatgtttatcataaaattcaaacaaagaaaagtttaaaaaagaaaaaagctcaaaggttcactctctagagatagtagtgatgtttgtcctttggtgaatatctagctcatcaaaccacacacacagttatatagtattatactatatatatatatatatatatatatatatatatatgccataattttcttamccagtcctgtactgatggacatgtagttatttctctctgttttgaggcaaagagaggacaatgaacattcttatatgtattttattttcctctacatgtggcaaaacataaattaggtatatgctttgactaagtactcctaattttttttaagaaagaagactacttagtcaaagcatatgcctaatttatgtataaaatggctttatattttgaaaagattctttactaacagtattaatagaatggcatatagatgtagttattattattaacacatttgggacacttatttgtgccacatagctttctaagcactttacacatattttcttacttaattcttacagcaccctatgatacagataatactgggaagttaagtaacttgtccttgttcacacagctgttaagcagtggacagagatttgaactacggtttttctgacttcagagcccaagttattattagccaataactacattggacaattatcttgttagtccttttttttctttctgtatactttgaatcattgatgagccagattatagtgactgacttgctatgtagaaaacaattttagaatttttttcttaatttttaaacttcccttgaagtaatagcattttgggaggtttttcatatattttacattgaatttttatatagagagagatgtttcgccttgttgcccaggctgttcttgagctcctgggctgaagcgatccacctgccttgaccacctcccaaagtactgggattacaggtgtgagccaccacacctggccagaatttataaaactttattaattaaaatcatttttattgtattacaaagtgaaaatattgtatgatttatgagtgagttatggtttgacagcaaataagatttatttggaaaatctatgctttattgcatttgtagttgatttcaaatagctttttatttcatgtagctaagctagaagcataaggttacaaatgtggcacctttgatttttattccgtgaataaatgcatgcatttgtttgctaatacgtccaggatatttttaatgtagtgatagttttctgtttgattctactctgacttctcagaagaaccatgacatctagatctaggatctgttgccgcccctgccacatttctcacagtgactgttccacgtatcgctatgcctggaakggacttgcaaaataaccagaggggaggaggctgtgatagagaattgggctgatacacccaactgaaagtccctttagcctctttttcatatgtggttgaatcaagttttgaagtatcagtgtaaataaggtagttttatggttttaataataagcatctaagagaaggaggcaaggtaaggataataatagaattggtttaacttgcagtacagacaaaaaaagattaaaaaactgcataatgaaaagagtggaaagaaacaatagagtaatggcccttgattaattatcaagctcactgcagactcaaactcctaggcttaagtgattcgcccacctcagcctcctgagtagctgagactataggcatgtgccaccacacccagctaatttttttttttttttgagagacaaggcttgctgtgttgcccaggcttctttgtgatctattaattaagatgtcatataatttctgaaattgagattggtatgattctcaatatgtagttactcaacatattataaagatggatttgattgatttgatatagttattctccatattataaagatggatttgattggattccatctgggtagaactatattgtgtagatgagtgttcttcagatagctccttaaggtcactacttaatttgtggttgcggagacgggagcattctccacattatcacttccagttcctcagcttttgaataggtttttatttgatgagaggatattgtggccgataaatgattttaaatgattgatgtagatacataaaatgtaattttaatttttaatatttaaggaactctaaacatttgaaattgtctttcaaagatgtttaatatttgaatttttataagaagtatgtatttgaaagttaactattaaccaaatgcaaacatatgcaagaaggaaacattaatcagtctttttattttaagggaacagatgctgcttgtgttgctcagagtcacggaatctgtactgaagatgccatcacaagcttttctacagttccaagggaaaaaaaatatgaccttggcaggtcgacttgcaggaccacttttccaggcaataaaaataaataaatagatgaatagctggatagatatgggttgttttgttttgttttgttgtttgtttgttttttaaaattcattgaaccctgaacttgttaccagaaaaaaaagttttaaattagagattatttcttayttattaagggatcttttgtagagctaacttaaaagttgctcatctaaataagctatttgccatacataaaacctagtataagagtggaggtaatatcaggtctgtgaacaaacaggctaatgatatttattttatctcttgtgtagtatacataatatgtggttgcaaaaacctggcagtgttttagggataatgacctgactgctttatgagtttccgtatctctgggactgctaggaaaaactgtctttttatgttattctgtaataatgaaaaagtaataaataattaagattgattcttatcatgcttttttttaataagactttattatcctcccttctcagttggtggtagtttgattacacaggaattctatattgtgttttttaaatctgaggatagagtgctgactttaaatgtattatggattctttgaaaaaaagaaaacaaaaaatttttttaagatgatacatgaaatacaaatacatgattcttaatgtcaagggtaaaagctgtctcagatctaattcttggccaagagtagccatttaaattggttggagttttttttcatatattagccatttacctaaaattatatgctggtgttgaacagtcctttaaaaccagctacatgtatcatctaaactcctcttaacttcattagccattttttgttttttcattcaggtttctccattgttagagctaacccgatgatgggagctacaggaagataaaattttatcttgctatgtgaaacaacttttttatagtctgagtattaaagtagtcttttttttgtattaaattaaagatagattgggaggtcagtagttactatagttctgtacctaaactctgttcattttcatctttacatttcaggtataaatttatgtgaattcctttctaaatgttgtagaattaagcttttgagaatcgttattttatgacttgtttcttcaatcagaggacatatctttagtagaaatccacaaaatctcagggggtacttactggctaatccatttctgtccttttatgaatttttttatcctgtgatcagatttattacagaatgcttttaatttgttgtgtttaaaaatatttaatttcaacctttagtttatgtatacattttcaaaactacatttcattaagttaaatatgtctctagtatgttgtttctttatattattaaaaaacattttcgagttgtagttagtgatttccatccttaatttgggaatgtaggttttggctttttagttcagtaactcaacattttcaacacttaaaagtatggagactattttttaaatagcatttatttaacattaatataatgcagcataagagacagttataaatttagggagatttctttttagattgctgggtgttgggagttggcagttgttgaaatgaaatttatagtagattctaatgattgcatgaattgcttttacaagtagtattatctattaaaaaaagcatgcgattttaaatgttgcttgtttttaagtaatttttttaagaattgaatgtctgattttgaagtcacacactaaacacattttattgttatttctgatatttgtctttatagacccttatagttgcctggatcaaagcaaacctaaatgtgtacatctcccgagaactttgggatgacttactgtcagtattgtcatcgctgacctattgggaagagttggccactgagtggtcactgactatggagacattaactaaagttttagctaggaatttatatagtttggatctcagtgatttaccattggataagctgagtgaacagaaacaaaaaaagcacaaagggaaaggtaagaattgttcatagagatgctctatataaatttgtttaaataattgagtcagggaaaaccattccagggagaggggtgagggtgaaataagtagaatcttaaatattttatttttaagaattaaacaaaatgaaaatgtataaaataccattcctttttatcgtaagcaattttttcttagaactgagaaggtggtttaatgttactctatttaaaatgtgtacaataattattttaaaaattgtttttgaaagcacttacttagttttaactaaaagcaaacattccctagacatgaaatatgtatctgtctaatgttaaaagggagtggggcagtagcctaatgattatatcattaatatatgtttttaaaatcctcagttagttaggattttgctttttttttttttctgagacagggcctcactctgtttcctaggctagagtatagtagcacagtcatggctcactgcagcctcgacctcccaggctcaagggatccccaccttcagcttcccaagtagctgggactacaggccaccatgctcagctaaatttttttgtttgtatttcttatagagacatggtttcaccatgttgcccaggctagtcttgaactcctgggctcaaacaatctgcccacctccacctcccaaagtgctgggattacaggtgtgagttactactcccagccagtattttgcattgttaaatattagttgctagctagagtttacatctaagtcacatttcatacttttgtccagggtattatgtactcaaactactttttcctggactatatttcccaagtggctattattggcagattagagatttagtaatcatcaccacaggatgggttttgtttagcacctttcctgtcttttttttcttgtctaaatgtttcatttttattccaaagcaagtgggtggcagagaatttctaatagcttattgctaatggtgtaattttaaaattgcgcatcagttttggaatatgatttatacataaagtgaagctcataaaagccttacagtacacagcgttttgtcttattactttataatttatgtgagcaaacctaagactctgaggcaaggtagcacgcataacttgaagatattattgatcaagtaacagtatattgagattgaaaatctacatttccaggagttggacatgaatttcagaaagtytcagttgacaagtcattttctagaggatggagtcgtgatcagcctggccaagccccaatgagacagaggagtgcaacaaccactggttctccaggaaccgaaaaggcgaggagtatagtacggcaaaaaactgtcggtatgtactcttgaaaatcatgagaatggtacagggcactacatttatagtcyttggtaacaatttatatcaatataaatttttcttaccagttgattattgttgtgaaatgaaaaactgctatagcaaagccttttttccagaagtactcagagtctagtgataggctgttatccctttatgctattaagatttattggacattatttttatgtggtttattttactgtagagagccctaatattaaaatgttattttacrgaattgaagaagtagaactgtgattcactttacagaactcaagcattaactgatgtggtttcattgaaggaatttactcacaaatatggaaaattagggtagctaatttcctgtgctacaattatatagtagattagtttcacagacttccaacaagaatctcattttctctgctggcagacagctaaggccaacatggagtctgttactgagtttcttgctgcttttaacaaaaaatggaagaaagttctataacctgggaaatagcagcaaaggaacaacgttgggaacaatttctgggcataaaatcgcacagtgtactgtggaattagctaccatctcattcctttttctcagaggtttataaacttggctgaattatagtagaaaaagcactgcaatgagaaataaggagggctttttcctaatctcttttcttactctctttgatcactaaataggtaggtaaccttggacagtctaccaaacgtttctaggctttttttaaaagagagatctcgctctgttgcctttgttggatcatagctcactgcagccctggactcctgggctcaaagtgatcctacctcagcctcccctgagcctcttgagtagctaggactacaggcgcctgccaccatgccaggctaactttatttttcatagagacagggtcttgctatgttgcccaggctggtcttcagttcctggccttaagcagtcctcccactttggcctctcaaagtgctgagatcacaggtgtgagccatggcacccagccttttctaggctttttaagtacttcatctgtgtagtgggaatgataatactgctcattcctgaaacaaaattgcctgaagttattccaaggtttacaatcaatgcttctatgaaaagagaattttccatgggaatgtatccgtatttaatggtaatcagtgaaaaacactattaattttaaagaaatgtaaagccattattktaaggatacatcttgtataaaaaattaggttctaaagtgttaagaattatggtttgaaaggaagaaacaactagaaagaaaataagagattaaagattttaaaagaattaaaatacatggttaatgtaaaatcctttaaaaggatcacatattcagaattgtcttatgcttttaaaataagcatagaattacattaattgtatattccaagctagaagaataagacaagatataagggaaaaagttattgtagtattaaaatgaatataatgggaattttactataaaattactttttggaatcctaaggaaaatgattatatttgaaatgccttccttcactttatattaatgtcacaattatagaaaatatttgtgtattaagaattgttggccgggcgcggtggcttacgcctgtaatcccagcactttgggaggccaaggcgggcagatcacaaggtcaggagttcgagaccagcctgaccaacatgctgaaaccccgtctgtagtaaaaatacaaaaaaaattagccaggcatggtggcatgtgcctgtaatcccagctgctcgggaggctgaggcaggagaatcgcttgaacccaggcggcagaggttgcagtgggcagagatcaagcctggagcgacagagggagcgacagagggagcgacagagggcgactctgtctcaaaaaaaaagaagaaattgttcttttaagtctaaatttttattttatttaaatcaaatctttttttaaaagtacatttttttctgattatagaagtaatttatgcttagtgtggaaagttacatttagggaagcataaagacccattagctgtctaatgagaagtaatcattgttaacatgttggcgtgtatctttgtagtcttttacatagcatgtaatgagtaaaatattcatgctgacttcatagctcatagtgattactttctagttgtactaatgtcaaaacagttttgtctgaaccgaacaagcctatcaaagttaaatccttaaaaatttgttaagaaaggtagctgcatgragttataaaaaggggcagcagattaaattaggatgttctttgggcatatttttaaaattttttaacattacttttttttctttctgagacagtcacccaaactagagtgcagaggtgcaatcccagctcactgtaacctctgcctcctgggttcaagtgattctcctgactcagcctccagtagctgggattacaggcatatgccaccacacccagctaattttgtatttttagtagagatgggatttcaccctgttggccaggcttgtcttgagctcctgacctcaagtgatccacccaccttggcctcccaaagtgctgggtttaacattaatttttccagcctgggcaacatggtgaaactctgtctctaccaaaaaaatacaaaaaaattagctgggtgtggtggcgcatgcccgtagtgccagctacttggaggactgaggtgggaagatctcttgagcccaggaggttgaggcagcagtaagctgagatcacaccactgcacttcagcctggatgacaaagtgagaccctgtttccaaaaaaaaaaaaaaatccatttttttatagttatttatttatttattttttgagatggagtcttgctctgttgtccaggctggcatgatctcagctcactgcaacctccacttctaggttcaggcaattctcctgcctcagcctcccaagtagctgggactacagacacatrycaccacgcctggctaatttttgtatttttagtggacacggagtttcaccatgttggccaggctggtgtcgaactcctgactttaggtgatccgcccacctcggcctcccaaagtactaggattacaggtgtgagcctctgtgcccagcctttatgtttttcatgaacgtacatggttaaaaatttagactgtgattaagtgtatacattgtagtaagtctccctcatcactattccccaccttcccatttcacctcactagaggcaaccattattaccagtttcttgagaatcctaaagatactttatgtcgatacaggcttatagcataacatataaaatcttgtgaatcatggctttacatatgtgaatgaaaaaaaattcctttaagtactcactatggaattgctgttctatgcattaaggatatagttgtgaacaaagcaagtaaattccactggagctgacaattctagtgttggggaagaaatataataagcaaataaaccaataaacatgtcaggagttagtaaaggtatgaagaaaagtcaatcaggttaaaggaatagaaagtgttagagctaaggacataggacgactgttttaagtagggaggtcagggaaagcttattctatcctataagaacaaagacctgaatggagaaagcgcattccaggcagaaggaaaaataaaagtcccagagctaggaatatgctctagggcttttgagtgtttgaggaggagtaaggaaagaagagagcgttaggagataaagtcaagctatagtgatatatcttaaagattattatatatcaaaaaaatgttggccaggcacagtggctcacacctgtaatcccagcattttgggaggccaaggcaggaggatcacttgaggccaggggtttgagaccagcctggacaacatggtaaaaccccgtctctactaaaaatacaaaaattagctgaccgttgtagtacacgcctgtagtccctagtcccagctactcaggaggctgaggtacaagatttgcttgaaccaggaggtggaggttgcagtgagccaagattgtaccactgcactaggcagagcgagactcttgtctccaaaaaaaaaataaaataagttggaacttcctgtatcataattacgtggaagtactataaaatttaacctatgtcctgaagatgaatatacattttataattttgtgctattaaaaatggtgtagaataggctgggcgcagtggctcacgcctgtaatcccagaactttgggaggccgaggcgggcggatcacctgaggtcaggtgttcaagaccatctggctaatatggtgaaatcccatttctactaaaaatacaaaaaattagccagcgtggtagcctgtgcctgtaatcccagctactcgggaggctgaggcaggagaatagcttgaacccgggaggcagaggttgcagtgggccgagatcgcaccattgcactccagcttgggcaacaagagcgaaactccgtctcaaaaaaaatggtatagaatatacttatgtattcttctatattttgtgcatatatgcaagtatatctataggttaagtctgtaggatatgaaattaatttgccctctaaagagaggaacctttgtagccttaatagatttaagcaaggatcattagtagatatcaaaaacattaatgtgtaaaggattgcttkggaagaggatattcacttgttgccaaggattctcttacagattatttatatttgcaaagggtaaatatacctttacaatggagggacctggaatcaagcctatatacctaacttctagtttatagtatatataggagatagaagaacaaattaaatgaccccaagagaaaataattaaaattagaaggtagtacatattatgagacaactggtctagcctcttcaaaaacacagtatcatttttaaaaagttgaggtggggtctgttttaggctcaagagacaataaccaaatgcaatatatgaactcccatggaatcctggtttgaaaaacataaaaattattttggggatatcttggtaactttgaatatggattgaatatcagatgatattatggaatttttgttaattttcttaggtgtgataatggtatataggtatataatggtatataattttcttaggtgtgataatggtatatagaaggatgatcttacctgtagatgaatcctgaaatatttaggggaggtatacctgtttacattgcaatagtctttttttttttttttttttttttgagacggagtctcactctgtcacccaggctggagtgcagtggtgcgatctcagctcactgcaacctccgcctcctgggttcaagtgattctcctgcctcagcctcccaagtagagtagctgggactataggcgcacaccaccacgcctagctaatttttgtatttttagtgagaaggggtttcaccatgttgaccaggctggtcttgaactcctgacctcaagtgatccaccctcctcggcctcccaaagtgctgggattataggcatgagccaccatgcctcaccatcttttaattttttctacatttgaaaattttcttaataaaaaattgggaagaaaggggctttttaaaaagtcattacatgactcgtattgccagcaacatagtgaacttgatattctggagctattagatattcttgctagcatttcgtcgtaccactggtttgcaaatagagaaacctctaagactcttcttactcatttccttgaccaaaataaaactatgagtggaaaatggagtgatgagcagtaagcacactggaaaagtgggatgatcttgaagcaaattgctgataatcacttctgggattcagactgagacttgagcaagcttcaaggttggatgactgaattgaagacttccatgttaaattggttatcttgagaaggatacaagttaatttcaggtcagtaatgcttcctgacagttgtacaagcaaacacaaattacctctggagtaattcactctcagttaggcctccagaaattccacagattagaatcaaccaaatatgagttcacaaagattattcagtaaacatggaaacaaattatgtaaatgagttagcaaaaaagagagagaaaatttagattccttaagattttaatccctaatattggaataaatattatggaataaataaataaataaccagactataaaataaccatgtttgaaatgtttgaagaggaaaatgataagctcattaaaatgattaaaaagaatcaaatagaactttgagaaataaaaacataattcctgaaagaaaaaaaaacaatattaagcaacacataagatataaataaagagagaatcagtgacttggattagaaatttgaggaaattacccaggacattgagacgggaaatgtgaaggagagggtaagaaatttgtagaacaggatgagagggtctgatgtgtctagttggaataccagaaggagagaatgaaggagaggcagtatttcaagaatgacagagaatttattaaagctatgagtctatagaaacagaagaacataatataccaaatgagtaagtagaagcccgtacttaaacacactgcagtgacatagcagaatggaaagacaaagaaaagagcataaagactgcaaagagaaaaaatgcataatctgccagagaaaaacagttatgctgaaaacagtgttctcagcactgacaatggaagactgaacagcatgataatatcttcaaagtgctaaggaaaaataactatcattatagaattgtgtactgaccaaactttcaaatggagggtaaaacaaagacaaaagcttaaaatactttgctatggattgaccttcatgaaataacttctaaaagaatatgtcaggaaaaaaaattaccccagaattaaagtccgagatgcaagaaggataaatgatcaaagaaagtcgtaaatgtgtaggtaaatctaaagagatattatctgaatatagtaattttggaattaaaatgaagggtagaatttaaatacagggcattcataacatatagttcaggaagagtttggtgagagtataaatattcgcaaatccttatcttgttcagggtgaggtagagagctggtgttattgcattaactttagactttaaaaatataaggtaaaaagacaacccaattaaaaatggacaaaggatttgaatggacatttctctaaagaagatacacaaatggccaataagcacatgctcagaaacactagctatcagagaaatgcaaatgaaaatcacagtaagatgccacattacacccacccactaggatggctattgtttatcaaaatacgaatattaagtgttggtgaggatgtggagaaattggagtccttatatattgctagtgggagtgtaaaatggtacggctactttgaaaaacactctcgaaatcagttcctttaaagttaaaattatatgacccagcaatcccattcacaggtatatatccaagagacttgaagagtggctgctctcatcaattttttttttttttttttagacggagtcttgctctgtcacccaggctagagtgcagtggcatgatctcagctcactgcaacctctgcctcctgggttcaagcaattctcctgcctcagcttctcgagtagcagggattacaggcgcctgccaccacgcctggctaatttttgttttttagtagagatgggatttcaccacgttggccaggctggtctcgaactcctggcctcaagtagtccacccgcctgggcctcccaaagtgctgggattataagcgtgagccaccgcacctggcccgctcacatcaattttatatacttgttgccaaaatcatttttagtctaaagtgcagtttatttcctattctcaagaatttcatgaccttctgagactgacaaattcatgtccatatgctctagtattactatagtattgggaccaatctgatttattttaatggatttttctggtataatttctcacttttcccttttgcttattacatgtaaaagctgaaaaagaactactgaataatcctgtaaacacaaaaaactttggattcctcctcatcattgagaaggggagtaacctaataaaactgtttttagaattaatttggaaatgttgagtactgtgagtttaagaagacactaatggaacctgaagtgggtagctttattaatgtaaagtcaggaccagggatgaaggacaaacagtggggatagagaataaccaagttgctcaagctagaagtctgggagttagcttcaactcttctctctctcctatatccccaaactctgattgaatcatcatatcctgatgattgtatcttgagctaagtatctctcacctttcttcacttctttacattttcactgctgctatcttggtccagtacaccactacatctacattgctgcaagaatttcctaacttccctgcatcagtttttcacaacctccagatccgttttctaccttcttgtcatagtgatattgagaataatttcaaattgatgtaacttatttgcttatatttttcagtggtcttttattgctcttgggataaaattgaaaatcttaccatgatttttataaggccctgcatgattaggcctctgcccacttttccagtctcattttattcctttctcctttgctctctactttccacattactagacttcatttattaaagaagtgagagaagaaaatgaaccaacctggagttttagatccagcttatttgtccttcaaaagtgaagtagaggctgggtgcattaactcacgcctgtaatcttagcactttgtaatcttagcactttgtaatcttagcactttagactgaggtggtgggaggattgcttgaggccaggagttggaggctagcctgagcaacatagtgagaccctgtctctacaaaaatttttaaaatgtgctgggtgcagtggcgcgtgcctgtagtcagcttgtcaggagaatgagrtgagatgattgcttgagcccaagagtttgaagccacagtgagctatgattgcaccactgccctccagcctgggtgacagagcaagttccagtctaagaaaaataataaatataacaaatttaaaaatgaaggagaaataaagactgtcagatgaacaaagatggaaagaatctgttgccagtatacttgctttgcaagaaatgttaaaagaaattatttataaagaatgaaagtgatagaggtcagaaactacataaataatggaagagtgttagagaagtaatgaatgaaagtaaaatatttacttaccaccaacactggaaaagaaagtaaaataaaataaaatattttctttttctttccttttttttttttttttttgagacatgctctgtcacccaggctggagtgccttggcgtgatctggcctcattgcaaccttcgcctcccaggttcaagcaattttcctgcctcagcctcctgagtagctaggattacaggtgtgcaccaccatgcccagctaatttttgtatttttagtagagatggcgtttcaccatgttggccaggctggtctcaaagtcctgacctcaagtgatccacccaccttggcctcccaaagtgctgggattataggcgtgagccaccgcgcccagccttttttattcttaattaatctaacagctaatgatttgttcaacaaaccgaaaacatattaggtgattatagcttgtggatagtgaaatgattgacagcagtattttaagggatgagaaggaggaattgggaatccttttaagtatgtctagctggaaagtggtacagcattgttttaaaaagaggacttgggtggggtacagtggctcatgcctgtaattacagcactttgggaggccagggtggttggagttcaggtgggaggccaggtggctggagttgcttgagcctagttcaagaccagcctacgtaacatggtgaaactctgtctctacaaaaaaaatcaaaaaattagtcaggtgtggtggctcacatctgtactcccggctactcaggaggctgaggtaggaggatctcttgagcccaggaagttgacactgcagtgagcggagattatgccaccgcactcccacttgggtgacagaatgtgaccctgtcttaaaaagaaaaagaagacttggattagttgttaatgtatattgcaaactcaggggcaaccactaaaaaaggtttttttaaaatgtagtgtaattcatatgctaggaggggagaaaaatagaatcatgtaaaatactcagaaccagaggaggcagtaaagagtggaatataaaaaaagaaaggcactgaatagaaaaccggaacaaatgtggtacagtgttaactatagcagtaatcactttaaacattagctgtctaaataaaccaattaaaagacaaagactgtctcaacagataaaggaacaagcctcaactatatgttgactataagaagtccctttaaaatataaagatacatagattagacagattaaaaatgaagagatggcaaaaggtatactatgctaacattaatcaaaagaaagtgaagctaattatgcagtcgtgtcatttaacaaatggggatatattctgagacatacatcagtaggagatttcttcagtgtgcgaacatcgtagaatgtattacagaaacctaggtgacatagtctactacatacctaggctgtatggtgtagcctgttgcttctaggctgcaaacgtgtgcaatatgtaactgtactgaatattgtaggcaattataatacaatggtaaatatttgtgtaagcatatctaaacatagaaatggtacagtaaaaataaagtattataatccctacagctaaaatagagtattataaatgtaaaatctacagtaaaaattgagttttataatccataaggaccaccatcatacatgcggtctgttggtgaccgaaacatcattatgcagtgcatgacaaagcagactttagagcaaggagaattatcaagaataaagaggggtattacataaagatgattaattctggccaggcatagtggctcatgcctgtaatcccagtactttgggaggccaaggagggcagatcacctgaggtcaggagtttgagaccagcctggccaacatggtgaaaccctgtctctactaaaaatacaaaaaaattagccgggcttgttggcacatgcccgttgtcccagctacttgggagacaggagaattgcttgagcccgagaggcagaggttgcagtgagctgagatcgtgccactgcactccagtctgggcaacagagcaagactccatttcaaagaaaaaaaaagatgattaattctccaagaagacgtaataatccttaatgtgtgttcagtaacaacagggtatcaaaatacatgaggcaaaaacagataaacctgcccagagaaatagaagaagtagtggtactgtggttggatatttaacatctttctatcagtaattgacagatccagcaggcagaaaatcagtgaggacataaatgaagtgaatagcactgtcagtcaactggatctaattatgacatctgtaaattgcttaatccagcagagattatactcattcttctcaaactcatgcaaaacattcaccaagaccacattctgggtcataaaacatgccttaaacatttttaggaatagaaatcgtacataatataccctctgactgcaatggatttaactataaatcgatggaaaaaattggaaaactctaaaatacttggagattaaacgacacacttctaaataacgcacagttcaaagatgtttcaagataaattgtagaatattttgaactaaatgaaaatataaaatcaaaatttgtgggcagtgaaagctgtgcttagaggaaaatgtacagaattgaaaatatatattactaaagaagaaagatctaaaaccagtaatctaagcttccaccataggaaactagagaaaaaaaatccaaagtaagtagaagaaaagaaataataagaattaaagcagaaaacaaggaagttgaaaataggaaatcactagagaaaaatcaacaaaaccgaaagttgggtcttagaaaatatcaacaaaaccaataaatctgtagctaagttaaataagaaaataagaagatatcaattattaataccagaaatgaaagaagaaccattaccagtgatccttttattatttcttttatttttaatttttgtgggtatatagtaggtatatatatttatggggtacatgagatattttgatacaggagtacaatgcgtattaatcacatcagtgtaaatggggtattcattacctcaaacatttattctttgtgtttcaaaccatccaattatattcttttagttatttttaaattcacaattaaattattttttgctatagtcaccctgttgtactagcaaatactaggtcttattcattctaatttttttttgtacccattaaccatctgcacttaccctttcccccactgtacttctgagcctctagtaactatccttctactctctatctccatgatttcaattgttttaatttttagctcccacagataagtgagagcatgtgatgtttgtctttctgtgcctggcttattttgcttaacataatgacctcatgtcaggatctcattcttttttatggttgaataatacttcattgcgtatatataccacatatcctttatctgttcatgtgttgatggacacttaggttgcttccatatcttggctattgtgaatagtgttggcaataaacatgggagtgcagatatctcttagataaactgatttcctttcttttgggtgtatacccaggagtgggattgctggattggtagctctatttctagttttttgagaaatctccaaactgttctccatagtggttgtactaacttacattcttaccaacagtatgtgagggttcccttttcttcacatcctggccagcatttgttattgcctgtcttttggataaaagccattttagctggggtgggctatctcattgtagttttgatttgcatttctctgattatcagtgatgtagagcaccttttcgcatacctgtttgtcatttgtatgtcgtctcttgagaaatgtctatcgatcttttgtccatttttaattggattattaatttttttcctgtagagttgtttgagctccttgtgtattctagttattaatcccttgtcagatggatactttgcaaatattttttcccattctgtgggtcatctctttactttgttgatgatttactttgctgtgcagaaggtttttaacatgatgtcatctcatttgtccatttttgctttggttgcctggggatattatttaagaagtctttgcctgcttcattgtcctggagagtttccccaaagttttctttcaataatgtcatagtttgagatcttagatttaagtctttaatccatttttgtttgatttctctatatggagaaagggatctagtttcattcttctgcatatgggtatccagttatcccagcaccatttattgaagatactgtcctttccccagtgtatgttcttggcatttttattgaaaatgagttcactgtagatgtgtagatttatttctgggttctctgttctgttctattggtctgtgtgtctgtttttgtgatccttttatttactgataaaagaattaaatttgataacctaaaagaaatagaccaattacttgaaaggtacaatctaccaaaactcatacaagaagaactagataatctgaacagcctggtatgtattaatgaaattgaatcaataactaacaaccttccaaattagaaagcaccaggcccagatggtgaagtctactgaatatttaagaaagaaataattctccataacttttctcaaaaaatagaagcagaacgaatacttcctaattcttttgaggactactgcattaccctaatgcaattcatctcatccacaggctaatgaagaaaagccatatgatcacatcaatagatgcagaaaaaacatttggcaaaatccaacacccatttaggataaaaactctcagcaaagtaggaataaggagaacttcctcaacttgataaatctattaaaaaataaaaacacaggacaacttacctctagcatcatacttaatggtgagaaactaggttttttyctgctgagatccacaacaagacaaggatatctcactattcctgtaagacaggaaaaggaaataaaaggtctacagattgagaagaaataaataaagctatctttgtagatgacatgattatttatgtggaaaatttcaaagtgacaacctcctgaaactaataagcaattatagcaaggttataggatgccagattaatatataaaagtcagtcgctccttccataccagcaatgaacaactggaatgtgaaactgaaagcacagtaccatttacattagcatcaaaaatctccaaaacaattaggtataaatctagcaaaatatttacaagatctatatgaggaaaactatgaaactttgatgaaagaaatcaaagaataaataagttgagaggtctagttcatgtacatggatagaaaaactcactattggcaagatgtcattttttccctacttaatctgtagattcaacacaatctcagttgattttgttcttaacaagttattttgtggatattgacagaatctaaaatttatatagaaaggcagagcatgagcaacatggcaaaacctgtctctacaaaaaatacaaaaactagttggatgtggtgtcatgtgcctgtagtcccagctacttgggagcctgagatgggaggattgcttaagttcaggaggtcaaggctgcagtgagccatgattgtgcccctgcactctctagcctgggtaacacagcaagatcttgtatcagaaaaaaaaaaaaaaaaaaaggaaaggcaaaagagccagaagagtcaacacaatattgaaggaaaagaatgaattcagagaagggacagaacctgacttcaaaatttaatatagtaatcaagaaagtatggtatgggtgagagaatagacaaatagatggaataaaatagagattccagaaagacccacacaactagagtccactgatctttcaaaaaggagcaaaggcaattcaatggagaaaggatggtcttttcaacatggtgctgtaacaattggacatccacatgccaaaaaaagatgaatctagacaccttacatctttcacaaaaattaactcagatcatagacctaaatgtgatgtacaaaagtataaaacacctagaagacaacataggagaaagtctaggacaccttgggtttggcaatgagttttataatacaataccaacaataaaattcatgaaagaaaaaattgctaagttggactttattaaatttaaaacttctgctttgtgagagacattgttaagggaatgaaacgacaagtcacagatggggagaaaatctgcaaaacacatgcctgataaaagactggttctaaaatatacaaagagctcttaatattcaacaggaagagaacaacctgaaaaatgggcaaaagatgtgaacaaacatctcaccaaagaagatacagagatggcaactaagcatatgaaaagatactcaacatcgtatgtcattagactattgcaaattaagacaagataccactacacacctaaaagaatggctaaaatccaaaacactgacaacaccaaatgctggcagggaagtgtagcaatgggaactctcactggtggtggaaatacaagattatatcatcacactgggagacaggtagtttctttcaaacctaaacatagtcttactgtaggatccagccatagcactctttgtatttacctatattagttgaaaacatgtccacgcaaacatctgcacatgaatatttatagcagctttagttgtaattgtctaagatattcttcagtaggtgaatggacaaactgttgtacatccataaaatggaatattattccatgataaaaagaaatgagctttcagaccatgaaaaaaaaaacatgaagaaactgaatgagtattgctgagtaaaagaagctaatctgaaaaggctacatactgtatgatttcaaatatrtgacattgtggaaaaggcaaacttttgtcaacagtaaaaagatgactggtttccaggcactaggaataggggggtggggctagaagaagggatgaataggtagaagcaagcacagagaataaagatgtgaaactattctgtatgatacttgtaatggtatatatgtgtcactatactttctcaaaacccatagaaggtactacataaacagtgatccctaatgtaaactatggactttagcaatactgtatcaatatgagcttgttaattgtagcaaatgtaccatgctaatacaagatgttaataattggggaaactggtagggagggggaaagggatgtatggaaactctttgtagttgacactcattttttatctgtwaacctaaaactgttttgaaaaatgtatatttaaaaaaatgtattttttggaatagaaaataatttagacatttgaaataaccacagatttatctttaaaatttttaattcattttttagtttgtgtcattctccatttatttactttctgacttgcattgggagaaacaaattttatttctgacattgatttacatttctcttttatgaattatttcctttaataacaaacctggttcttctcttgttaaactgtattttttcctatgactttgaattacctgatagagtgatacaatatttaactttttctgactaacttaaacagctttctttatgctggtgatctaaactgatgtaaggaccttatgtccttacaattcatgaagacactagtatagtctatgttgaaatttgcaaagtaacagttttgtcacatgatgtttcgaagacttattttactggttgctttctagaattttcagatagaaattgtaagagaatttttttgttttttctttgaaagtctaagagaatttattcattattgttcacttaataaacagaaagggaacttacctgcatttaaaagatattaagcatgatataatccttttatcttagaatactcaagatggctttaagataaattttgttattaatagttaagtttaaaatgtaaaaaatgtggagagtatgtctgtggttttgcttatgctaacaaataagagagattgcaatgaatttaagaattatttttgaacatactcataagcagtgtaacttgcttgcatttatgatttaggacctggtgttcaacttttggagcatatatatcactgttttgttttcggattttgcttttcatttatgtgtattatgataataggcctacatttggggactttaacaggtatttctgccaatggataggaatgtatacataatgtgaattttaataaataaggaggaaaatgtatcatattttggaaatgagaaaattctggagttgccttcctcatgtttattttttgtatttatatgctgttaagggtccatcacatttgcggtccatgaatttcttatgctatacggaaactctagagtgcaagttacagttttttatatagtctgtatggtccaaggtgaatttatgggaatgcattttttttttttgagaggggaaaagataggaagccttcaaaaattgtcatgctcgtaatttgaaaatctgtttttactttttgatgttatatttttcatactgcccattaagcatattatagatttatgatcactgatgtatgtgtcttaggaatgtatgtgctaatagaaatgtcagtaactaagtgtttaggttagtaaatcccaaaagatctcaatagctaattcattgtaaataattttctatagtgagggttgcatagctgtgaagcccttgacagacttctaggtatgcctaaagacttaagagtttttagttaaaacaaaaacaacaacaaaaggaggtgaccatttttgcttcattttttagggtttttaaatttgtttttgaggcagagtcttaactttgttgcccaggctggagtacagtggcacaaacatggctcattgtagcgttgacctcctgggctcaagtgatcctctcacctccagccatcggagtagctgggaccacagggaggcaccaccacacccagctaatgttttagtttttgttttttgtagagatggggtctccctcagttgcccaggcaggtctcaaactcttgggctcaagccatcctcctgccttggcctcccaaagtgctgggattacaggtgtgagctaccacaccagccaaggggtacatttttaaagaattcattcagaatcacaacataaatttattccactgcaaatatggaaaaagttccaagggaaatgcccaagctcttccttcaagtctgtgttgggaaagaaagaaaaaaaggagttgttatttcccagaaattatcccctaggggaaaaaagaaaaacttataatttatctgtggaatcaaaaactcaattcaggtttttaaaaaatatatttaaaaattctggctaacacagtgaaaccctgtctctactaaaaatacaaaaattagcctggcgtggtagcaggcgcctgtagtcccagctactcaggaggctgaggcaggagaatggcatgaaaccaggaggcagagcttgcagtgagccgagatcgcgccactgcactccagcctgggtgacatagcgagactccgtctcaaaaaaaaaaaaaatgtrtatatatatatatwttttttttttaattaaaggtgattacaactatagatgatgtttcaccctctgtgtaacaacactttaagatttgcatatgtatttgtgtctttgctctgaccaattttaatgagtgattgtgttggagtcaacgtaacttttgtttcaaattagattataaaattgttggttactttctcaagaagggaagaagctagcgggaaaactggaatagggtgagattctgacattttgtatatgggttgtttttaaaatacacttgatctttaatacacagcatggtaagccatacactaaagacaaattgttgccattatcttagcatattccatgcttctatattttttacctacagattgttcttaaagaatccttaattttgctggcattcatacattttttaaatctatgattatctttttccagttataaactatgaaatgcatttagtttttgcttaatgtttgtttttactttctcctctgtatcttcacagcctgaaattgtttttcaaatggttaagctggactcctgctcaaatatagatattcagtaaaagtaaaaaattattgcacttatacgtggtagggagtagggattcaaagatcaggggatatggttcttgcattcgaaaagttgaggaggctgacctaaaaacatacagtccactaaaaatagattgtaagttttgcaaaagtgggaattcttgtttgtttttgtttattgctgtgttgccagtaaataattgtttgggagagttagaaaaacctctcagggactggccatggtgacttattcatgtaatctcagtactttgggagaccaatgtgagagggtcgcttgagcacaggagttcgacaccagcctggataccatagcgagaccttgtttccactaaaaatagagaaaaaaaaattagccaagcatggtgacatatgcctgtggtcccagctactctggagcctaaggtgggagaattggcttgagtccaggagttcagggttgcagcaagctatgatcatgccactgtactcccgcctggacaacagagtaagaccctgtctcaaaaaaagaaaaagaaaaaaaagtttttcaggtgagatgatacttcaagtatgaaggagtatatcaggaagaaaaagagaccaaggaaattagcaacatacaaagtcatgatgtgatgatgaaagagaatgaaaattttaaggaacattataaaattctgagtggcggcagcacgggaggacagtaaaagaaaagtcttactgagtggtagattgtaggcaagtcgtaaaggccttgtgtgagttgtgtgataatctawggaatttagacttcagggaaccaagtctgtccagtaatcaaggaaactcagcaatttgaattgatgttaatattcaaactatttattttgccaccattactattacactggatattatgcagtattgtttcttttaagtccttgattcatgtgtaacaatacctataacttaattaagaatccttgaaataaatgtttttttaaaaatctctgggaagagtaaacttgattatttatttctaagtgaactataatttatctttaatttttgtgaactagggactctcctaagaaattatcaaatgcaactacaaatgcaatttttaaaaagtaatccagtttaaagctttctttgaaaacaattttaagtttttatgtttatgatttgaataagcacaaaattatctatttttgtcaagaacccaatttttcatgctctgcaaattgttttctgtttctatgtaaaaattttaattatactcctatactttattataaaagatactgatttgattagcatcctcttaccagaaacacatactagacatgagattaaatccttttgactatgaattacctaaaaatttctaagaaagacctgtgagtgatttagaaaactttatttggtaaagagtatgaaagtaggaatgatttattcttataattcagcctcgttagtaagaatggctcaggattgcctagagaaatgcccaaatattgttccaaaagttactttgaactattaatattgagttattttcaatgttttcattcagtgaatttctcaacccttggttttgagaacataatgctaattaaagtgtctgctgttgtttaatgctattccattgtaactgctaataataatagcatttttctgctttatataaaaaaattatattcaaaatgttgtgtgtgttctctgatttcttttcttacagcttgccagtatttgccgtgctgaaatgttttaatttataatttccttcctttgtaccttttagttttctctgttgctgctttttctgtgacacgagcctttcattatagtcactcttcttttttccttccccacttctttcttttccttttttaaagccatgagaagccgatccattggtgaatgtgctctgccatyggcctatatacgcagtgctaaaagtgctcctgttctgatccatacttccaaacccttcttgcctgatattgttctcactcccctttctgatgagctttcaggtagtgccayctctgctaatttctgcaccacctttttcactttttaatcctctgctttcaaattttgcttaatcaaataaactctttaaagttaatttctttgggggaggtgtgggaaagtgggaaagtgattgagaaatcaacattttgagttatttgaactctaatcctgtccttgcagttcattctggaagtgctaagtttagtgctgtgccaatgtccagtattttttgttgtaaatggccaatttttttttttttttttttgctgtttgatttttttcttcctctcaggtggttaaaagaagtagtagtatacatttatataatagaagtcttgtaaaagatgacttaggaagataatcagagcattgacttttaatttcccattgttttgactaataatatcgtaaatcttgaataatttattctgcattatctatagtaatggaactaagtaagggtaatcagtatttgggaaaagtatataatctaaaagttgctttggaataaatctttgtatttatattacatataatcatatatagaattctaaggattcactcatttttaaaccattctgtgaagccctaacttccaaggagcttcaaaacctgcttagctttccagttctgcctcaggtcgttggtccccagtactggcacggtctgctcttctattaagctttaattaacatgtaataaaatgcatagatccatagactcaactgaatgatttttgaaaattgtacatacccctattaaccatcaccacaaacaaattataggacactyccactacctcaaaaagtttcccagtgacctttttgagtcaatcaccacacactcctcccctccacgcaaatacaactttttgctgttcatcaccatagatcagttttgtttaaaaaaaatttttttggcataaataaaatgattgtgcatactgtgctagctcaaagaaacctacttgttttgttaactttggaaccataatataattaattagaaatggtttataagaaattggagttgattttttaattgatgacaataatagaaaaattggcctcaattcaaaccttaatatccagtaagtattgatgaatgaatggacgtattttacatcagtgaaattaggcaacctgaatattttaagctaccagtacagaaaattagtaagatttaaaaatatgtagatgtaataatataaattttaatagatggtagaaaatggcacacaattttgttacgtatgatgcttagctacaaataaagaattaggatatttttgtctctttagtgcaccatttaagcactgtacctccttatgtaagtagcacagattttggttgcttacatcaaattataatctacttaagttggcaaacaatgtttctgttcttaaaactgaattagatacagctaaaagaaactctgagtttgttgtaaacttctcttggatacattttttgctcctagcttttataaaagacacacttagagcatttaatgcaaaccattcttgacatgtttagaaaaattaaaatgagctttgaacacttccattattattttattctatttatttatttatttatatcgagtacagaatttgaattctcttggccactaattcttaaaagtttgattggattagccattcctctactgttttaaaaaaactgtcagaaagatttatttttttctccacatcttaagggatttacagaatttctcatctgcaacttaatatattggcaaatattcatgttaagtgctaaaacatttttgaatagctaaaacaaagataaggttgttcctttcaaaatattttagagtggtgccatacccaggatgagaagttcctatttcagaattcttgctttgctgtaaatacataattcagaaagtttacctttttaatgattttatgatttaaacatttatgagcactgttggaaaggaattttctaaatggcaattttatttgttgtattccttttccctatctggggtaatatgccttctatgataaatttaaagatttagatggtgttgagacatcagtcactaaaacaaaacaaactttatatctgattatcaaaataatgttcattttagaaaacatggattatatggaaaagcatatgcaaaaatacacataatcctccaaaaccagtgataatttattgacaacttcagatgcttttactgccagttttttatgcttgtgtacatttaaaatataaaagcataattacagttattttgaattaaaaatcatttttttctcttagaatttgaaagaggcaaggaacctgtcactttaaaatagcaaaatccctcctttcctgattgcaaatgaagtcaggatttttcaagctgatacgtaaatttagaacactttccaggagatgcaaataggtgtgtagaggaaaagattaaagattcatagtgcaaatcaacataccaaaggcccttagaaaacctgttaaaaaaaaaaacaaaactgttggccaggcacagtggctcacacctgtacccccagcaactttgggaggctgaggcaggcagatcatgaggtcaggagtttgagaccatcctggctaacgcgatgaaaccccatctctactaaaaatacaaaaaaactagccaggcttggtggcaggcgcctgtagtcccagctgctcagtaggctgaggcaggagaatggcatgaacccaggaggtggagcttgcagtgagccgagatcgcccactgcactccagcctgggcgacagagcaagactccgtctcaaaaaaaaacaaaacaaaacaaaacaaaaaaaaacactgtttataattgaatatgtctcagacttatttaagcasagaacacctttccaagtacacatattgatatcctgtgccattaaggttccagagagaaccaatatgaaaattaagcaggattaatcttctaccagtttacattgtagaaatctaaattattggattggtctttgcctctgcgattcttggaagcaaattaaagacttggaatttgattcctcaggtgttaggtgtagagcgaaggagagtggaagagataagagaaaatgtatgagttataagaatagagagttgtaaaaatagtgctaaattaaaaaacaatcaccaaaatcttagatcatcaaccaatcatactttttaattgctgatgtttcttccaaggtttgactaaattttactttagaatagtttaatgtgcagagaattaataagaaagtgaactgtatgaaggggaaaaagtaaatggtttttcatgcttttgtagctctccctcatgtgaattagcttaaacgaactcataaaatatttcctgagtctatctctgaaatcaggaaatgaggtttcttcaactacttcaccaaaaaaaaacctcaatgaaacgactcatagacaatctacctctagtttatggttagaagtagaatttgttagaaaaatatttatctgatacttttggataattggggaggtaaagggaagtcctttaaatccttttttttttttaacgtaccaaaatctatgagaaaggaccatcagttttctaagtaccttatttgttcccagcccatttttcctcctccagtgttcttgttctaactgtccatactacctgcattgttgtaagtatgatgctatatgatatagctttatatacagctatagactaacctagttgaatagttgagtattcttgaagagttaaaaaaaaaaattttttttttaatttgctctgttgcctaggctggagtgcagtggtgcaaacatgactcactgcagccttgacttccctgcctcagcctcccatgtagctgggatcataggcacgtgccaccacatccggctaatttttttatttttttgtagagacagggttgttgcccagggaaattctgaacayaaagttgcccaggctggtcttaaactcctgggctcaagtgatcctccacaccttggcctcccaaaatgctgggattacaggcgtgagccaccacacccagcccttaaagagtttttcttaagctctggggaccagtttgtgggcattagcactatgtcaatgcactgtttcttaacatcagactcatctataacagtttgaaaaatatgtatcaaatttgatacaatatgttggcttgcacaaacatctaatataatttattctggtgtctgggcaagtacactccttggcttctctctcattggcctttgataattacttatcattactgcactagattgtagacatttggtaacccagcctgacagtcattattttcctgataaacagataagagagaagccagaaatctgaatcatcgttcttaagcaaattacttttactgccaaaagtaacactttagtgaaaaaaggaatataaaagtatataaacatggtaggcagctttgtgtatacttccacaaatgtttcttatttagtattttctaatcaagtactatgagtttctcatcctgaaattaagcttacagacccagtttctttcaaccagttcccaaaactgatttgtcatttttgttgctattggactctggtctatctaggctatagtatgtagactgctaatgttggggactgatctctttttattaacgatatgttattatttgaattgagctctttatacttctgttttgtgactgtcaatgaaaaataaaatagtatgtctcacaggcctatccttttcctaaattctgcccaataaggagaatttttcatctcatcaaagaagtaggcccttctttatacaatcaagaattttttcctgtcatcagtgtagaataggatattaatattttacatattttccacttgtaatctgctgattatagcataattccaattagattttttttttttaagagatagggtctcattgtgttgcccaggcttgattgctgtggtgccatcctagcttactgcagcctggaactcctgggctccagcattcctcccacctcagcctcctggcaaattaatttttttttcctggaataatttacrttaatttttttgagacacagtcttgctgtgtcgcccagcctagaatgcagcggtgcaatcttggctcactgcaacctccacttcctgggttcaagcaattcttgtgcctcagcctcccgagtagctgggactacagaagtccgccaccatgcctagctaatttttttttaatttttggtagagatggggtttcaccatgttggccaggctgatctcgaactcttgacctcaggtggtccacccacctgggcctcccaaagtgctggaattataagtgtgagccattgcgcctggcctgcattaattttttaaaaagaacatctcaagaaaaatgtgaagctaacttaaacatgacattatatagcataatcataagcaaaacactatacttttcttaacataaaaaatgtattggtagtttatgttcaaaattttaaaatcaggaaaacaatattagaataaaagagaagatagtcgactgggctaaattttagtggtttaaatgaaaactattgagcttgatttgttgcttttaagtcttttcatatgattacaataatgtaaaaactgctttgaattacctgcaaattgaacatctaatcttaaaaagatagaattttaatagcctctgttaataatatttgaaacatagatgctctatcgtttttacttaccttgaagtacattgccgttgttgcccaaatagacaaaaacttaggtaattagcagaaaaaaactgagtttcaaaatggcatcaatttctatgtaaactagtttaaatgatattatgaatttagggaccataaaaatattactgatagctaacgttcgtgcttgaccagtaaaataatttaactttagtaaaggggattttggcccttgattctatgattcatttcagaaattattaaaatttctagtgatatgttagtattttaactgaagagtttgtgagtaactaacttgctttttaccaataagcagctactttttttttttaaggcgagcttttcttctaccagtatttattaagcccatacttatgtgacaggtcctctttcaatcaatagagatattgcaatgaacaaaacaaaaatcctcaagagacttaaatctagtggaaaggagtacttttttcttaacattttataagctgacagtatactttaatgtacagctttcctttcaaactaacacaggaaactttttgaacaaaatatttccgggaaaaaaccggttttttaatctagaaataattgacccattttaatgctaaacagtattaaggaaacccagagataaaacttgacatttctgtaactttatagagtttttaaactctaaatttaaatttattttaccaaagcattttctcaatgttcaaaagcagtttgtgtaaatctcttgaaaacaacgtttttattgtttcactcattaagtggtttctaatgctttagattaacatttaattgaaaagactatactttcaagcataatttctaaggtatgttagtagaggagtttctctgaacatgggtgatcgttcttctcttcctctgggagagtaagaggacacagttggtttcccttaagaaaaagaaaagaaagagaaaaatatataaaattttatttaaaagctttcattttttaagttaaaatataagaagcataattaaattgttttgagggcatttttatttaaacctgatgccaccattatttttagcaattcaaagtttttttattggttccttctgtataatttactaacatttgttttagttagatttttatttctaacattcttatctttatagagataaatcactatgctgctctgtggtttttttaaaattcttttttgtttatattgagatataactaaagcctggctttatggttttttaataatacaattaatttttaccaagttttatttaaaaattaataaattatttcatgagtacaaaacatatatgatgtattattcaagagattaagagtaaagattaatttctgccttacttgacaccacaactcctcactttgtagttgtgtaattttggacaagtcacttaaagagtttcttcatttataaaataggcatagcacctacttcatggggttgttgtgaggattaaatgaatgatatgtcagatgcttacaacaatacctggcatgtggaaaatactatatatagtttagttattatttagtctttttctcagtaaagttcagctgtatatatttgctcaactaatgtaaggcttattagagtcaattatgctcaattcaagtgccatttgtattgacataattcagccctcttgatctgaatttagcataaagttggtttcctgtcagtgttattttcttctttgattttatgtagttagtattattatgtgccatgaaagaactatatttaaatcttaagaatttttaaaaacattgtttaaatttaaattctccggtactacaatattggtagaaaaaaaccagttacattttttttttttaaagctctttccctcttaagcttgcacagaagttttagatagtcatatatggtaacaagttttaggaaaaaaaaaaaacataggctgaaataatggttacgttttctaatatacaaggagtgagggctgagtttgggaaggaattcctaaacacagaacatcataataatctttcctggcttctttagaatggaaaaattgtgaaatatctataaaagaaattaaaaattaaaactaatattttatttttttctgacatttgtacatttgctagtgtcataatgtttttatgattttaatgttttgaaatcttgattttgacctttggtaaaataaattccaagctataaaattygtaagaattcttatagaacagctatacagtctttatcctttgctgagttctttagaatattgtgtggaaagaaatttagagtgcatgctgaatataatctctgtcattgaggcagaagttcttatgatctcttatggcagatgtaaaaaaccgaaatatttatgtttgtcaagatgcacagatatgagttagttatctgctgtattaacaaacgcttaatgagtataagtgcatcaaagtgaagtttgtaaggaaatgtttcgcttttcacttagaaaaatttctcagtggagtgcatgaggaagaaaaacaatgtcattttttaaagttgcacattcccctcagtttaaggacaaaaagttaattgtttcagcttcaggagatactatatatttaacctatgttgagagcctactagtatatcactaggaatatactagaatcttggcataatacaaacctatgttgatctcaatttagtataaagtaggtccatttggacctcatacaaatagggtgatatgaatgaaattgcagagggactagccttttttcagccatagtagcatggatcccaaaaatactttgaatgactatctccattttataaatgaggaaactagtctcaaaatctagagtaagaatcaacaaattattttgtaatcttggacaagtcactgctttgcttctggatctaaattttctcattttgattgttcagttatagttctgttgcatttaacttttgtgcaagaagcctaataagtagcaacagctgactttttgactctgtcctttcttcattatattttgctgacttctgaaaacaatttttttttgttatttctaggtaacttacagaccatgatggattcatagacattgtattttgcttccacaattcctgttgagaatttgtatatatctgaacagttaaatggttatttcatcctgacactgaaggcagtgaaaataatgcagtgatatgcaacactaagcctgtttctcaaacttttttattgtaaatttgataaagtaacttaacctctctgggcttcaattttctcatctgtgagatagttaaattagataatctctgaatgtccatctataataataataataattattattattattattatttgagacggagttttgctcttgttgcccaggctggagtgcagtggcattatttcggctcaccgcagcctctgcctcatgggttcaagcagttctcctgcctcagcctcccaagtagctggaattacaggcatgcaccaccacgcccggctagttttgtgtttttaatagagatggggtttctccatgttggtcaggctggtcttgaactcccgacctcaggtgatctgcccacctcagcctcccagagtgctgggattataggtgtgagccaccgcgcccagcctataattcttaaaaagagatgtaagaagccagaaatatagtttttagagcttgatggctgtttaatggaaagggccaataacaggcaggtaaagtttcttcctagcagatttaagtggtgtttttgccaaaaacaaaagaatacaattgattttttaaaaaatatattgactttatttgatgtcagtgaataagattttaatacgtaataaagtaaaacacctggggagaacagtttcctgacaaagagaaatttaggaagagggtagagactttcatttctaatatgtaatcaaacagagaagcaaaatttgaagaaaagatgcctcttgcctttttgggaaggaagctggagaatttattagaccctataagagtctacagtgggatacttggatcggctttctgtgttaaggtgtattttttctgcttggaacktaaataagtaggaaaaatttaatagcatttgagttgcttgatttattggcacagctctatctttatctgcacttccaaatgtttcatcacctcactgtctgtttctatgcatgttaacattttaaaatgtgttttggtagttttctaattcattgacactacatgctatattggcttgtgcccatcatttttttaaaaaagcagatttgtattttgatttttttttcattgagcttacaaaaactcagattttttttaaagcatatgctttagagcattattgaaattaataattattttttatatttgtgtagttcttctctacataatttttttttcttttacagatattgatgatgctcaaatacttccccgctcaactagagtcagacatttttcacaaagtgaagaaactggaaatgaagtttttggtgctttgaatgaggagcagccattgcctcgaagtagcagcacttctgacatcttggaaccattcactgttgaacgagccaaaggtgcagttcctgtcattgacagttcatcccgtcatgcaccaagcttgcagagttccacagaggcttcttcaataactagatccactgaaagccacatcactgatactcatagtagagagtcttctctggaagttggtgatagcatatatgaccatctttgtcatttaataggtccagtagaacttgcagattcagcttttgaacaaatccagtacattgaccttgaaggagatgatgatcttctttccaccctgaaagaatattttaaggaaaaccaggaaaatcatagtaaaaatgagacagggaaagacccagcttctcaggaagtgactattgcagtaaataggggtgaaagattatccttagataaattagaatgcacagatcaggaaactgaatcagaaaatatcacctcttttgttgggactcctgaaaacctacagtttcagaaagaaccaaactcagctgtcttcatgagtaatatcgcacctaaccagtcagacagtttttttagaacacaaacttctgaaaaatctaagcaactaaacactgataaacagccatcagagcctagtttagatagcccttgtgataaagaaaaaaggaaacatctgtacagacaagcagccacagaattagatgcttgtgttgatgtaacactagttgaaaagcttaagagtgtgcaaattaatgaaaaaatcactgtcccacatgttatgcgtgccaagaaagcaacactaaaagcacctgttaaccgcagaatgcctcatgttacaagtactagcaaactttctccaactaaaaggagcttgtctgaaacagtaactcatagagccaaaatcatgaaaattgctactaaaaaacgaaatagtgttcatgttacttttaggccatccactgagtccgttcagttttataatcctctggaaaacaaagaggctccatggaagatgagactgcggaagctcggtggctttagtagtggtagcagcaatagcagcactagcaacacccataccagcacaaatagtgctacagagctagtaaaacctggtgtgtacagacctctagatacacttggtactgcatcagtaagcagcaaaacagtgaaggaatccacagagattcccaccaccatattacaaaaagaaggaattgcaagtagtcaattaggtagtcgtagtactcttaggtcatcaagtcatgaggcaggactacagcagggctccctgggtggcgtttataaaactgttgtacatgctctttcgaagccgaaggcaaatgtttccccacagaggcagaacagaatgccaccagaggctccactgagggatctgtacagtcatgtaatgggctattttggaaggaaagctgcaggtgagcactaacagtgtgcagagcgcaaaaggagaaagacagcaccagtttggcttaatgcaactgaagcaagctataagcaatcaaaaagctttgggatggtcactgctttctctctgtttggttatgcatgcgccttttcccagctgtatttttcccagcatagaatgtttatttaaattactaatttcccttataaggcatttagttaaacctctttgctgctgaacaacaacataggaaagtggatatataggaaaatttcaataacctatcaaagactacctaaatcaagtatttttctgagtgtataccacaagtatggaaattaagattatcaaggagttactatgctttcttccccaccccactatagtttaaaagggcaccagatatatctaactgatttcacttatttttactgctgatctatttggttttgtattttttcttgatagaaattattttgacaactaacataatagaaatcaaggtcctacagccagcaccaacattatagttaactatcagtgatgaggaaattatttcttaaatctcaaagtgaatttaatcacttttcatttaagccatttccaaacatgctgtaggcttttagttttgcattcatttatatagaatgcaagttatgtccttgaaacactttaattactttgtttttttctgagattttaaatgtgcataaaggtttcacagtagccactcatgatttaaatatggaacctctatggacagataacagaaagcaagattatggtaactgttttctctatcttgagtcaaagttaaaataactttacatatatagactattaactttcagcagtaaggttggttttgattttatttgttttaacatggttttgttagcatgattaacaacgctgtataatgcatcttgcattgagccattaatgccacctgagggcagtatttgacagcttagcaaagcctggccagtaatataaagataatggtatttcacagtgagcttctgaccagtgtgtttttttaatctgaaatactttgtagtttattaggaatataaacagtgctcattttcctttcattgcagagaaatcaacttttcaatagcatagtagtgacatagataccatattattttctataagttagtttcccaagtctaaaactttcttgttaatgtaaatggtaaaaataataataatgtagtgataaaaaaatcaaaataactattttgggtttttttggtaagaaaaacatttgtggaagtcaactttttattcttaaagcattaaaattagattttatagtggatagaaacagcagtatatcaaaaccatagaatttgtatttataaatactcaaatgcatttgtatcccactgagttttgcatagattcaaaggatgtattccctgcaaacgttctttgggggaaatacggaattataaattgttaaggctctaaaaagaaacattgagtcaggaaaaaagataaatataccagtttctttataggcaatattaacctaacttcagctagtgcttatctataagctttcttgctgtttaaagttacactgaagattgactaacatctgcttagttaaataaagtaaatatcaatttactaattcttaaaattaaatctgaaagaagggaaattattcataaatgcatgtttggcaaataattggcaaaggtactttgttttgggttgttgtttgtttcaaagttagaaaatgcagttaagtttttcctcactatatatagttatttatttatttttagtcaataaagaggacatgagccaaaaactgcctcctcttaatagtgatattggcggcagcagtgctaatgttcctgatctgatggatgagtttatagcagaacgacttcgaagtggtaatgcctcggtaagttttattttatatatttggttttatagaggagggtagaaaaactaacagatatatacctatgtacatatatgtcaatttatatatgggaatttttattcaaaataacctttcctcaaaatataaccctttttatgaattaagatttttgaattacatttttataacattttttatctaaagacataaacagcctcataattttcaccagggtgaaagatcagacaggtacctgtgcacaaatacacaggtataagcaactaccttcctagtctcccctttttttgtctttgctcgtaggttaccctggtgccagctgcaagccctcaatgggaaagatagcaatggaggtcttctgccccagctcccgtagttatataaataaataaatataatctaatatataatttaaaataaaaatacatatataatttttatttttgtctcaagatctgcttgtgaaccagctcccatagttttgctagcacaaatactgcttaaccattttagataactttggaagagacttaaaagttatctttatcttgaatgttaggagtatggcaacatgaaagcagaagctcttttatccctaataatgcttaattgttagggaaggataaatatatatggaactagtttcttttgagacagagtgtcgctttgtcgcccagggtggagtgcagtgctcactgcagcctccgtctcccgggttccagcaatcctcctgcctgagccccctgagtagctaggattacaggtgcacaccaccatgcctggataattgttctatttttagtagagacagggtttcaccatgttggccagactggtctcgaactcctgacctcaggtgatctgcccacctcagcctcccaaagtgctgggattaccagagtgagccactgtgctggacctggaattgctttttttaaactgtcatatttcatttgggtttgacttctctataactccattatataccccgcccctttytttttaggcttacttttttcccttgagtggataaaaatcattgaatgacatctttgctgtcattctttccactcttccactgtcttttttatttgctgctttttttccactaaatactctttctgctgttttaatttatattcactgcatggatcctgctgaggcttaagagtcacaggcccagcatcatgtgatatttgggtctttaggcagaccaacaataggtcaggctctagctccattcagttacatagattgtttggtgagtgtgttctccactcctacttcagcctctaaatctcagcatttattgtgatggtttggaaattaaaggtttcagatggttaaagagaataaaagctttttcttaatggtaaaatatttcttgaacgtttagactatgacaagaagaggaagtagtccaggcagcctggaaattcccaaagacctccctgatattctaaacaagcagaaccagatgcgccctattgatgacccaggtgtgccctcagaatggacttctcctgccagtgcagggagcagtgatcttatcagctcagatagtcattcggattctttcagcgctttccaatatgatggccgaaaatttgacagcaagtatcttttctatttgaatactatgttttatgttgattgtcttctgttcaagactgacttacggattatgtagccatcaccttcctctccagtgttacttaggcagtggctcccacgttagaaaaaaaaaaattagatatttggtcttgctatgttgtctgggctagtcttgaactcytggcctgaagcagtcctcctgcstcagccttccgagtagctgggattacaggtgcaaggcatcattcttggccccacttatttttatttcaattttcagtgaaatttcaaaggaagttttagggaatcaccttaagttgaagctactttatgttgccaaattaagagcatttaaaaaacaaaaaatgtgatcccttcttaaaagaaatgacatttttaagaccaaaactgtagaaaggaaaataatttaggatagacctgttactaaaaagccagtcatgattatgagttgccactgtttcacacactcatatttgagaaccaaatatttggattatgttcaatgctacagtacccagaacttcctttgaataattgccccttgttacaataacatcagtaatattatttggtgctatattattaccacttagttattcagctataattctatattgcacttggcagtcagtgaagggcaccaaatttttaaaaaagaagtcaaaaccttgggaactaagtttgtgaagagctgggatatgcattggagaattacatgtttcctcccttcatggcttgtacactatcccgatctacttataatcttcagagtattaagattatttacacttgtctgagtgatatgtaaacagaatagatgtacggggaatgtttatgtttgatcattttgctgatttagctctcgtaaatatttttactttgtaattgggactcatataataacatttcttcttcctatagattttggctttggarccgacactggggttacgtcctctgctgatgtggattcaggttctggccatcatcagagtgctgaagagcaggaagtggctagtctaactactcttcatatagattctgaaacaagcagtcttaatcagcaagctttctctgctgaagttgcaactattactggtaaagttattcatgggaatgtgtttcttaaatgtattttttaagccttcaaagaatttgattaaaattttgagagattttaagtattacttattactatttaagtatattttttcattcatctttatgtaacaatgaaggggagaaaagacattagtttcttgacctgaggtccactgggttaagcttcagaggactctgtgaacttgtagtattttatgcaatattttgtatatatatgcactagaacattttctgcaggattaaaaaaaaattttaatgggaacataatagatgtatatgtatatggagtacatgagatagttggagtgatttttaaaataaataaaaaagttaaaagtagtggactgtctttgtcattcagagttagcctagatttttatgatttctttagcaaagtatttattatagaaaatataaagcacactgcttaatagaaggcctgtttgtcaatatactaatattctgtgtttagatagtagtttgtgctttttggaaactttttacatgtagtcaaacccaaccataatgtgataagtggagtcttcaatcatgttaaatgcagagtcacattattgcaatgttagtgaagtgattagaatgagcctgagcagctagtagaccatagttcttgggggttccactctataatccaacctcactgtggttccggctacagtttgccccttgatgagtggttatccactccagcttaattatccatggggtgattttgcatcttgtggttggctggaacttgcaagactggcgcagtgatttctgcatctctaaactagtcaagcatatttcctcagccagcccagacagaggtaatttgagccaggggaattctaaaagttagaaatccattctctgttttcatatcctgcctccttttttcccagatggcaagaactttagcagccccattgcagaatatggccctagtggagaatgggaaccaattgggttagagctacagttccatcattataggatttaaattactcaaagtggaatactagagaaaattcttattttataatgaatacctcttactttagttgtttttaaatgtaaatgaaaagatacttaacattgatagtaaccagagaatgcaaataaaaactacaatgagaccctactacgcatactgaaattgttcaagttaaaaacactgacggccgggcatggtggctcacrcctgtaatcccagcactttggggagccgaggcgggcagatcacaaggtcaggagatcgagaccatcctggctaatagggtgaaaccccatctctactaaaaatacaaaaaacaaaaattagccaggcgtggtggcgggcgcgtatagtcccagctactcgggaggctgaggcaggagaatggcatgaacccgggaggcagagcttgcagtgagccaagatcacaccactgcactccagcctgggcaacagagcaagactccgtctcaaaaaaaaaaaaaccacacactgacaatccaaagtgttgaaatgagtgtggagcaactagaatcgcatacattgctagtaagaatgtaaactgatcaagtcactctgggaaaatatggcagtaacttttaaagttaaacatacgtttattatgtgaccatttttaggtatgtattttccttggacagttgtacgcaaaagatcatggcagctttattcacagtagttaaaaattgaaaacaaaccaaatgtccatcaattggtgagtggataaataaattgtagtatattcatttattgaatattcactgaaataatactcagtaatraaacagaattaaatattaatatatgcaaaaacataagtgaatcttgaaaatgtgctaaatgaaagaagtcaaatacaaaatactccataattatacgttattattctatgtgtataacattctaaaaaagaaaaaactgtagtgacaaagtaaatcaccacttacttgggaaggataggtgtcagttgaggggatcgactacagatgggcataagaaaactttatggtgatggaactgttttatattttgtttgtgatgttggttacaagaccatgtgcagttgccatttttcaaataactgtatacttaaaggtgggtgtgtttaaaaaaaatgtaggctttatgttctgtaaaacaaattttaatactatcaaaactttaagctattaatcagactgttgtgtttccaaaagatttccatatacagaagaaaaagatattttttatttcttaattctctgtagttatcaaaaataaagttccaaacaaaagttctaaaaataaaatgatgtatatggagaacctgttttaggtcttttgcctttatgttttttggataattaacttctaagaaattttaatatttatgtaacctatatttactctatgtagtgactatttttaggtctctcctgggaagttttattaggcattctaatcttaatcagtaccattagtaacagcacagaggtgtttaagaaactaaggcagttgtatttgtttctgtttagaaggcacaaaattcaacaaagataaaactccatatacacaatgtataaatgattcagtacagtattttccaagagtgaagtttgcatacattatcatactactaacgcaatagtactttatgaaagggatgttagtagtcctgaaatcatctattttcctataacatagaagttttcagaaactacgaaagaaatctagtataggaaacaagaatgaaaattagataacctctttttaggtcatgaatatcattataggaatagttttattgctttaaaaaaaccgttcaagaggaaaaagcctcttaagtaagtgagccattatagatttttaaaaataaaataggccgggcgtggtggctcacacctgtaatcccagcactttggaaggccgaggcgggtggatcacgaggtcaggagattgagaccatcctggctaacacggtgaaaccccgtctctactaaaaatacaaaaaattagccgggcgtggtggtgggcacctgtagtccyagctactcgggaggctgaggcaggagaatagtgtgaacccgggaggcagagcttgcagtgagctgagattgcaccactgcactccagcctgggggacaaagcgagactctgtctcaaacaaaaacaaaaaagcaaaaaataaataaataaataaataaataaataaaattaaaggcagtagtgattctctggtgattctgtgatagctgatataaaagtatttaaaatcttagttcttggcttggtgtggtggctcatgcctgtaatcccagtactttgggaggctgaggcagttgaatcacctgaggtcaggagttcgagaccagcctggccaacacagtgaaacttccctctctactaaagatacaaaaaattagccaggcatggtggtggacacctgtaatcccagctacttgggaggctgaggcaggagaattgcttgaacccaggaggcagaggttgcagtgagccacgatcatgccgctgcattccaccctgagcaacagagcgagactccatctcagaaaaaataatgataataaaataaaatctagttcttaaaaatgaattcgatttttatggatcaaaacaatacatggagataaaaaggtttatatttcaaagcatttgaccaaaggctgatgtctctttggcatgtacttaaaagtttttggtaaacattaaggttataattttcattatgccttcagcagtatgtgtttgtcctaagatatagaatacttaagtttctgtaactgtcctttaacatatgatttttgtgccatatgaatttactccaaatctcaaataaaggaaaggaaacttttcacctactatgtaacataattgagcctagatagggtcatatgattactcatttgatatatgattatcatatgattatatgattattgtgataacacctgatatcacaatccagttctatatgtacttttttaggcacttacttactgtgctactacttaaaaaaaatgcctgtatgatatgtggaattgcacttttatagaattaaaataatataaatgtagatcgtccttgacttactataattaacaacttacaatttttcaactttacagtggtgtgaaagcaattctcattcagtagaaaccttacttcaaatactcatacaaccattctgtttttcactttcagtacagtagtcagtaaattacatgagatagtcaatactttattacaaaacaggctttgcattagatgattttgcccaactgtaagctaatttaagtgttctgagcatgtttagggtaggctaggctaagctatgatgttcagttgattaggtgtattaggtacaaytttgacttaccatattttcaatttacagtgagtttcttggggtgtaaccccatcataagtcaaggagcatctgtatgtatttaatttatattggttttttgctttactgtgtagaaagaggtaatgagggcagaggtttacaggtactgagttcagaatattgatatttttctgctacaaagaagcttaaaataaaaagacctactgttttaacaacttgcttggtagtagcggcactatattataaccaccacaagttgttcaatacagcattaatttgtgctatactttatttaagttaacaaaagtacctgctatgcaccaggtactatacccaggcactagcactactacagtatataacagaatttctgttcttacaaagtttatactctgctggggaatatttaaaattgaatgggcagtttcaagtcagtgtgataagtggtataatagagaggtgcagggttcagtgagagcatctagcagagactctgtaatcatacttggcagaatcaggagtaggcttctcaaggaagcagagacctggaaaataaataggagttaaccaggccgaaaagaggattagggctccatgcaaaggaaaaagccagaggtatgatgcaataatactctaataaatacaagtagtttactttctatgactagacatagaagttctaggtgggttgtggggaggcaagaaagttatagagagacttgagaaccatactaggaagttagggcttatgctgaggccagtgaggggccactgaaggattttaaatgaggaagtgacaggatcaaattagatttttagatctttttgctgacttatggagaatggattgggagggggaagtcaggatgtgggagagactgaaggctgggaaccactgtaaaccaagcattgatagttgcatatagagcagcagtgagcaagtgcctcagttcttaaattgccccaagtctgatttaagtgaaatagaatgacagtaggtactagagtttctatagctgggccagaaatgggagtagatattcttagtttcactaatggctcctgtcatttggtacatccagttttgattctatactattaatagtcccatggtagacatgagaggagactcctagatataaaagcttgtataatattatgattttcttgacctccctggccagtttataactggttttatcttttggtgtttaaaatttcttttatttagggtgttaagcattacatcttaggtaggatattgaatactctttatggtaattttatgaaattatatttacaggttcagaaagtgcttccccagtccactcacctctgggctccaggtcacagactccttccccttctacaytgaatatagatcacatggaacagaaggatctgcagctcgacgagaagctccaccactctgttcttcagacaccagatgatctaggcaatatttcaaaattagatatttaccttttttcttttagggcgtcagtgtcaggagatcataaataaggcatcttacatttgattatatatgattattgtaaatattttggacttttctaagtcctttggaaatttgttaatrtaacttttttcttgttcttaaagatatttgttgtctgagttttattcattttattatagttgattagagtcctcaaattagttattgcattattttcaagtattgtattatcatttattgatatkggtagtgtttcctaaaacaggaaatacataatttggcatccttattcttagttttatacctaaagaacctagtaactcacaggagaacgtagtaacattatcacttgttaatcaagctttcagtgaaacagtttatcaaaccattttttttattttgattcagcaaatttgtcaactaaatttaatttaaaagtagaggtccaaatgaatattttcaagtaaatgttaaaaagtgacttgggaaacctaagtaactgccaagttttttttaaagttatttttgctagattttgtataatgtaacaaacatcagacaaatatgcacatttatggcatatgcaaatatgccataaattggtcaaagacacagttaatgagatatttacaatgaatgaaaagctagttttcattgataaggtagcacatttattctctgacgaaaggaagaaatttaaaactatataacttctaaacttcttttaagaaacccgtttattttaaaactaactgtagaggtgaggtttcaccatgttgcccaggctggtcttaagcttctgagctcaagtgacccgcctgcctcggcctcccaagattacgggtgtgagccaccacacccggcccaagggacccattcgttaacttgcaattgccttgtaattatatagccctaattttctggtttgtggattatttctgaccttttctttttctcctttgatctgcagttgtttatttgtttacrgttatttccccaacatttggaaaaaaacttcagttatagaagtgtttcaaggctagtaaaatgaatgcacataaaccctttatataaattcatcaattaatattttgccactttgtctatatttacacacagcacatatatgcacaaaatagcctgcccttcccacatgtctccctaaccttttatttttgctgaggcatgtaagaggaaattgcaaatatcagatccttcagacctaaacatgtcagtggatatgtcctaataagtgtatgttttctgcgtaaccacaatataatggccatattcatgatatttaacatagatacattgctgttattttagtctatagtcgtaagtcctcaattgtcccaataatgccctttatagctaccccacaccgtcagcaatccaataaagaatttaatcaggctgggcaccgtggctcacgcctgtcatcccagcactttgggaggcaaaggcaggtggatcacctgaggtcaggagttcgagaccagtctggtcaacatggtgaaaccctgtctctactaaaaatacaaaaattagctgatcatggtggcacacgcctgtcatcccagctactcggtaggctgaggcaggaaaattacttaaacctgggatgtggaggttgcagtgaactgaggtcgtgctgccactgtactccaacctgggtaacagagtgagactgtctcaaaaaaaaaaaaaagaatttaatcaaagaccacacattgttgcttgctttttaatcatttaaaattttgttagctttgaaaagggtaagttagaggcaaatcggctgatttatcattgtattttgaaggtgctctggagtagggaggcattagcaataatggttaacacttcagtgtgttttgtttgttttagtggctttacacaagaaaccttttttttttcttgtaatggagaaagactagtacctttttaataatacagtcagttatatactttatatgtaaagagaaaaaagttaaccattaggagtaaagaatgtacatgtactaagaagtgattataaattctcaatatgttggaatgttttcaagtgtgagaaatcataactttatggttctttcagtctacaaaatttttagttcccaaagttctttagatgcatagatatctttattgtctttttaattattttctatagccttttccattatatacattgagtagaataatggatttttttttaaagctggaggcaacctataatgatatctagcaaaaccatctattttacagattaggacatgtatccttagagaggttattaaataacttttataacacataattagtagcagaaagagactagaactaagattacctatgtttcttataatcttgccagtattcgtaggcaaaatacaattatggtaattttgattatgtttaaattttagttaaaatgtttatttttcggtcgggtgcggtggctcacgcctgtaatcccgacactttgggaggccaaggtgggcggatcatgaggtcaggagtttgagaccagtctggccaacatagtgaaaccctgtttaaactaaaaatacaaaaaaattagccggatgtggtggtgtgagcctgtaatcccagctacttgggaggctgaggcaggagaattgcgtgaacccagcagacagaggttgcagtaagtcaagatcacgccattgcactccagcctgggagagagtgcaagactccatctcaaaaagtttatttttcatgccattatgctaactcttaatgctggtctgggatgtagctacaaagaaaaggcttaggaagacttcctacaccatctgcctttagcctgaggttttccattaatttgatgatataacctgaagttgctattagataaaagtgagagtatgtgcttataaatttgatgtttttatcaaacagatttctctatctgcatagatagaaatttctctatctgcagagtgagtagtagttacatagaatcactattgaatagctagttaacataatgcttacaataattccttattattatctcataataataagtgaggttttgascttatcgggaaaaaataatgtatgttgacatttcttttattcatttctgtagatatttaagattgttaatttagcttggtttcttggggggttttatgttcagttcactgaaaaatggctgacactatatatttttttctatagaaattagtgaatttccatcagaatgttgtagtgtgatggcaggaggtactctgactggatggcatgctgatgttgctactgtaatgtggcgaagaatgctaggcattttgggagatgtaaattcaatcatggatcctgaaatacatgctcaagtttttgattacctctgtgaactttggcagaatctagctaaggtaaaaaagaaatagcggatataagtggagaagaaaataaaaatatttaaaaatagaagaagccttagaaaacatttgtgacaccctttttgactataaactggtaccctgcatggcaaagtcacttaattgtaattaaatagtaagtgtagaaactggatttgaaattcagtttaaggtaaactggaagagataacagttttcttaggtttgttgctttttatttgaaaattacagattagagataaccttggcatttcaactgataacctgacctccccttctccaccagttttaattcctccactgagaattcttacaccttggctttttaaggtaagcttaatatataaaatattagtttaaaacttctcatttactaaatcttaaactttttatagagattttggctattatatagacttctagagcacttagtttttaaccagtatccttaggaagtcattaggcattatatagagaagagaatgtgcatactaaaattactcgggatttattgcttttgattatttcataaaacaaaagtgaatatagagaggtatgtctgtattgtatttaactgaagtataaactttgagttgtatcacagaatatgctgtgtattaaaagttgtgaccgggtgaggtgactcacacctgtaatcgcagcactttgggaggctgagccrggtggatcacatgaggtcaggagtttgagaccagcctggccaacatggtgaaaccctgtctctactaaaaatacaaaaaattagctgggcatggtggtgggcacctgtaatcccagctactcgagaggctgaggcaggagaatcgcttgaacataggaggcggaggttgcagtgagctgagatggcgccattgcactccagcctgtgtgatgagagcgaaactccgtctcaaaaaaaaaattttaattcttttttgtttgttttttaaaagacagggcctcactcagtcacccagacttggagtgcagtggcatgatcacagctcactgcagccttgaactcctgggctcaagcaatcctcccacttcagccttccaagtagctgagactactacaggcgtgtgccaccgtgcctggctaattttttatttttttgtaaagacagagtttctctatgttgcccaggctggtctcaaactcctggcctcaagagacccttctgccttggtcttccaaagtgctgggattacaggcttaagccactgtgcccagccaaaagatttaattattttaagtattgatatgtttggtacattttcctaagtggaacagtttatggttatacctacattgtatcattttggatgatgataatttcactaatcctgaattttagttcattaaagaaattgggccaacatggaaataaatgagattatatacatcgtttgctatattcagttgcttaagttatttagcaaatagtatttctttttgaacattaaaactgatcttttaattttaggcaaccatgttgactgataaatataaacaaggtaaattacatgcatataaacttatttgtaatacaatgaaaagaagacaagatgtttctccaaatagagattttctaacacatttctacaatataatgcattgtggattacttcatattgaccaggtaactatatatatatgyatcatctaagaagtagtttatatcatattatctttgattcttgattctgtttaactcttgctttttaaggtctagaagttaaactctcccccttatttagtgatttatatacaatttacttcrattttatgaccttatttgttcttgaaacatggttgaaaatcaagctattattgtaggtagaggattgacttgagtagttctccatctttaatgttgtaccaaccagttcactttttgaagcaattaaaccatcctttgcttaggctgayacctttctttaataatattctaatgtacctactcttaggcattttgtgactgatacttgaggcatatggattcgtttatctagttatgcaacagtcaggtttttttcaatctaagaatcagcacatcacattttcttattactgtcaattatattggcatagtgacagttacattgatttgataattatatgaggtataatcattaaatagtcataaatataaccttagaattactttgggagtcttgatattggccataaactaacaagtgtaggaggttgcaagtcagaataatgtaaatatgtttatcctaatatgatgaactcgtaggtcatttacagagtatattaatattaaaagataatatctttctgaaaaatgtaaaatttttgcattaatttaaaattagtgtgctaccttgtaaacatgtctcaagtaaaatgactctcttaattattagaagaagagagcttttgtttaagataagttgtaatgaataatacaactgaatacactgtatcctcatagtaaattccaaaggcaaagtaaatgaataatgaagttaggaacattcccttaaaagtgcctaggtctagatttctgaggcttgatacctatcattaaaggacttcagtttattttaaaaagagaatctttccaattgtcacgtaacrggtcatgtggattcagaaatgagagttattgcacagaagcaactaggtgacaggagaaaactgctatgcagtttagttttacattgtgtgggccttgtacttttaaccttgtgaagcaaagagccttccttaatctctagtgtgaaaaaawtgctgttatttatgccagttaaatgaatgtattttcagtttactttccattgatagaatataatattaagcatggattatttggaagaattgaaattagtctttccagttagccaatgtacagtaattaccttttttattatttcatatgttatctatttttaatgatactgattagctgatactcaagattacatatgtgatattcttttttccttctttccttattctaaggatattgtcaatacaatcatcaaacactgctcacctcaatttttttcacttggtttgcctggtgccacaatgcttattatggattttattgtagcagctggtagagtggcttcttcagcttttctcaatgtaagtcatttcctgttccttatcatataacaaactttagccagrattcaactaacaaagttgataaaacataacaagctgataatcaggaaattttgcaatttaattggaattgattgcttctcctacattaaaaaaagtaagcaagaaatctgaaatataagaaagcactaaaatcagtaaaatctgataagcagaacaggatttaaagttgaggaaatctaaagaaacggagggaagaaagcaaagaaagagcaatgggctatagcaagaggtaagaaacaatggtgagtcatcattacacagtgtatgtgtgtatcaaatcatcgtgtygtacaccctgaatatatattgtctttaacaattatatatttaaaaattaaaaaaaagaaacttggtaaggcawccaccatagaaggacatatgtcctaggagcaaactctctctctctctttttttttttttgagatggaagtcttactctgtcgcccaggctggagtgcagtggtgcgatcttggctcactgcagcctccgcctcacaggtccaagtgattctcctgcctcagcctcttcaatagctgggattacaggcaggcaccaccacacccagctaatttttctatttttagtagtgacggggtttcaccatgttggtcaggctggtctcgaactcctgaccttgtgatctgcccgcctcagcctcccaaagtgctgggattacaggcgtgagccaccgygcccagccaggagtaaactctcaaattgcatgtgaagattttttcatatggtcgtggaactgtgagacaatgctaagtaaatcagtataaatggaatatgttcatccataaatggcagaggtgagctagagaggaaggcaataatgctgaaaacattagatagaagcctaaggaaggaatgagtaaccattgaaggattttaagcaaggagtgacatgatcaaattcatattttggaaggatcactctggagcaaagtgtaaatgaaaaataataattaactggaagtctactgtaaaaaactaagagtttttgtgagaaaaacatacttgtctagtactgtataacttgaagagcagtttaacataccttatttcattgtttagctgcaagagtgaaagatcaatagtgaatagaaggagttctatttggggcctagtaagatgtgtattagacatccatgaggaagatgtcagaagaataattgcatatactcaagggacatgtcaggactgaaaataaaagctgggcaacattagcttatagatgatatttaaagccatgaaagtggatacagtcacctagtgtaaacagacaaagcagcagcggtatttatagctgtataaccctgtttttccagttccctgagaacagtaatcatgtcttactcatcttggtatctccggagcctagcatagcaccatgcttggtcagttattgaatatgtgttcatttagcacctagtactactcaacattgtactgagcccttttgtggttattaaacttccccctccccttgcgtacagaatgtttttgtaggtggaatacagagggatatagaataaactggataatactttgtgctcaagcaacataatgtctactgctggggatttggagaagtatattaacaactacagaatgttgggcatcaaatagataccaataggaggagcacatcatagtagttaaaagcattgtctagagctgacctgcttgggttcaaatcctggctctgccacttattagctgtgtgaccttgggcaagttactgaatgtctctgtgtctcagtttcttcatctataaaataaagatggccaggcatggtggttcacacctgtactcccagcactttgggaggctgaggcgggtggatcacctgaggtcaggagttcaagactagtctgaccaacatggagaaaccccatctctactaaaaatacaaaattagctgggcctggtggcacatgcctgtaatcccagctactggggaggctgacacaggagaatcgcttgaacccaggaggcagagtttgcagtgagccgagatcgcaccattgcactccagcctgggcaacaagagcgaaactcagtctcaaaaaaaaataaagaaagataacctgccgtataggattattttataaggatttgtaacatggttggaacactatgtgacacgttatatgtgcaatgtaagagtttgttaaaattatttggtgattcagagaatggagagatcttatttgtttagggatatcatggaggtttcatggaaaatatacataaatatgtccctgaaagattagtagtatttgtttaagtaaaaatggagatgagagacagtgttccaggcagaggtaaacaggcatgagtgagatgtgttcaaggaatgacaaataatccattttgtttaggagctagttaatctgtaagagtgtaataggcaaaaagaattgaaaggtactttatttaaaaaaaaaatcattgagataaagtatacatatctaatttaccatttttatcatttcaatttttattttgttttgttttgttttgtttttgagatatcagggtcttgctctgtagcacagattggagtgcagtggcacaatcgaggctcactgcagcctttacctcctgggcttaagcaatcctcccacaacagatcccaagtagctgagactataggcacacacctagagtcccaggcaccatatctggtaatgtttttaactttttgtagaaacagggtctcaccatgttgcccaggctggtcttgaattcctgggctcaagtaatcctccctgccttggccttgtaaggtgctgggattacagtcatgagcacctgagctatcattttttaatgtacattttttttttttttgagacaaaatctgtctctgtcactcggactggagtgcagtaatgcgatcttggctcactgcaatctctgcctcccaggttcaagtgattcttttgcctcagcctcccgaatagctggggctacaggcccgcgccatcatgccaggctaatttttgtatttttggcagagacgaggtttcaccattttggccaggctggtcttgaactcctgaccttaggtgatctgcccacctcagcctcccaaagtcctaggattacaggcgtgagccaccatgcccagccttacattttaaatacatttgtattatttttttcccccttctttcctcctttccctgcttccgggcctctggtaaccaccaatctattatcttcatgaaatccactttagctcccacatatgaaagagaacatgtggcatttgtctttctgtgcttggcttatttcagttaacataatgttctccagttctacccatgttgctgcagatgacaggattttgttctttttcatggctaatgtttcattgtgtataagtaccacattttctttatccattcatttgttgatgggcatgtaggttgagtccatgtcttggctgttgtgaatagtgtgtggtaaacacaagagtgcaggtatctttttgatatcttgatttcctttcctttgtatgtatatccaattgtggaattgctggatcatatggaagttctatttttgatttttcgaggaacctccttactgttctccatagcagctatactaatttacattcccaccaacagtgtgtgaaggtccccttagaaaggtactttagatctttgctacccaaagtgtgatctgcacaccagaaacttttggcatgatctgggtgcttattagtaatgcagaatctcagaccccatcctggacctacttactgaatcagaatctgcattttaactagatcacaagtaagtggcaaaatcattaaagattgagaagcactgctttagactacgttttggaaaggccttgaatgccaggaatcagattataatgctatattagataaacagttaagttttgttgttgttgttgttgtttgagatggagtctcgctctgtcgctagactggagttcagtggcacgatctcagctcactgtaacttccgcctcccgggttcaagcgattctcctgcctcagcctcccgagtagctgggactacaggtgcgccaccatgcccagttaatttttgtatttttactagagttggggttttaccatgttggccaggatggtctcgaactgttgatctcgtgatccgcccgcctcagcctcccaaagtgctggaattaccggcatgagccaccgcgcctggccacagttaagtttttttaaagtagttagagaaatgattgaatccatcctttgagatcattaaataagtattaatctgggagtaaattaatggaagacaaactagagatggtaaacaagtcacagggttatagtacaatcagagtacttagactataaatctcttggatactagcaaaagttgatagaattcagaagattccaatatataaaccaatgtcattttttattaatttactgtgaaaactattactgttcaatggggtattccagatgactagtcagcacatttcctgcagcttttttcaagattctgtaagagaattaagccctaatgtcataaggcatctattttatgtaactaatccatttgaaatgactaatttctcctttgtgtatctaatactatgcattatgtaacatccttgagaaaatgtagaatatagtcattttttgcattttctggttcatatgagggatacctgttgagaaaggytgcataggaaaccaaatcattgcaagaatcaagcctaacatatctccacaataaggttaaaacaagtcatttcctctgatggtgttggaaatacccagtccaggctgggcatggtggctcacacctgtaatcccaacactttgggagactgacacaggcagatcacttgaggtcaggagtttgagaccagcctggccaacatggtgaaactccatctctactacaaatacaaaaattaactatgaagttgggatagagatcccatgtacctgagacattaaggggcttgaacagtagatggtgcagaataaatgtgactatacagttgccagtggaacctaccacagatattaatccttaaaaaaaaaagataattgtgtccagttaggagcagacatgctagatgacccttgttgtttataagtctttaaaattttttctggtagtggtggcacgcacctgtaatcccagctactcaggagtctgagatgggagagatgggaggatcatttgaccctgggaggtggaggttgcagtgagctgagattgtgccactgtactccagcctgcacgacagagtgaaactccttctcaagaaaaaaaaaaaaaggaggaaacacctagtccaattcttgctcgttgtattcttattttagatttcattcatatcatctcccttctgttaatgccgtctgccccccacctccttaagcagataatagaataattgatttggttttgcctttcttaattatgatcacattccaggtctgctcccattatgtgcacatacctgaatattcccagttacctcatctacctatacagaaaaactctcagctaatctctttcattaaatactgatttttaagatcagtttcatttttatacaataatttttattttaaattggaacggtagatatgagttcaccctgcccttttatactgctgccttgtatctttaaatccacattgtttttaaatctggaaatgagttgttttgttgaaaatcatataatagagtattacaccattgcctctattacagtatttattcagatgtggaaatcctcttggaggttggttcttaatttatgtgaatagaagtattatatttctaatagatttgtgcttagcatttttgttaggtattattaaacatataaatcaatttgcagatgttttagtaaataaaacaatatattagtaggaagatgttgatgtttggtgggcatgtaagaaggcagaagagaaaaaagaaatgttcagtgttgatacttcagaaatggctaaatacagctaaggaaaaaagatgaaaagttaccttcattggcagtccagacaaattctaatgttgcttctagtaagtggtataggcaatgcttttcttatgtgcataatatcataaaagccatctagattggttcctctttcatatagttaatgctttttcttctttattcatccttggtaataaatataatctagtgaaattaagtcatcagcttattagaacaatatgtcacaatgtgtgagttacctttaaaattatttatatttttacttattagggtgaattgatgcttgtagataaggtatatttgtttttacagtcttattaactgtggctgatttgaggaaagctctgctacttgtttattgcatttattaacaataacagtagtttatgtggaaagtataaatggaaacttaaatctttttgtgttttccctttcctttttaaattttgttttatgtatcacttccctgtctaatgtagttggataacaaagcaacttttctgataatttcataacaccaatatatttttaaactttttaaaaatgtgatacataggcaccaagagtagaagcacaagttcttctgggatctttggtttgctttcccaacttatattgtgaactgccttctcttcatcccaacattcctgatgttgctgtgtctcagtttacagatgttaaggtaagaaatgagatgctaatttttagcacttaaatgattttataatcataaagtatatgcaataaaatttgtattctttcttttctttttgaartccacacaattgttaaagaacattagccatatcctccagacacaaaggcttgaatgttcatttggagcatatccttttttgtgtttaaaactgctttagaacctttttcttgttattgaacctactcacatgtctacctgttaggattcattcacttactgaacatttattgaaataccccatgagccagatactatgctactaatgtaaagcttctgagattaagatggtaaagtaaacctgcatattagactctctccttctcccagtttctcagtgtgatgagtcaaacatagtaatggaaaactctgtactgctctaggaaactatggagttgggatggagatcccatgtaccagaggcatttaggggcttgaacagtagatggtgcaaaataaatgtgactatacagttgccagtggaacttaccacagatattaatccttaaaaaaaagacaattgtgtccagttaggagaagacataccagatcacccttgttgtttataagtcttcaaaatgttttctggtagaaaagcagtcagtgctctgagcccagcaaggtgcctgttgataaataattccatcaataagttaagacctgtgtcttactgagacctgtccttacttaactgaatgcctatgtatgataaattcccagctgggcgcagtggctcacacctgtaatcccagcactttgggaggccgaggcgggcagatcacgaggtcaggagattgagaccatcctggctaacacggtgaaaccctatctctactaaaaatacaaaaaaaattagccgggcatggtggcgggcgcgtgtagtcccagctactcgggaggctgaggcaggagaatggcgtgaacccaggaggtggagcttgcagtgagccgagattgcgccactgcactccagcctgggtaacagagcgagactccgtctcaaaaaaaaaaaaaaaaaaaattcccaagggtttaacagtcctgagaagttgtgcttgtcacagtaattgccagatggtctttgtatgtgacctgaattggtccctagaattagaagtgttgagagagaggagacatagctcctcaggggctaagcagatgtgtttttttttttgtttttgttttttttaaaacttgctttttctcaagttttaaaaagtccagtttatgttaggaatgttgcatacactttctatagcatccatatatctctttgttacgtttattatacttgtaattacgtgttcaatgtctgacttctactttagatatatatataccacaaggtctttttgctatatcatcgtaccctaacatactgtttgatacctggtatatactcagaaatcaatttttaggccaggtatggtggctcatgcctttaatcctagccaaggtgggaggattgcttgagtccaggagttcaagaccagcctgggaaacatagggagaccttgtctctacaaaaaataaaaaattagctgggcatggttgcacacacctgtggtcccagctactgggaggctgaggtgggaagagcacttatgccatggttgtgccaccgcactccagcctgcgtgacagagcaagaccttgtcccacccccccccmaaaaaaggaaatcatttgttaaacaagtgaacttgacttacatataaaatcaatgcaaatttccagtgacacacaaaaaactatataaattgacccttgcccttcaaagatgtaatagctatggctttttttgttttgttttgttttttactgttctgaaggtacatcagcacatcagcagctatggtttcttttattcaggagattttgaaggccaaggatgagttgtagttttaatttattaatgcagttttgagtgagttaggggttagcctcgcctactatatactatccgcatctgcatttcagagtggccttgttctctgttggcccttgtgtaggcagtaatggcagaagtgattaaaaacaacaacaaatctccaaagtaagataaatttttttgtatgaaaaacaaatctccaaaattagggccaattctaataataatgaagaaagcaaaaagtaatcactgttcttagtcagaaaatgaagatttaaaggggaagttacacaccatggttatcattcgatttttacattttcaccaaaatcagattccatatactctataaactacagccacatggaacttaccatggtgtttcttggttctatgctttggaaaaactattttctcctactaaagtgtcatgtatgtataattctgctctcctcttcttgcctctctttatcaccccaaacacatagaatataattcctgactttgtctttcaaaatcctgtttatctaagacccctttgtgaagtcttttatgacttctcagatgagctgtttgctcacacagaactttgtacatatcaccttgtttgatttttttgtttttacagttcactcatttaataatgtttagtatagtcacagaattgtgcaaccatcatcacagtcaatattagaacattttcgtcatcaccaaagaaacgctcgtatacatctccctaccccaaactcttggtaactcagatttatgttctgtctttatggatttgcctgcatattttatattacatgatcctgtattttaattgtttgtttacaaatctctctctctccctggactgtaaacttcttaaggataagtacagtgtcttagctaacttcttgtctccagcccttaagacagactatattacatagaaagctcaaattcctatcaattggactaggtgctgagtttacaaagttgaaggttgatcctcttaaggaacttacattgtatatgacttaaggaacttacgttgtatgactgacaaatgcttattgaatgaatgtatgaatgattttttaaaccaatgaacaaaattcttaatcatcaaatctaatggcattcttgttctcctgagccattataatatttgaccctgttgatgtttctgtccttttctgaatgtctctttatcttttattgcacaaatctatcttgatttacttcttgcctaagtattctgactccttaatagactaattttgttttctctgtttgctaaacatacatccacttcaatattttacccttgtatttgttcttcgttttctcccctttgaatattttattcatttacataattttaactaatattttaacttgtttcaaaattcattgtcatattttacaaattattaaggatgaatattctcccttagctttattgaggtaaaattgacaaaaatttcacatatttaaggtgtacaatatgatgtcttgataacacgtatacagtgtggtaaagatcaatccaaataacatatccatcacctcacatggctatctttttttggtgagagggagtaaaagaaaccaagatctactgtcttagcaggtttcaagtgtacagtaccagtacctgtaatcactgttaattgtagtcaccatgctgtacattaagtctccagaatttagtcatcctgcgtatttgaaactttgtaccctttacttattttcctgtttcacccactccctagcccctgctaactaccgttctactctctgcttccaagacttcaactttttatattmcacatgtaggtgagaacatgcagtatttgtctttctgtgcctcacatatttcacatagcatcatgccctccaggttgattcatattgtcacaaatgacaagatttccttctttttaaaggctgagtggtattctattktatgtgtattcatgtacgtgtgtgggtgtgtcacattttctttatccattagtccttcaagggacacttaggttttttccatgtcttggctattgtaaataattctgcaatgaacataggagtacacttatctctttgacatgctaatttcatttcctttggatatatatacccagaagtaggattgctttggattatatggacattttaataattctgtaatctgtggacacagatatgtttctatttatttctgtctttttctgtttctttcctcagtgttttatagttttccgcgtacaggtcttttacctcttttgttatacgtattcctaagtattttgatgttttcgatgctattgttaaatcggattattttcttagtttctttttcagatagttcactgttagtgtatagaaacacaactgatttttgtatgttttgtttcctgctactctactgactttattagttctaacagttttttggtggagtctgtagggttttttatatattagattatgtcatcagtagacagagacagttgtaaaaggaagaatggatgccttttcttttttctgcctaattgctctggctaggacttccaatactatgttgaatagaagtggcgagagtgagcatctttatcttgttcctaatcttaaagtaaaacctttcagcttttcgctgttgattatgatgttatctatgggcttgttatgtttcgatacaacttcatttgttgagttacaacctcatttgttgagtttttatcatgaaaggatgtcgtatttttcatgcaaaaaaattttatattttattatgaaaggatattcatacctttgagctatgtattctacttaagtgctttttcttcacctattaagatttttatcctttgttctgttaatatgatgtattagttttattgctttctatatgttgaaccatccttgcatcacagtgataaatcctacttaattatggcatgtgacctttttaatgtgctgatgaatttggtttgttagtattttattgaggatttttgcatctatattcatcaaggatattggcctgtaattaattttttttttctggtaatgcctttgtctgactttgatgtcagggtagtgctggcctcttaaaatgagttttgaagtattcactcatcttcaatattttggaaatgtttgagaaagattcttcttaaattctttatttgaaatattttgtagaattcactggtgaagccatctggttctgacttttaatgatatttctcaaaatcttaaaaatcttcatacctatgagctattaattctactttaattacctgcctttatcactcttctaatcaggaagaaatgttattttttgaacgtatgcttttggctataaatttcagaaacttttatttatttagctacttttataaataatattggtctctttattgaaagtacatacatgagaacaaagactgctttaataaccacttaataaatatttgtagaatgaatgagtgaaatctcagtcattgccgttaactatttcccccttattttaggaacttataatcaaaactgtattaagctcggcaagagatgagccctctggtcctgcacggtaggtcggatattcttagactgagtataactattttgtgtttggaagtttagaagttgactgaatttttatagcagcccagattgttttagatacataaaagccattctgaattacaattttaagttacttgaataattaagtattcttactttttttcatgatttaaatactaacctttcttcataaacagaatcctagtcacctttttcagtaacttcactctttatctctaaaatgatttgttttaattttattttatttaagtacattttgtttattgttcagttatatttgtcaatgtcttttatgcagtaccttgaaatgcagtagcaggtacccaatgaatttttgttaaattgaattaaaataaaatattttattatagaaagtaatatatctaagaaaatagtatattttaatatttataaatatttgatcaagatttttaaaaatagaatatgtcatagttttagatttttttctaaatgtcttaagaaataaaagctgacattttctctgttttacaaaacctttccaaaaaaagattgagattttaattagcaggttgctagtagcacaccatgtttcttctcttccccaaaataacattaagtcatattttatattcttgatgctaattctaatagtacgtcatttgctacaatattggtctgtgctactactcctcagatctacatctctgcaaagctcctgttttccaatcatctacacattttttgacccaaagttcaaaagttacagatcatggctttgactatttggattcttattctaatttaaatctttttccagcaaatgaaaataatgtacagtgaaccatttgtttaaattaagacatagctccagtttttaaaaatttaattgtatatttttctcaatagccaagctaactaaaaacaaatatatttgagaaaattgttcttttacgctaatcccaattaagtttacaaggattttcgtataatrttgtttcatttaattctcatcacgattttgagagtttaatagaatcaccctcttcttccagttttgctagccagatactgatgcttagaaagttaacagtaagtctctgataatgcatagctggtgggacgggggatgtaggcaagctagctaacatttttaaagccctttgtatgtgcttgctaggcactgttctaagtgccttatatttattatctcattgaattttgtgatacctctatgagacaggtataattttcatccaccttttaatagaaaagaaaactagaacccagggaatttcaataatctgccctgtcatctagatatgacagaaccctggcagtttgtcttcagaggctttttagatgcacaattaataagtggcaataccaagtttgaccttagtgcttaagactgtagatcttttscttttttttaccaaaaaaaaaaaawatatatatatatatatgttgcttctcaagtggaagaatgtggaagcctaaaacgtagctgtctagaggtagacctggaaatcattaacacaacagcttgtgttatggagaatatggaaaaaccccagaagttgaatataagcattgtctcaacttgtttttctatacctttttagtatatgtttttttagaaacatactcccaggccaggcgtggtggctcgtgcctggaatcccagcactttgggaggccgaggagagtggatcacctgaggtcaggagttcgagaccagcctggccaacatggtgaaaccmcgtctctactaaaaatacaaaaaattagccaggtgtcgtagcgtgcccctgtagtcccagctactcaggaagctgaggcaggagaattgcttgaaccgaggaggtggaggttgcagtgagccgagatcgcgccactgcactccagcctgggcaagacagagtgagactctgtctcaaaaaaaaaaaagaaaaaagaaaaagaaaaaagaaacttaatacccccagtctgcacaggagcagagagttgagctatatgctgggaataatctagattattttgacatcttgtggagggggggtgtaggaaactctacatgcaagaaaaaaatatatatatcctttcttatctcctcttgctacaataaaaattgttcagcatttgtgttctaagtctctgcctttagttagctgcatccacggagagctttgcttcacttgagagtttattgttgctttaggattatagatgtttccatagctaaacccgaagcttggttatttagtgctacaaatattacctaggatttatgggtgaacaacaatagggaaaaaataaagtagtagagttcatctagaagactttcaggtaattttcatagtaaacagtttggtagccttaacactctagactgaaagaagagacttaagaccttctgatctgctgtgttaaggaagaagaatctgcattgaatttttctgaagtttagcattccactaaaattaagaatatcagtatcgggacatggcatatataacaggatactagaagaaggtgactgttttgatacttagaaccattatacattttatcagaagcttaaacttgaacacactaatagaatccttactgattctaatcataaaataactctcttcaagctgacacccagctgaaattatattgctacagaaatgaagctttgcaatacattggggaacaggataaaaattctacaagttctgtttctgttggattttaaaataagttacataaattttatgttctcaatttgttttaaaacaatttgtagctaggtgtgttaaatttaaaagatagaaaaatatttaacatattccatcagcttcatgtttttacttaagttcattttgctgttatcagtcaataaaattacactttccattttgaaagcaggttacattttgtttaggaagcttgatagcaatgtcagtctaacagactaacatggatttttaaaaaacatgttgtgtggtatcccagcctgtagtcttcttagtaaattatartagaaaattaggctcagaagttttgggattctgctttcttcatactttctcttctttggttaccagttaatgtatagagtaacaaattcattaattcatktaaaatagtgcatgttcattctgtgtcagttgattgtgggtcatgtttgtggtggtggtttcattttatgtaaccgttgttgtttgccttttttgcagatgtgtagcactttgtagtttaggtatttggatttgtgaagaactagtccatgagtctcatcatcctcaaattaaggaagctctgaatgtgatttgtgtttccttaaaggtaaagaaaactgtttagtgaaatatattaagataggagagaatgcatatttttttctccaaatattaatggtatcttgtgtaacatttagtaaatgttttcattactttattattctattattttcttgatcctgactcattccttaaaaattgttctgtttcttgaatttagggtatctttatggtgacccattttyatctcaactttttatgtattttagctttgtccctaaactatatatggtagacatctaaaaaaggaaacccaccatttaaaacatatatagggtttttctggtttttttttaactagtatttttgtaacttactgttctttgatctttattaccactccctgaattcttgagctgttcagtttttttgctttatcttttcaagttatgtgccttctttgtagacagacaagattttttcagtagtaataatgtaattatttggagagtctgaatgaataaatgagtactttttgtttatgaaaggatgcatgatattattgttgttttaagacttgtaaaacccacagcacctgtataagactctaaacatacaaagtagctaataaatatttttaaataatagttacatgacagatatttctaaatatttactatgaggcacattgctagacagtgagggataacaataggaaaaaatcgtaaatactagcttcaagatattaataatagctgaaaaagattaaaatgagaataataaaacataaaaacctgagagtactaaatgggtatataatataaactgcgtgtataatataaactgctgattcagtttggaagaaacagaaatcattttgacttagttatcagagaagactggaaaagaggagacacattggggtttgaagtgtgggtgaaatgtggacgtagagaagcatgaaaagtttgtctttatgccattggggagtcctctgagttttaagcataatgtcaggatcataacagtgctatagaagattaatttggaagtgtggtgaatagttgattggaacagggcaaagattgataaaaagaatagtggtttagaggccactgcataaatccacataagagaaaatgcaacaaaactttaatgaggacagtcaaacattacaaaggaaaattaaagttgtatgtgtctttggaatgtgttgtgattttttttattttgcagctagagatttatcttaatcacctataaatgtaggatttataatcctacaaatgtatgaaatgtaaaaattttcagcagataatacattgatgaaaagttcatcatgaaaatttttaaaactttttttttattattgcagtttactaataaaacagtagcccacgtagcttgtaacatgcttcacatgctggttcattatgtacctagacttcagatttaccagcctgattctcccttgaaaattattcaagtaagtaatttctcatttatttattatgaccttgttaaatttttttagatttggatactttgaattgtaaaattatttaatagttttaaaatttttttgcatagctaaataatggctacccatcatgcttttttgtggtatcaaagttcatgatagttcccttgtcttttatgttagaagattgcattcctggttttggacaaagtaaaagcactagaaacaatttattaggccagcctggtggcttatgcctgtaatccaggcactttgggagactaagttgaaaggatcgattgaggccaggacttagagaccagcctaggtaacatagcaagaccctggctcaacaaacagttaaacaaaaaacaatttattagttgtagtgaaaattaaatgctatgtgtaaacttatgtcatcgtctttataaacatgtatgttgctttattccctcttaagtagggaaaacataccatccagttaccacaatcaggtcattattttttttctttcctctttagccagtcatttgtgaatttttgttcattctaattcggtgtctcctgtgcttcctgcaacacctgacgtatttcattccttcattatttctttcttgagatattgctgttgccttctcctggtttgtgtggtcttgctcttaaagtcatcattcacatttacatggctcttaccatatcacatacccccacaaaaaaaaaaaatctctgattttcctttggctataaaataaagcccaaattctttagctgtgaattcagggccttcacaggagaacccaactggttttttaagaatcatgtacagattcctttgaaatgccatgttgttcaggcaactgagtctgcttgtcatcacttaaacatacccctggctttcttcctcctagctgaaatgctttgcttctcttctctagtgccctcatctttcagtgattggcttaaataccatctcctcaaaaaataaaaatcgctatctgctctccctaaccagaatttatcattcttatcttcctatctttatracatttttaggacagatgggaactaatatttattaaacacctactatgtaccagtcaccttttcatatgatatctcatttaattcttagaagttttttgagatagattattcccttccctgtccccaatctcccctccttatttaagatgagagaactgaggatttaataactacataagagtcataagccaagagaacaggactcagacccaggtctgtaagattccaaagttcatgcttttcccactcagtcatcttaccagactctattacagcactaaatgtagtaagtatcgcactagtgagtaaagcctttttctgtataaagtatatttagaggaatttttctacttactacattgaggcaataatttctaaaaaatgtaatagcatacaatacagctaaaataaaaatacaataaatatatacctatacatttttaacatgcacataaaaaattaaataagactaaatgatttccagggtaaatgataacactgtatatgaagattttgcctttttttaaataatgtctttttcatttactttgtattctgtactttatatttattcaaataatattcagtgtataatatatgttaatttaaaaagccacatttggctgggcacggtggctcatgcctgtaatcccagcactttgggaggctgaggtgggcggatcacctgaggttaggagttcgagaccagcctggccaacatgttgaaactccgtctctactaaaaatacaaaaattagctgggcgtggtggcccacacctgtaatcccagctactcaggaggctgaggcaagagaatcacttgaacccagagctgagattgctccactgcactccagcctgggtggctgagtgagactccatctcaaaaaaataaataaataaaaagtcacatttttaaaaaagccttatatgtgtgtgtgtatatatatatatatatataaacaaaaggcctggaaaggcaatagagtagatttcttcaggtgataggattacagtggttttttgttgttttgagacagggtctctgtcgcccaagctcccaaagtgggtttgagccaccgtgcccagcctatgatggtttttattagtctttttcttatctgtgtcttttaatttttctataatgaacatatattttctgtgtgtttgtacatagtgatttacccccttgaattgggaagaaatccatttatggttgacagaatatgtataattttggttctgtacatgaggattataaataattgatagttaactatacttgaaaagcttacctattaaacattactttgaaataacagtgttaatgtgtttagaataaatttgcagtagtaggttttgtatcacttcagcatttaacaatcaagttttaggatgtaccattaatttgacatatatagagcttttaaaaaaattttttttgcttacagatcctaatagctaccatcacccatcttttaccaagtacagaggcttcatcttatgaaatggacaagagggtaatttaaattttgtttgatgattagtatgtggttatttagtaaaatatttgcatttcaaaactttaaaggtatgtatatttacatggtaaaaatttatccttgttcagaatctactataatgtgaaatgcctttctgttatttaagtataactaaattatattttggttcacatttcattgccatttgataaaatctttgagtctcaagattgtaaggaaccttagaggacattctgtccacctctatttcattacattctgccaaattgtgttcttacctttgcctgaagattgttaattctgaggagttaatcacctctaaaggcagccacttgtttttgtatagatagaaagtaaagataaaatatatagagatacgtcatttaaaagaagacatctcctgtgtctgcgaaaacattctactaggtgacatttacctcagtaaattcattatgagggttctttaattttttcagatattgtatttaccagttctagagttactttttgttttgtttttaagtttccatatcttatctgaaattctgcatttcttcatcaattatatacatcttctcttatagatactttaacatatttataataattaaaatagagtccttgactactaaatccagtatctgggtcatcactaactccgtttctattgagtttttttcttttgactatgagtttcattttcctgttattatgtctattttttaattatatgcctgacattatacataaatgttgtagagactctaggtcggtgctgctcactatggtagctactaactgtgtrttgctttcagttgacactaaatttagtttaaagttcacatgaaaaatgtaattcctcgtttgcaaatatcaagtgctcaatagccatatgggcaaatatagaccattttcatcattgcacaaagttctgttagacaaggcacaaagttctgttagacaaggctgctctagattctattagtttcctctgagaattattctcatctcttcccttgtcatatctcaatcttgagttctattctccaggtctccccttaaccatattgttttgaaatctcaagtatgttttatttactgcttatgttcttattaatttacagaaatctgaagctatagttatgtttctggacctattcccagttattttcttgtgtggcatacatgaggctttcatagttttttcttttcctactgtctgccattatcatttcttactgatttcatgtgtttacctcaaaactttttattctttcccttcatattcagtttaaacaccatttgaacagattgtttagctcttgataaatactttatcatcatcatcttcatctttaaaagagacatatacttcatttttattttttttattttaaatttttaacatttttttgaggcggagtcatctcactctgtcacccaagctggagtactgtggcacagtctcggctcactgcaacctctgcctcccaggttcaagcggttctcgtgcttcagccattcaagtaactgggattacaggtgtacaccaccatgcctggctaattttttatttttagtagagatgtgtcgggggcgggggggtctcatcatcttggccaggccggtctcaaactcctggccccaagtgatccacctgcctcggcctcccaaagtgctgggattacaggcgtgagctacctcatccggcctccatttttagccaagaatccttcgctttagtgtcgcaggctatggtgtagaattccaaatccagtttatgaataatttctggataactacttgttcatctttttctatatcatctttgtcttccagaagtctagctattaatatgaaaaagctatacttctaagtttttgttttcttgcccactaaatttattaaacatttatttatcataaaatatgagtgtggcgttctgctaggcactaaacagaggtaaacatgatactccctgttctcatggaatttaaaaattagagacacaaatgaggcaacacaatataataaatagtataaaaagtagaaaaatgtatgagatacaaggtagaatagagaaagaagtaattaactattggggaaaggcatatttaggaaaaattcttttaaagttaaatagagacataaatagagacaaacagtagaatcagaaaattattccaagtggtatgaatagcatgtgtaaatctggggactataaaatagtatggtttgttttggagaaacaactaggcagttccatattttagaatgtgaagtggacagttaagagttgggaaaataaagtttctaagataggaaggggccagattataaagggccttggatgccacactatgaacgtggtacttctgtgaaagtgacttttttgaaaggtttttatgtaggataaaatatgaccagatttgtgaaaaatcacttgagaaaatgtgaaagttgacttaaaagtcaaaatatggtgattattattaaaatcatctttataagaattgatgacgttctgagctaaggctaaaggaatagagaatagatactcacaaagtagaacccacagccaaggtgaggaatacaggaaagagcagctttgttggagcagtgagtttcagttctcagtttgttgcatataaaaagtaatmtccaggtggagaccaccagcaaggcaattatatacctgattagaaaatttgatgctggaaataaaattattggcattgtcagtacatgagtagtattaacattgtgagaatatatgaaatcacttaaggcgatatagtagagtaagatgagttagcaaagtatagcacattaaagaataacagttaaggagaaggcagagaagatgattcagtaaaagtgactgaaaggactagtaggaaaggtaggaagaacaccaggtctaggagagagtaatcacatagaagacaatcaaatcatcccgaaaatgcttttttgatctcagactttattcactgttttttttgagacagggtctcactctgtcacccaggctggagtacagtggcgcaatctagactcactgcaacctccacctcccacactcaagtgatcctcccacctcagcccccaaaatgggaccacaggcgtacgccaccatgcccagctaattattgtatttttagtagagatggggttttgctatgttgcctaggctggtcaggagctggtcacttcagctcaggagcttgagctgaagtgaaccgcccgccttggcctccctaagtgctgggattacagatgtgagtcactgtgcccagcctatcattcactcttcttcttcttttttttttttttgagatggagttttgctctgttgcccaagctggaatactgtggtgcagtctcggctcactgcaatctccgcctcctaggttcaagtgattctcctgcctcagcctcctgagtagctgggattacaggcgtgcrccaccatgcccaactaattttttttttcttttttttgagacaggagtctccctctattgcccaggctggcatgtagtggcacaatctyggctcattgcaacctccgtctcctgggttcaagtgattcttctgcctcagcctcccaagtagctggaactacagacacatgccaccacaccttgctagtttttttttggttggtttttttttttgtttttttcagtagagatgggrtttcaccgtatgggccaggctagtcgtgaactcctgacctggtgatccacccgcccgacctcccaaagtgctgggtttacaggcgtgagccttcccacccagcctcaaatatgctttatcttaaacatcttatttatttatttatttatttagagacggagtttcgctgtgtcacccaggctggagtgcagtggcgtgatctcagctcactgcaacctccgcctcccaggttcaagcaattctcctgcctcagcctccctagtagctggggctacaagcacacaccactatgctaatttttgtatttttagtggagatggggtttcaccatattggccaggctggtctcaaattcctgacctcaggtgatccacctgcctggacctcccaaagtgctgggattacaggcgtgagccaccacacctgcccttaaacctctttataattatacattcctctctgtgtgatgaacatcagaatattacctaaatccactggttcttctccactatgttgcattccagtatcttctaatttttttgaattgggtttttattatcttttattagaagctggcacactacatatggacaaatagatatattgaatcattttaattatgttattatttctctaggaactcttaatctcatgcaagccaccagtatagggaggcatttctcatgtatgatattcagattgctgctccttaacctcaaatgtttaagaacttgaataaactgtatatgggccaggagtttttagacttctcaaacggctcattgtcattggtgaatatgggcttgggctaacaggttttaaaagataaattcaataaaaataaagcaaaaagaacatttatatagtgatttttttttaaaatcacgtgccagcagtgtgtactttatatgcattatttcaacatcaaaacaactttataatcttgataaatattttttaatccctattcttcatagagaattgagccttagaaaggttaagttgcccaaggtcacaaaattgttactaaatatcagagccaagactggaatctgtgattgacagatagatgccaaagtccatactgtttttagttagaaacatcaattgagagcttccatttgagttttatggtggaattgttttcttttaacataatttcaagtttatagaaacattgaaagggtagtacaaagaattatttatattggttcacmacatttgctttatccctttgtatgtagtatgaaatagagagagaaataaatgtgtatactgctgactactttattgtgtttttcctaaaatcaagcaattctcttatataaccacaaaatagttgtcaacatgaggaaattagcattagtattagtgatacatttgtattatctaatctatagatatttcactagttgtctcactaacatcctgtagggcaaaagaaattcccaaattatgccttacatgcagtcataatgtctctttagccttctatagtatggaacaggttcttaatctttctatatttcttgaccttgacattttaaagaatacagtctagttactgtataaaatgtcctgcgttttggctttgtgtttcatcatgattaggtttgttattattggatttaaattaggcgtatttggcaggaatacctcagaagattttgtgcacctcttaatacattatatcaggtgtcacagatgtcagtttgtttcattactgattggtgctaacttcagtcaaatgattaaggttgtgtctgccaggtgttcccactgtaaagctactgtttaatccttttcaatgaattagtatttgtaagacaatactttgagactatactatataaatatttgactccttaaatttccactaactggttttgctaatcattaatgactcttaccagaaacaattattgttacagtagctgccaaatgatgatttcctaattcatcattttttctacattcattagttagctttctacgtataaggaagagctttcctttctttcttattcatcttatttcaatgtgggctcatgattctgattttatgcaatgatttgtaatccttaactattatttattttggtgctcaaaatgtctcatacttagccagtgggagccccttcaaagtggcttctttttcataaatccccattattttgggggcatgcttttaatttctgtcagcacacaattttccagactcactttgtgctttccctgtcccagccctgaaattacccatttctccaagaaaccctgcttccgttaagtggcaaatggtgtttagaaatcagtatctaagaactaggcatgcacattgctactgggatatcttttttttttttttttttggagatggagtctcgctctgtcgcccaggctggagtgccccrgcgcgatctcggctcactgcaagctccgcctcccgggttcacgccattctcctgcccagcctcccgagtagctgggactacaggcgcccgccaccacgcctggctaatttttttgtatttttagtagagacggggtttcacygtgttagccaggatggtctcgatctcctgacctcgtgatctgcctgtctcagcctcccaaagtggtgggattacaggcgtgagccattgcgcccggcctggggtatcgtttcttaagtcctctttggcagatacagctaggaaatacataacatayacacacacacacacacacacacacacacacacacacacacacacccatctctatatctgctatagactgaatgtttgtgtctctcccgaagttcatatatggaaatcctaatgcccagtgtcatgggatttggaggtggggcctttgagaggtaattaggtcgtgaggatgaagccctcatcaatgggattagtgcccttataagaagagagatgaactaatatccaccgtgtgaagatacactagaaggtggtcatctaacaagccagaaagaggaccctcacatatactgaattggctgccaccttgatcttcaactttctagctttcagaactgtgaggaataaatttctcttgtttaagccacccagtgtaaagtatttgtaatgccagcacagacagaataagatggtatctaattataagtattaaaaaccttgagttcacactgacacctccaattcttattttattttattttactttaagttccaggatacatgtgcagaatgtgcaggtttgttacatgggtagacaagtgccatggtgttttgctgcacctgtcaaccygtcaccacatgcattagctgtttgtcctgatgctctccctcaccttcccccaccaacaggccccagtctgacacctccacgtctaatccaacaccacgagattcagtccatccttccccgttttccttatttgtaactccctgctccagcaatgaaaaatctggtttccatattgattatttatctggatatgtttacttctttgtgctgttctatttttttaaattattaacttatgcctctttatagttaagagtgcttgtctttaccaagagagattattgtttgaaaaatgtgttcataagttatttgggttacttcgtagtccccctttcccacttcagtatggttatataattaccttgaaattcagttcaggtcacttttttctgtttgtatgcagttttagggtctttgtcccatctctgttgttttaatttttttagtctatggttcatccatcctatgattgttttttcacaaatgaacagatgcatgtatatcgtcttttattccttgtttgttacacatagcctagatagtctttgctttggatttttcacttgacagtgtatcttggaaatccttaatacgtaagttcatagagatcttccccatctttttatttattgaaaattgttctgggtacatagtaggtgtatatatttatggagtgcatgggatattttgacagagacatacagtgcataatatgtcaggataaatggggtatccttcccctcaagcacttatcctttctgtgtgttacaaaataatccaattatatgtttttagttatttttaaatgtacaattcagttattttttactatagtcactctgttttgctagcaaatattatattttattcattctttctattttttagaacccattaaccatccccacttaccccatactccccactgcccttcccagtctctggtaaccatcattctattctctgtctccatgagttcagttgttttcatatttatctcccacagataagtgagagcatgcaatgtttgtctttctgtgcctggcttatttcacttaacataatgacttccagttccatctatcttgttgcaaatgacaagatctcattcttctttatggctgaatagtactcccttgcatatatgtaccacttttctttatccattcatctgttgatggacacttaggttggtcccaaattttggctattgtaaataatactgcagtaaacatgggaatgtaggtatctcttagatatgctgatttcctttcatttgggtatatacctagcagtaggattactggatcatatagtagttatctttgttagttttttgaggaacctcgaaactgttctccatagtggttgtactaacataaattcccaccaacagtgtatgagggttcccttttctccacatcctcgccagcatttattgcctgtcttttggataaacccattttattttatttattttattattattattatactttaagttctagggtacatgtgcacaatgtgcaggtttgttacatatgtatacatgtgccatgttagtgtgctgcacccattaactcgtcatttacattaggtatatttcctaatgctatccctcccgcctccccccacccctcgaaaggccctggtgtgtgatgtttcccatcctgtgtctaagtgttctcattgttcaattcccacctatgaatgagaacttgcggtgtttggttttctgtccttgcgacagtttgctcagaatgatggtttccagctttatccatgtccctacaaaggacatgaactcatcctttttatggctgcatagtattccatggtgtatatttgccacattttcttaatctagtctatcattgatggacacttgagttggttcyaagtctttgctatcgtgaatagtgccacagtaaacatacacgtgcatatgtccttatagcagcatgacttataatcctttgggtatatacccagtaattagatggctgggtcaaatggtatttctagttctagatccttgaggaattgccacactgtcttccacaatggttgaactagtttacactccaaccrtgtaaaagtgttcctgtttctccacatcctctccagcacctgttgtttcctgactttttaatgatcaccattctaactggtgtgagatggtatctcattgtgggataaaacccattttaactgaggtgagatgatatctcattgtatttagtagttttgatttgcatttctctgatgatgttgagcatcttttcataagttcatatgtgttcatatgaacttgttttcatatagtcatatgaacatattaacttgttttccttttttatgtcttcttttgagaaatgtctgttcagatcttcagcccattttaaatcaaattgttaaaattttttctgtagtgttgtttgagttccttgtatattctggttattaatagcttgtcatattattttgtaaatattttctccccttctgtgggttgtctcttcactttgttgaccatttactttgccgtgcagaatctttttaactttatgtgatcctatttgttcatttttgttttggttgcctgtgcttgtagggtattactccagaaatctgcccagtccaatgccctcaagagtttcctcaatgttttcttgtagtagtttcataatttgaggtcttagatttaagtctctaatgcgttttgatttgatttttatatatggcaggagttagggatctagttttgttcctctgcatgtggataaccagttatctcagcaccatatattgaagagactgtcctttccataatatatattatttacctttgtttaaaatgacttcactgtagatgtacaatttgtttctgggttctctatactgttccattggtctatgtgtcagtttttatgccagttccatactgttttgataattatggctctgtagtattatttgaaatcagataatgtgattcttccagttttgttcattttgctcaggatagctttgactgttttgggtcttttattgttgcatataaattttaggattgtttgttctgtttctataaagaatgtcattggcattttgatagggattgcattgaacctatagattgatttgggtagtatggacatgattattgaaaataatgattctttcaatacatgaacatggaatagctttccattgtttcgtgtctttttcaatttctttcatcagtgttttacagtttttattgtagaaatctttcacttcttagattaattccgaactatttaatttcatttgtagctattggaaatggcattactttcttgatttctttttcagattgttcactgttggcacatagaaatgctactaatttttgtatgttgattttgtatcctgcagctttactgaatttgacgttgtttatcagttctaatagttatttgatagagtctttaggtctttccaaatataagatcatatcgtcagcaaacaaggataatttgatgtcttcctttccaatttgcataccctttatttctctctcttgtctgcttgctctagctaggacctccagtactgtgtcaaatgatagtggtggaagtggacacctttgtcttgttctagatcttagagaaaaggatttcagtttctctgcattcagaatgatactacctgtgggtctgtcctaatatggcttttattatgttgaggtgtgttccttcccagtttttttgtggggggaggggaggaggtgttcatcatgaagggatgttgaatttcatcagatgctttttcagcagcaactgaaattatcacaaaggtttttgtcctttattttgttgacaaaaatgtatcacattgattgatttgtgtatgttgaatcatccttgaatccctgggataaatctcccttggtcatggtgagtgatatttctaatgcattgttgaatttggtttgctagtattttgtcgaggatttttgcatcaatgttcatcaggaatattggcctgtagttttctttttgttgatgtcttttattttgatattagggtaatattggcctcatagaatgagtttggaaatacttcctcctctgtttttcagaatagtttcagaaggattggtattagttctttaaatgtttggtagaatttagcaatgaagccattgggtcctgggcctttctttggtgacagactttttattacagctttattcttgttatatgttactggtctgttcaggttttgcatttcttcatgattaaatcttaatagattttatgtgtctaggagtttatccgtttcttctaggttttccagtttattggcatatagttgttcatagtagccgctctgttgatcttttaatttctgctgtatcggtttttaatgtctcctctttcatttctgattttatttgagtcttgtttctttttttcttagtggccaaaggtttgtcaattttatcttttttaaaaaatcaattttttgtttcatgtgccaatttttcatttcattgatcttttgtatttttgccatttcagttttattcatttctgctctgatctttattatttttattctgcttactttgggtttggtttgctcttgcttttctggttctttaagatgcattgttagsttgtttacttgacgtttttctgcttttttgatgtaggtgcttatagctataaacttccctcttagtactgctttcactgtatcctataggtttgggtatgttgtgtttccattatcatttgtttccagaaactttcagtttttttcttaatctcttcattgacccacagatcattcaggaagatattgtttaatttcttttttttttttttcttttgagacagagtctcagcctctcgcccaggctgaactgcagtggtgcaatcttgactcactgcaagctctgcctcccaggttcacaccattctcctgcctcagcctcccgagtagctgggactacaggtgcccgccaccacgcccgactaattttttgtatttttagtagagacggggtttcaccgtcttagccaggatggtctcaatctcctgacctcatgatccgcccacctcggcctccgaaagtgctgggattacaggcacgagccaccgcacctggccaatattgtttaattcctaagtgtttgtatagtttccaaaattcctcttattttttatttctagttttattccattggggtcagagaagatacttaatattatttcaatttttaaaaatatgttaagacttattttttggcctaacatatggtctgtcctttagaatgttacagatgctgaggagaaaaatgtgcattccacagccattggatgaaatgttctgtaaatatccatttggtccatactgcacattaagtccaatgtctctgttgattttctgtctggatgaaatgtccaatgctgaaagtgtggtgtttaagtcttcagctattattgtattggcatatatctctctctttagctctaataatatttgctttatatatcagggtgctccagtgttgagtgcatatatatttataattgttttatcctcttgctgaattaatccctttatcatcacataatgaccttttttgtcttgaaatctattttgtctgatgcaagtgtaactacttctgctttttttggtttccatttgcatagaacatcttcatccctttattttcactatatgtgtgtctttataggcaaagtgtgtttcttgtaggcaacagatcgttgggttttatttttttaatctgttcagccactctctcttttgattgagtttagtctatttacattcagtggtttttattttttattctttttttttctttctttctttttgagacagagtcttgctctgtcacccaggctggagtgcagcggcgcaatctcagctcactgcaacctctacctcctgggttcaaacgattcacctgcctcagccttccaactagctgggactacaagcacacaccaccacacccagctaattttttggttttttagtagagataggatttcaccatgcaggccaggctggtctcaaactcgtgacctcaggtgatctgcttacctcagcctcccagagtgttgggattacaggtgtgagccgccatgcccagcctcagtggtattattgataagtaggtacttactccttccactttattatttattttcttgttgtttttcaggcttctcatccttctttccttccttcctgttttccttttagtgaaggtgattttctctggtattatggttttgtttcttgctttttattttttttatatccattgtatgtgtttatattggaggttaccataaggcttgcaagtaatatcttataacccattattttaaactaatgccaacttgacactgactgcataaacaacaagcaaaaagaaaattaataacaactctacatattaacttaatccccctgctttttaactttttattctttctatttatatcttattgtactgtccatgtcttgaaaagttgttgttattattttttattggttcatcttttcatctttctacttcaatatgagtagtttacacaccacaattacagcgttatagtattctgtggttttctgtttacttactatcaccagtgagttttggaccttcagataatttcttactgctcattaacattcttttctttcagactgaagaaatccctttagcatttcttgtgggacagatttggtgttgatgaaatccctcagcttttgtttgtctgggaaagtctgtatttcttctccatgttcgaaggatattttcactggatatattattttagaataagttttttttcctttagcactttaaatatgtcatgccattctctcctggcctgtaagatttctactgagaagtctgcttccaaatgtattggagctccattgtatgttatttgtttcttttatcttgctgcttttataatccttttatccttgacctttgagagtttgattattaaatgtcttaaggtagtcatatttggataaaatctgcttagtgttctataacctacttgtacttgagtgttcatatctttctctgggtttgggaagttctatgtttttatccttcttaataaactttatatcccaatctatctcctctttaaagccaataactctagatttacccttttgatgctcttttctagttcttataggtgtgttttattcttttttcttcttttttcttttgtcgcctctgactgtgtattttcaaatagcttgtcttcagcctcaccaattcttttttctgcaktatccgttctgccattaaaagaactctgatgcattcttcagtacactagttgcatttttcagctccagaatttctacttggttctttttagttatttcaatctctttgttaaatttatctcataggattctgaatttcttctctgtgttatcttgaatttcattgarcttcttcaaaacagctgttttgaattctctgtcaggtgacatctctgtctctctgggattggtcattggtgccttatttaattcatttggtgaggtcatgttttcctggatggtcttgatgtttgttgatgttcattggtgtgtgggcattgaagagttaggtatttatcatagtcttcgcagtctgggtttgtttgtcttctccccctaagcattacctttcctatgtgtacttctacatcctttctttttactcactactctgatctaccagtatacttttttaatattctcacacttaaggtggactttttctttctggcatggttttagatcagtcttagattcacagcaagttcccatcttctctctttcacagtttttcccaaactacccttgcttttcatgaaaacctgcagtgggagaatgggagaaagatgctgggatttgctgcatatttttctacttacagataattcgaggctcggtgcagtggctcatgcctgtaatctgagcactttgagaggccaaggcagacagatcacttgaggctaggagttcaagaccagcctggccaacgtggcaaaacctcgtctctcctaaaaatacaaaacttagccgggcacagtggcacatgcctgtaatcccagttacttaggtggctgaggtgcaagaatcacttgaacccaggaagtgaaggttgcaatgagctgagatcatgccactgcactccagcctgggtgacagagcaagactgtctcaaaaataaaaattaaaaaaatagataatttgaagtttggatgttctttgtcttctgataatatggaagctgttgttttgtgaggttttattgggccttcttattgttccttattttatttattttttggaagatatgttgggagatgtagaccagaattacttgagttggagagttcgtttttaaagattagcaagtctcttgttgctatttcattgtcagtttcatggcactatttgtgattctttaatacaatgaattctgctattgtattctacattttgtataaaaagtgacctgtttatagcattcattagtttaaaagtgtccatccaggcatgatggtgtgcaccttgtagtcccagctatttggaagtctgaggctggaatattgcctgagcccaagagttcaaggccagcctgggcaatatagcaagactccctctctttgaaaaaaaacaaaaacaaaaaagcgtgttcagtggattcatttagtaaaatgagtaacaatttcaaaaagtacttaaggtagtcttactggcaggctattcagtgagatgttgttaagttagaaaaggaaagtggaagtgattataatatatatggacttccatttgtgttccattccttgtgcaatggaataagtatagttaattgatatgtgttgtcttttaagcttgctgtttttatattaattttaacatttctgtttttattatgcttactgtttcattatgcttgccctgacatatgaaagagaaacccacaataatgttcatatacaatatcttaaaatcagttagatctgggtaaatattaatagtggaacttagggttgatgattccagaaacaaattttggaaactcaagaataagaaaatgaatttttaagaagcatatattttakgaatgtacaattataatgattctattgttgttacagttggtagtatctttacttctctgccttctggactggatcatggccttacctctaaagacactgctccaaccatttcatgctacgggagcagaaagcgataaaacagaaaaatctgttctcaattgcatttataaggtraacttccttgctttattatttatttggtaaccaagagtttttaaaacctagagaaataacatttctcagtataacatttttattcttttagagctagaaaatttctaagaacacatatttagcttacagtgcctaagggtaatttaaaagtgcttcctacaagacaccgttgtttcattgcaaaattttgagaggaattagatcattgttacatatgagtataatttaattttagtcattctttgtaagaggtattgaattttaccttgatttttttttttcttttattgaaacggagtttcactcttgttacccaggctggagtgcaatggctcaatctcggctcactgcaacctccgtctcctggattcaagcaattctcttgcctcagtctcctgagtagctgggataacaggcgcccaccaccacacctggctaatttttgtatttttagtagacacagcgtttcgccatgttgccaggctggtctggaactcctgatctcaagtgatccacctggctgggcctccctgtaatccctgctgggattacaggcatgagccactgtgccaggcctgatgttttaaaatatttaaaatctttgccaggctcttgtgttaccagttgatttttatcctcctttaacttttatttatttatttattttttaagtaaaactgggtgtttccccctgtattttcaggttttacatgggtgtgtttatggagctcagtgttttagcaatccaaggtattttcccatgagcctctctgatttggcatctgtagattatgatccttttatgcatttggaaagtctgaaagagcctgagcctctgcactctcctgactcagaacgatcttctaaactccagccagtaacagaaggtaacatgaattctgttcaggacaatattgttgcttgggttctctcaaggtataacttgaggccatgggtggaaatattggagaaggagagtatgtcttactttgtagttgtttaaccatgtatgtatagcacaagttcattattaattaaagaaataacttcacatgcacaattactaatattatatgttgacattgcttttatgcaaattcagtattccttatctgaaatgcatgggaccagaagtgttaaagattttggattttttcaccttttggaatatttgcattatacttaccagttgagcatccctaatctgaaaatccaaaatctgaaatgctccaatgagcatttcctttgagcatcatgccaacactcaaaatttttggatttcagattttcagattagggatactcaacatgtacttctggctaaattattcttagaagttctttttgatattttatatataatggaatttatatagaataaaaaatatagctttggagtctgacctgaattttgactctcaattgctaaatatctgttttcttatttgtaaaatgcaaatattagtttcctctaaggtttttttaagtactaagtaagataatatatgtaaagccctttgtacaatccttacttagtacatagttaactcagtaacatttttaagccacgtttctgcattcagagcattctctctctgatagaagagaaagatgtaatagaagcaaataaccttataatgtaataggagtgtaacaatagaagtatatataagatatagaggtaaagtagaggaacccagcaattgctgaaggttttaagaaagggagatagaggatacaatttatattaagagcacttttgataatagtattttataggagttggtaaattatggcccattgctaccgcctgtttttataattttattgtgatacatccatattgtcattatggttacttttgtataacaacagcagtattgagtaacagtagagattgcgtggctcacaaaaccaaaagtatttattatttggcccttcatagaaaaagtgtactgactcctggtatattagattgatttggccagttaacccagaaggtacagataggttgtctagaacataaatacactattgaaataggaatttaagatttaaattgtttctcaaatataaaagaggtataacaagcagtataaagcaaaaaacaattagacaaaatttatataagcaatttaaaattatatttttagatttgacgtaataagataccatgtttattttacttaaaaatatggttatgtgaaaataatagttgacctttgcacatttaaggtataaaatggcagtttttattcaagacaatatagtatgtttcttgaacaaagcaatagagtttgcttatttcaaaggaagttttaattttagattttgtacaaaatttactgtgccaatrtcagtcactgtaaaagaagcaaaggaaaagatgtaaatagattagcttaatattgatatcaaatactctgtgcagtacccttctctaaacgtatcaagttgttccctttggacttcctcaaaggttttaaggaccagataaatgcagaaccttttaggaacagctgtgagctaacagcacatgattctctggtctgtagtgactacatgctctgggtgttttttaatgtggtgaaaatgagtgatcattgtgcccttgtctaaggcatgtttcatcatcttcaagtacttttttggccaaagaattctaaacattgagtgtccctaataagctcagtactggattgaacaagtctgatttgagaactattgtcaggagtggctgtaattattaaatttactaaagaataaagcaaggtagtgaagttggctttttgtcaaatggcagtagtcttattagcaaaaagtcatcatttgccgggtcagagtgaaaggaggctccaaaggattcattctgtcctaattatagtttcacctatacttattatgcaaagctaatatttaaagcatttgccaaaattaacttcctctgcatgttctattacagtgcagtgaattgcagcagctttttatgtcttgctgcttttgtacgccataataatctgtaattatgggtttgctgcaaatgctgtaggatttgtttaatctgacaatctgaagagacaaccctgaatagagttatttaaatgaatgctagttacacaaagccttagaagcatcgatatctccattttacattttctcacaagactggttattttagaattttattttaaatatctaaactagagaatttcatgtcttctttgtattttagtagataagtagaagagagatatgtatgttctatagtttatagctcaaaaataagtataaataaatttattgcccaataaacaatttgagagatttttatccttttatatacagacatatatcctgaatttagagaagcaacttagggcagaaaatgctttacctacatctgagatttaaatttattctttacgtgttttcaatgtgagtaattatgacagacttgtgaacaagctcatttaaactgcattctcattgtctctacctttgggaagaagacatatgggatactctggtacctgagcttcgaggtttatgttttagggaaagacctggctcattcttggagtttatttataagtaggtttgaaaaagaaactcataagacctatgttacttataatgctctttaaattgaatgattttttattgtttctgttatatccagttttgtatgtaaaagtttttaactcatctttacaaataagtatgcaattcttacrgaaaaatggagtttaaggaatcttatgtatttgtgatcatgaatcacagagcaagccaaagccagggattcttctcttttctatggtggtttcttttcaattatactctttcccttcttcagagtgtaaacttctatgttatgcaaagaggatttaatgcttagaatgagtcatctatttaagtatgtcactcaaaagggagagtgaagaatagaaaaatctttttctatatcaaaaattttaaaatgactaattttaatttttgttaccatttaaaattcggtttagtcttgatttttttccattgatctttgctttttatttagtaatttatcctaagtaatacttttttgaagttcttatacagagagaaaaataaattttgaattcattgtttccatatctcataaagaaaaagacagtttaacaaaagagaaaaaagtatggaaattagagctgtggtaaagagggaaataacactgagctgggaagcaaaagacatctcctatggcaggcaaatcacttaactttgcgaacccatttgtcctcatgtgcaaaatgaggaataccagctagattatccccttatagtgtgaacatttattatattctaggttataattagggaagggaaagcaaacactagattcaagctacctatttcttgtcatatagctcaaaatactttttactttccttacattcttaaaaatgaaggattgaattaaagttaatcatttagtgttattaatctagtattgaatggctggttattagtaataatcataaaaataacttttaaaaatttcaatataattggaacttttatttatttattttcttttttatttttttaagacagagcctcactcttgttacccaggctgaagtgcagtggcgcgatctcagttcactgcaacctccgcctgccaggttcaagtgattctcctgcctcagcctcctgaggcacacccagctaatttttgtattttttggtagagacacggtttcgccatgttggccaggctggtctcgaactactgacctcaggtgattggcccgcctcagcttcccaaagtgctgggattacaagtgtgagccaccacacccagccattaattggaacttttagactaagaaatgttgggtgggtgcagtcactcacacttgtaatcccagcactttgggaggccctggctggtggatcacttggggtcaagagttcaagaccagcctgaccaacatggtgaagcctcttctctaatgtaaaaattagccaggcgtggtggcacatgcttgtaataccagctatttgggaagctgaggcaggagaattgcttgaactcgggaggcagaggctgcagtgagccaagatcgtgccactgcactccagcctgggtgacacagcaagactctgtcccaaaaaaaaaaaaccagtaaataagctaagaaatgtttatatttacatttatgtagacataacttggctgataatgggaaattaaaattttgatactcagcaacattttaaaatcaaccaaagcccaaaggaaactattcttttttggaattggagaagatggtattaacatcaatggcatagcagctggttggttggtttgcctatacccagtggtattggttctgaatcttgaaggctaaagccttgaaaatgtaacactattcttttctcttgcctcttttaaagtgattataccatcagtgcacaaactggtctccctttttttttaaagttaggtttattgaggtatagtttacataaaataaaatattcttttttgatgagggaattttttatattgattatgttggtggttacacaattatatataattaccaaaagtcatcaaactaaacacataaaattgggcatgtatgtaaatcagaacattcttaaatctgtatttggctcagcacagtggctcacgcctgtaatcccaaccctttgggaggcctaggtgggtggatcacaaggtcaagagttcaagaccagcctggccaatatggtgaaacgcagtctctactaaaaatacaatagctgggcgtggcggtgcgcgcctgtagtccccagctgtttgggaggctgaggcaggagaatcgcttgaacacgggaggtggaggttgcagtgagccaagattgcgccactgcactccagcctgggagacagagcgagactccatctcaaaaataaaaaaataaataaataaataaatttgtatttattctgacaaatccttagttgttctgacaggccctggtgttcccaactaattaactgtcagagaatataaatactcaagacaagatcactctgttactgtggtagaataatacagaaacacaatcactctgtaattatgtctaaaattaagtagagacaagaatgttttaaacmcacacacacacacacacacacacacaccccctaaacatcctaacatgaatgactaatgcttctttaccaaaaacaactctcctcctacctcttagatgaaacgcattaagataacagtcagctagttgtccctacttcctgacaccactcaatcccaaactggcttccacatcaacacccctcagaatcacagtctttagccctccttagaatggcggtctttaactagttggctttgacaaattattrtctgtctcctttctcctttacctcgttactgtctctgtgttcccttcttccttctccccctcccctcccttttcctcctccttcagattctgacattgggcatcttgcctttccaggcctcttaaactactatattctttgagttttctcttttgactgtttcctatgatttttttagttactcgtatgaatatgcttcttacctgttttcctctgtattgtacttgagggaaaaaaatatttcttgcatacaactgactgctagactgtaccacattgacctgaagaataccttagaaaaatataagtagatccagcaaatatttttgcttttaaaataaaatctcttttgcatacaggtactagctatactgacttgctgtttaaatttattctgattcccggagtttacttggaatgtcaccttttctgaaacatttttacattatctgtaaaagccagatttaaatgacatttaaggcatctacaaactgtctctgaatctggaatctattaatggagataagaaacttatcagttgaacagatttcattatgtttttgtttttgttttttgttttattttgttttgttgttgtgggagacatggtcttgctctgacacctgggctggagtacagtggccaccacactgggctaattttagtattactattattatttttatttatagagacatagtctccctatgttgcccagactggtctcaagcaatcctcccgcctcagcctcccaaagtgctgagatttcagatgtgttacagcacctggccgtctttggctttttaatgtgcattagtgatttcatgattgatttataatacttctgattcttcaaagtgatctatatataaaggccttggtttaaattatggacccattagcaaaaatttcagaaaggtcttccttataaacaaaacttcatcaaagaatggttttcctccttttttgccatcattactgtattatggaatctaaactggaaatattaacaatgtgataaaatccctatttgttgtctaatatttcattgtcatatgattccctaggaagcagcaatattcccattcatttatattttttatttccagtgaaaactcaaatgcagcatggattaatctctatagcagcccgcactgttattacacatctggtaaatcacctgggccattatccaatgagcggtggtcctgctatgctaacaagtcaggtgtgtgaaaatcacgacaatcattacagtgaaagtactgaactttctcctgaactctttgagagtccaaatatccagttctttgtgttaaataatacaaccttagtgtcctgtatccagatcagatcagaagagaatatgcctggaggaggtttatctgctggccttgcatcagccaattcaaatgtcagaatcatagtacgtgatctctctggaaartattcatgggattctgctatactgtatggcccacctcctgtaagtggcttgtcagaacctacatctttcatgctttcattgtctcaccaagagaagccagaagagcctcygacatctaatgaatgcttagaagatataaccgtaaaagatggactttctctccagtttaaaagatttagagaaactgtaccaacttgggatacaataagagatgaagaagatgttcttgatgarctcttgcagtatttgggtgttactagtcctgaatgcttacagagaactggaatctcacttaatattcctgctccacaacctgtgtgcatttctgaaaaacaagaaaatgatgttattaatgctatccttaagcaacatacagaagaaaaagaatttgttgagaagcactttaatgacttaaacatgaaagctgtggaacaagatgaaccaatacctcaaaaacctcagtcagcattttattattgcagattgcttcttagtatattgggaatgaattcctgggacaaacggtaagcataagggagaaattttttcttttttttttttttttcggtcttattcatcttctgataaagcattttattttctgttcttttcctcactaaattttatctaccaattagttctttgactcatttttttgcagatttttttttgagaccactgagttatattgggattcaggggaataaaataatccagcaaattatcaatattttcaaaataactactggaactatttgacttagaaattatagctcatttttcaaccttcatgtaagcctaataattttttttttagaaactgcaatatgattatttccggtttgaatcagggaaattaactcaggattcaagatcaaatcaaaaaaagaatctgaagttttaaaaattattttgttttctgatgcatgttacaaaaccttattaaaaacttacaataaactcatgaggtattcaagtaagttaggtaggagctaaatgaaaagaacaatgggcttaaatcagaagacctagcttaaagttacttaacttttgagcctcaggctacagtctacaaattgagagtagtacccacctcacatactgggaagaattaaatcagataatgtatataaaacactggcattgtacactaatgtaaagcattattaatatacatttaggttttaattcctatgtcatgaaaccctgtaggtagtggaaggaggggtaatgtattgtctctgtcaatttatggtaggaggggaagctcagatatcagtgaacgaacaaatcttaaagtaattcaaatgtatgtcaagcattgaaatagagatctgcttgtttgcttagtgtttatactcttacttgatttaaaactcttccgcttattagaagggaatatcctctgccttataggaaagcctcttattagaagggaataaggaatataggaaagccgtttattagaagagaatatcctctgccttataggaaatgttatatctcaggaacagtttgccatatggtatgaccaaatataggtaattgccactcagttatgtcagttatggtataaatgcattctactctcttttgctgtagaatggtccgtatgttgtcccttgggaaaaattaaagatgagaagctgtattttacttcagcaagcattgattttatgaaaataatttgtacatatttagcacccatggaagggatttggtaaaattattcactgctttgtagtctaaaaattataaaacaaggaagaaagaaaattccatctggattacacttgcttacttgataatgatatagattctgtgaatattttatttctcatgagatacaactttctcacatatttttatgagactcttgaaaagaaatacaaagtacttttatccattttcctggatatgagtttaggaggctcacaacatctgcaaggaaagattcaagtggccaattgatatgatccactagcagaaatgtatgaacacctggtggaaataatgacgtatattctttacattttttttagggtctgttctcctttgtgttagaagtatgaaaaggcaagaaaagtagaaaagttgcatgagtagagtggaaagtatttccgggactgtcttgtcattcactgcaaaggtgatgaaaatgtttataaatctctctatttaggaggagctttcatctcctgaagaaaaatgaaaagctacttagagaacttaggaacttggattcaaggcagtggtaagttgttggaaaatcttcacataactagcaactctcaggtatttctcttttagaataatactgtgaataatattttaaatagtatataatactgtgttattgatttataactttctgagcaaaagttttttaaggaaaatttaggactgcatagaatgttgggtgtctttgaattgtttatgccttttttttttttttttttttttgagacagagtctcccactgtcacccaggcttgagtgcagtggcatgatctccgctcagcctccggagtagctgggrctacaggcacccaccaccacacccggctaacttttttttgtattttttagtagagatggggtttcactgagtgaaccagaatggtttcgatctcctgaccttgtgatctgcccgcctcggcctcccaaagtgctgggattacaggcgtgagccaccgcgcctggcttgtttatgccttttttatgcatttcagaatcatcttttgaatcacagaaaactaactggacctgtaaaatagcctttggtttttcccatgtttaagcaaaccttagtcacatctctcattaattaaatccagtgattctgacagattgggaagcaagtttgaaaaaagctacccataggaatgcatagtgagtaagatgattcagaccattcccacatcaaacaattctatatcttcctctcttctttaaaatttctgtattgagccatcgtttyttgctcaccttcagtttgagaaaagcctttttttttttctatttgtacttctgctttctgccatctctgcctgcttcaggatcgtcttcaaaaagttatctcctctttatgttatatttcttcgtgttcctcttaataaacttgtttgttatctgcctttaaacaaaacaaagcataaaacaaaactttcctcagttactctactttcaagctatagtcctatccagatctctcattccttttactaccaaatttatggagaaatatgatctttactcacttcctgtaatttctaactggttttggttgttgtttttagcttttctcaaaatgatcttaaaaataattatttggttattacagaaaatataaaacaaaaatataatctatataacactgtactccttttttttttttttttttttacggaactggaatcatagggatattaccaagttgttttttttttttttttttgcgttgtattatattgtgagcatttcctcagtmatttagatactcttcaaagataactttttttttttttgagatggagtcttgctgtgtcgctcaggctggagtgcagtggtgcgatctcggctcactgcaacctccgcctcccgggttcacgccagtctcctgtctcagccttcagagtagctgggactacaggcactcgcccgccaccacgcccagctaattttgtttttgtatttttagtagaaacagggtttcaccatgttagccagaatggtctcgatcgcctgacctcgtgatccacccgccttggcctcccaaagtgctgggattacaggcgtgagccaccgcgcccggcctaaaaataatcttttatgatgccaggttttatgattgttggacatttaagttgtttttaatttcttgccrcaggatagagtcccaggaatagaattatttaggtcaaatcgtatcaggatatttcatgccatgtatattgggaaattgcttctattaagtaataatttgtaatttcaccaacattttgtaacaacacctatataacttcaacctggccatcaccagatactaatcacccttttttaacctttatagcttgagaagcagatcatggtacctctttaatttttttttctcttctgctagtgatgttaatattttccacatatttgtaggaaattttcatctgttttcaaattctctgttggtgttctttttctagttatctatttaggaatttttcttaattgtaagaactctccgtgtgtgtgtgtatgtctgtgtgtctgtgtgtgtgtatgtctgtgtgtgtgagagagagagagagattaactttcgtgctattcgtgggagctttcctggttgtttagttttcagttgtcaacttcagatcatttaacctacatattttttcgttttatgtatcatttctctcaatttttttctttggatttcttgaattatttgttgtgcttaaacagttctgtcttgaaatcagttaaatattctagtacatttccttatttctctctagatttttttttttttttttttgagacagagtcttcctctgttgcccaggctggaagtgcaatggcacaacttcagctcactgcagtctctacctcccaggttcaagtgattcatgtgcctcagccttctgaccacacatcacacctggctaattttgtacttttagtataagagacagggttttgccatgttggccaggctggccttgaacacctagcctcaagtgattcacctgcctcagcctcccaaagtgctgggattataggcatgagccattgtgcccagcctgtccttctagatctttatttcattgaggtggtaattattttacatttaattctttattcattttgaaatatattctgatttgtggaatgataactggaactagtttgaatgttgaaaaacagtctattttaataatttgttgaataaactatacctttgccattgatttgatgcttcctttattaaatattaagctctctgcttcacagctgtttatttctgttgctttgtctatcatttttattttatgttttatttttgtgggcacattgtaagtgtatatatttatttactttttttgtattatactttaagttttagggtacatgtgcacaacgtgcaggtttgttacatacgtatacatgtgccatgttggttttctgcacccatcaactcatcatttacattaggtatttctcctaattctatccctaccccagcccccaatcccccaacaggccccaatgtgtgatattccccaccctatgtccaagtgatctcattgttcaattcccacctatggatgagcacatgtggtgtttggttttctatccttgtgatagtttgctgagaatgatggtttctagcttcgtccatgtccctgcaaaggacattaactcatccttttttatggctgcatagtattccgtggtgtatatgtgccacagtttcttaattcagtctatcattgatggacatttgggttggttccaagtctttgctattgtgaatagtgccgcagtaaacatatgtgtacatgtgtctttatagtagcatgatttataatcctttgggtatatacccagtaacggtattgctgggtcaaatggtaattctagttctagatccttgaggaatcgccacactgtcttccacaatggttgaattaatttacactcccaccaacagtgtaaaagcgttcctgtttctccacatcctctccagcatctgttgtttcctgactttttaatgattgccattctaactgttgtgagatggtatctcattgtggttttgatttgcatttctctaatgaccagtgatgatgagcattttttcatgtgtctgttggttgcatagatgtcttcttttgagaagtgtctgttcatatcctttgcccactttttgatggcgttgtttgtttttttcttgtaaatttgtttgagttcattgtagattctgggtattagccctttgtcagaagggtagattgcaaaaattttcttccattctgtaggttgcctgttcactctgatgacagtttcttttgttgtgcagaagctctttagtttaatcagatcccatttgtcaattttggcttttgttgccattgattttggtgttttagtcatgaagtcctcgcgcatgcctatgtcctgaatggtatttcctaggttttcttctagggttttgatggttttaggtctaataattaagtctttaatccatcttgaattaatttttgtataaggtgtaaggaagggatccagtttcagctttctacatatggctaaccagttttcccagcaccatttattaaatagggaatcctttcccctatttcttgtttttgtcaggtttgtcaaagattagatggtcgtagatgtgtggtattatttctgagggctctgttctgttctgttggtctatatatctgttttggtaccagtaccatgctgttttggttactgtagccttgtagtatgtttgaagtcaggtagcatgatgcctccagctttgttctttttgcttaggattgtcttgacaatgtgggctcttttttggttccatatgaactttaaagcagtttttttccaattctgtgaagaaagtcactggtagcttgatggggatggcattgaatctataaattaccttgggcagtatggccattttcatgatattgattcttcctctccatgagcatgagcattcttccatttgtttgtgtcctcttttattttgttgagcagtggtttgtagttctccttgacgagaacttcacatccattgtaagttggattcctaggtattttattctctttgtagcaattgtgaatgggagttcactcatgatttgactctcttgtttgtctgttaatgatgtataggaatgcttgtgatttttgcacattgattttgtatcctgagactttgccgaagttgcttgtcagcttaaggagattttgggctgagacgatggggttttctaaatatacgatcatgtcatctgcaaataggaacaatttgacttcctcatttcctaattgaataccctttatttctttctcctgcttgattgccctggccagaacttccaacactatgttgaataggagtggtgagagagggcatccttgtcttgtaccagttttcaaagggaatgcttccagtttttgcccattcagtatgatattggctgtgggtttgtcataaaatagctctagttattttgagatacgttgcatcagtacctagtttattgagagtttttagcatgaagagctgttgaattttgtcaaaggccttttctgcatctattaagataatcatgtggtttttgtcattggttctgtttatatgatggatgacgtttattgatttgcgtatgttggaccatccttgcatcccagggatgaagccgacttgatcgtggtgaataagctttttgacgtgctgctggatttggtttgccagtattttattgaggatttttgcatcagggatattgatgtaatattctctttttttgttgtgtctgccaggctttgatatcaggatgatgttggcctcataaaatgagttagggaggattccctctttttctattgattggaatagtttcagaaggaatggtaccagctcttctttgtacctctggtagaatttggctgtgaatccgtctggtcctggactgtttttggtttgtagtcctggactgtttttggtttgtaggctattaattattgccttaatttcagagcctgttattggtctattcggagattcaacttcttcctggtttagtcctgggagggtgtatgtgtccaggactttatccatttcttctagattttctagtttatttgcttagaggtgtttaagtattctctgatgatagtttgtacttctgtgggattggtggtgataccccctttgtcattttttattgtgtctatttgattcttctcttttcttctttattagtcttgctagcagtctatgaattttgttgatcttttcaaaaaaccagctcctggattcattgatttatttgaagggttttttgtgtctcttatctctttcagttctgctctgatcttagttatttcttgccttctgctagcttttgaatttgtttgctcttgcttctctagttcttttaatcgtgatgttagggtgtcgattttagatctttcctgctttctcttgtgggcatttagtgctataaatttccctgtaggtgtatatatttaatggggtacataagatgttttgatacagacatgcagtgtgtaataaatcacatcatggaaaatggggtattcattctttttgttacattctagttgtactcttttatttatttatcttttttcatgtaatcttgctccttctaacacttacagtcttctggttagatttgtctatcatttttgtgtaaatattacactttaatatagctttataatatattttaatatctgataggccaagtcttcttcctcactgcacccacacacattattcctcttttctttgatagtctcacctacttattcttccagatacatttaaaattatgctgttgtttttcagaaaaaaaaatcccattggtatttgattggatattcaataaaactctcatgtagaaaaagcaaagcaccatcataatcatcattcttcccattagtaattatagtatgttttcatttattctgagacccagacatttcttgtttgtatatttctaggtgttttattgttttattgatattctgaataggatttttcccccattacgttttctaggtttttctctttttaatatttactttgtttacaaacactgaagtgaattctcttattgattttaagcattttattgtctgtctcaggatttgtctagatatataatcattatctacagataatctcctttctagtagttatgcttgtctttgcttatatcacgtcttattgcactgaccagaacttgcaggatagtgtttaatagtatagtaacagtggacatccttgtctttcctgattctgatgaaaacaactcttctgtttcatcattaaggaagatattagttattagttttaaaaagataatttttattgtgctgaaaaagtaccctgttttctaggagttcttatatggaaaggatgttaaattatatcaaaattattttcagcatctattcaaattttcatatagttttgattttttaactaattggtgtatattgtattttaatatcactagactgctaatatcaaatgatatttgcatttttgagctaaaccctgcctgatcttttggcttctcgttgtgttagatttaccagaatttcattttgagttcggttatagtccactattagcagattatgtagttattttttgtcctrttcctgttatgtttttagaattgaggttatacccagcttcataacatgaatattatctgttgcttaaagttttggaagaaatcataacatttctaatttttctttcagtttgtttcatccttattactctttccaggttttagctcttgggaaaattttactttttgttttgttttgttttctattttctaaaaatccatttcattgagacttctaaatagatactagtagagattcatacatggtgttataatttttattaaattttctttttcattttagttttttgtggttttttaaaattttcttgatgcagacaatctgctcagtcttttcaaagaaacaggtcctaatttgttacattctgttatgttctgtttctaactcattattttctgtttcattattttcttttttataaagtttatttcctttttcttatatctggaattgatttctatttatctttgtttcatactttattatttaacaatgaaataatcttaggctgtaaattcacccccttcccccccccccccccaccccacacacacacacacaggatggagttttgctgttgtcacccaggctggagttcaatgacatgataacggctcactgcaacctccgccttcggggttcaagtgattctcctgcctcagactcctgagtagctgggattacaggcatgcgccaccacgcccagctaatttttgtatttttagtagaaatggggtttcaccatattggccaagctggtctcgaactcctgacctcaagcgatctgcctgcctcagcctcccaaagtgctgggattacaggcatgcgccactgtgcccagcctaatttttgtatttttagtagagacggggtttcaccatgttggccagactgatctgtaactcctcgccttaggtgatccacccgcctcagcctcccaaagtgctgggattacaggtgtgaaccaccattcccagtccccctcctgtccaytcctgaagtctcagcttaaacatcactttatatggaaagctttaccttaatctactcctatgcttcaccttccttcccagactatgtttgaatctccttccatatgctttcacagaaccctgtagcatgtccctgtcatagcatttatcatatagcatagttattattatcattattgtttagctattcttattctttccaagacggttataagaactctctaagtagtctgtgggttctcaattctgattgttctccataacaatatatcttggtactagatggtcaagtccttgggaacaggaatcataccactttttctgtcttgcttacctcagaactacctagctcctacctctactgctatactgaaactgtctttctgaaggttagcatcctgaccatcaagtctaaagttcttttagtcctcaccagcctcattaatttatctgattaaatttaaatttaacttcataggtgtgttttaaaactagagcagttttcgatttacaaaagaactgataggaaagtacagagtttccatatattctccattccccctgtagagtttcccctattatttacatcttacattagtgtctgaagtccaaagtttacattagggctcattctttctattggtttygataaatgtgtactgacatgtatctaccattagcgtatcacacagaatagtttcactgctctaaaaatctattgtatattaaatcccctatattaaatatctaatattgttatctattttgtctttttaaaattctctctgatcattttaaagtcctctgccccaacttctatgacactaaaattactcagttcaactcctaattctctaattattccaggtcttcactggttcattttctgtttcttaccttcataacataggtatctccctcatttttcttttacctgcctctctactatcatttctaggtcacatttcttttcaaaatcggatcttcctcctgatggtcatatttatgtttagaagtaccctttcagagttacccaaatttgaccatttccctttcccttgcctttaggttttcataatcatgatgtccattcttctttttatctctcaactctgtctcttcttgcctttaccgctcccaactcattgattcatgtccttatcacttctttccaagacagttttaacaactgtctaagtactctgtgggatctcatctcctgactcttccccatctagacaatcctgaccactaacataatctttctaatgttaaaatttgatgttaatgagaacactccttagtgactccgtaataatgcctggccagactcttcagtctagagctcaacccataccagccatcttggctattcagtttatttaaattaccttatgcttttttatttcttggctcctgctaaactgcctccgttctcatacataccttgaatgaattgtggtatgaatacatacctcaattctcatacaaacctccattctcatgcataccttgaaggggagacattgccttgagtcagcatacatttttttatacactacattaaatgaatgcatgacmtttatttgtttgctttttaaaaataattttaaagaaaactacatagttttttcaatacaatgagctcaagtaagaattcattctaattacatgacagtaagacaatttttgagctttcctcttaaaccaggaaacctggaaacaaacctgattacttgtctagggaggactagggcgggagaaaatgaaagattactttgttaacagacttacctcactagaccatttatagattctttattttctttgcctagactaattgtttcctattccttgtggttgaaccaccagagttttaaatttcaaatcacaaaatgatatgtattattattttattgcaaggtatatacagggatttagaaatgcttaaaacttgacagatgtcactttgagttttccagtagtgagctaataatattttgccagtactatacatattcttatagaacatttgtagttgcaagttcactaattttaactattttttctaatacatttgcctcattattcactattgtggtgcatattaatctaatgacaatataaaacattttagcagccatagttagtaaggagaaaaataagaaggagtagtgaaagattaattgacataaagggcagctgaactctgcttctcttttattgcattttaaagatttattttctgtttttttcctatatggcacatatacttctctcaccttttaaatttatatagtattagatgaagatttctatccagctcttctcaattttataaattattatttatgagctctaattgatagccctttacctgaagaagcaaaaacactgagttttttttctttcacaattagaatttacacttaatagatgctttcaaattaaaattttaatatcttgactgagacatattttacatgcaatacagttaattcatttaaagtgtacatatttttagtatattcacagggttgtacaactatcaccccaatctcatttttagattattttagtccctctgaaaagaaacctggtatccattacccaccagcctttctttccccccagccttagataacacatatctactttctgtctctataaatttgcctattctggamatttcatataaatggaatcaaataatatgtgggtttttgtggcagctttttttttacttagcatgatgatttcaaagttcattcacgatgcagcatgtttctactttatttctttttattaccagaaaatatctcattatattgataaatatttgtttatccattcatcagtcgatggacatttcagttggtttcacttttgggcgaatatgaataatgctgctgtgaacattcatgtacagttttttgtgtggacatgttttgaatatatacctaggagtagaattkctggatgatatgataactctctgtttcaccattggaggaactgcaaactgttttacacaccagctgtaccattttaccttcccaccgatggtgtrtgagtgttacatactctccatgccctagcctacactcgttattgtcattcttttttattatactcgtcttagtggatataaagtggaatcttgtgagtttgtgagatttttttagtattgctttttcctgtacagctttgatcagcctaaaatatctcatgattttgatttgcatttccctaatgacttatcatgagtatttttcattgctrtgataattgactatatatatgttctttgaaaaaatgcctatttaaatgtgtactgggttgaattgtattctctcagaatctcatgtccaccctgaaactcagagtgcaatttggaagtagagttttcagagttatgatgaggtcacactgcactagatttgaccctaaatctgattacttgtgtccttataagaaagccacgtgaagaaacacttctgcatacacgggaaagatgggtatgtagagatggaagcagaaattgtagtcatacagccacaagccaagaaatgctgaagaattgtcagcaacagctagaatcttagaagaggcaaggaaggatgctcccctagaacctttggaaggtgcatggccctgtctatgccttgatttctgacttttagcatacagcactgtgagagaataaatattttttgttgaaagcaacctagtttgtgtaatttgttacagaaaccctaggaaaataatataaacgtctttgcctattttttaaattgggttatgtgactgggcgtggaggctcacacctgtaatcccagcactttgggaggccaaggcaggtggatcacatgaggtcaggagttcaagaccagcctggccaacatagtgaaaccccgtctctactaaaaatacaaaaattagccaagcatggtggtgcacacctgtaatccctgttactcaggaggctgagacactagaatcgcttgaacccaggaagcagaggctgcagtgagccaacatcgtgccactgccctccagcctggatgacagagggagactccatctcaaaaaaaaaaaagaataaaatacaaaataaaataaaattggtcttttactattgactttaaagttctttatatgtatgttctagatacaagttctttatcagatatatgatttgcaatttttttctcattctgtaaattgtcatttcactttcatgatggcatcactcatagcacaaaaaatttaattttgacaaagttcagtttacctatttttattttgtcacttgtgtttttgtgttgtatttaaaaagaccttgcctaggccgggcacggtggctcacacctgtaatccccgcactttaggaggccaaggagggcggatcacgaggtcaggagatcgagaccatcctggctaacatggtgaaaccccatctctactaaaaatacaaaaaattagcggggcgtggtggcgggcgcctgtagtcccagccactcaggaggctgaggcaggagagtggcatgaacctgggaagcggagcttgcagtgagccgagattgcgccactgcactccagcctgggcgacagagcaagactctgtctcaaaaaaaaaaaaaaagaagaagaagaagaagaagaagacctcgcctaatgtaagatcctttgttgttttttattttttgttttaatgagttttatagtttctgcccttacatttttgatttatgagtcatttgattcaattttttatatggtggaagagtctgacttctttttttttttttttttttttgaaacagagtttcattctgtcacccaggctggggtacagtgatgcagtcacagctcactgcaacctcaacttcctgggctcaagtgatcttcctgcatcagcctcccaggtagctgggactgcagacgcatgccaccacgcctggccaatttttaaatttttgtagagatgaggtctcactatgttgtctaggctggtcttgaactcctgagctctagcagtcttcctaacagcctcccaaagtgctgggattacaggcatgagccattgtgcctggccccaacttcattctttttcatgtagatatctcgttgtcccagtaccatttgttgaaaacactattcattgaaatgtcttgataccattatcaaaaagcaattaactataaatatgagtttatttctggtcacatgattctgttccactgatttgtatgtctcatcttacatcattactatgagtgctttgatgacttttgtagcaagttttgaaatcaagaagtatgagttctccaattctattctttttcaagattgttttggccattttgggtctattacattttcctgtgaattttaggatgagctagtcaatttcagagggtttttttcctgttttctctttttcttttttgtggagatagagtctcactcttttgcccagcctagagtgcaatggcatgatcagagctcactgcagcctggaactcctgggctcaagtgatcctcccacctcacctcatcctccccagtagctaggactacaggcatgtgccaccatgcccagccaattttttttttttgtagagacggggtctcactgtgttgcccaggctgggtgtttttctttttccttttttttttttcttttttgagatggagtctcgctgtcactaggctggagtgcagtggcaygatctcagctcactgcatcctccacctcccaggttcaagtgattctcctgcctcagcctcccgagtagctgggactacaagcgcacgcaaccacacccagctgatttttgtatttttagtagagatgaggtttcaccatgttggccagaatggtctcgccccctctatctcttgacctcatgatccacccgccttggcctccctaagtgctgggattataggcatgaaccaccatgcccggccccaggctggtcttaaactcttggcctcaagtagtcctcctgcctcagcctcacaaagtgttgggattacaggcatgagtgaccacactcagccaagcttgccaatttctatttcaaaggcagctgggattttgatagggattacattaaatctgtagatcagtttgggggatgctatcatcttaacaatattaagtctttaggcccatgaacatgacttttttttaatgtagatctttaatttctttcaacaatgttttataattttcaaaatataagttttgcacttcacagtaaatttatacccaagtattattcttttgggtgctattataaaagaatttttaaaattttgttttttgtttttggcttgtttattgctagtgtatggaacatcagtttttgtgtatttgatcttatatcttgcagccttgctgaacttgtttattagctctaatagcctttttagcggattccttaggattttctatataaaaagtcacctcatgtgcaagtcagatatttttgcttcttcctttctaatcaaattattaattcaatgtcttcatttgttataggtctattcgggtattctgtttctttttaaggttggttttagaaattgtgtcttttggccaggcgcagtggctcacatctgtaatcccagcactttgggagacggaggagggcggatcacaaggtcaggagatcaaaaccatcctggctaacacggtgaaaccccatctgtactaaaaatacaaaaaattagccgggcgtggtggtgggcacctgtagtcccagccacttgggagactgaggcaggagaatggtgtgaacccgggaggcggagcttgcagtgagcagagatcacaccactgcactccagcctgggcgagagagcgagactccatctcaaaaaaaaaaaaaagaaaaaaattgtgtctttctaggaatttgatcattttatctaatttaatttgttggcatacaaatgcttatagcatttccttataatattttttatttctgtaaaatatatagtggtgtcccttctttcattcctgactgtagtcattttgagtctttttttattgcttagtctagctaaagatggttaattttgttgatcatcttaaagagccaacttttgggttcattgatttttttctctattgtttttctcttctattttatttatttccactgtagtctttattattttcttttctttcttctgcttgctttgaatttaattgtgctttctttttttctttttttttttttttggagacagggtctcaccgtgtcacccaggctggagtgcagtggcacaatcatgggtcactgcagcctggaactcccaggctcaagtgatcctcccatcttagcctccccaagtaggggccctgggaccactggtgtgcaccatcacacccagctggtttttttctttttgtagagatggggtctctctgtgttgcccaggctggtctcgaactcctgggctcaagcagttcttctaccttggcctccccaagtactgggattacaggtatgaaccactgtgccagttttgtaaggtggaaggtttggttattggtatgaaatcttttttaaaactttttgttctttcattctgaaaggaggtgaatgaaatcttttttaatagaggcatttagatctgtaaatttcccaatgagcactkctttacttacaggccatattttcattcattctctctttttattttcattttttattttcattcatctctaagtattttctcatttcccttgagatttattctttgacccactggtaatttaggagtaaattgttacattttcacacatttgtgaattacccaaattttctttcattgatttctactttcattccattgtggataaaaaatataccttgcatgatttcaaatcgtttaaatttatcaagacttgtttttttttgttttttggttttttttttttgagacggagtstcgctctgtcgcctaggctggagtgcagtggcgcggtcttggctcactgcaacctctgcctcccaagttcacgccattctcctgcctcagcctcccaagtagctgggactacaggcaccccccaccgacgcctggctaattttttgtatttttagtagagacggggttacaccgtgttagccaggatgatctcgatctcctgacctcgtgatccacccgcctcagcctcccaaagtgctgggattacaggcgtaagccatcgcacctggccaaggcttgttttatggtctatcctgtaagttgtttcacatatgcttgagaagaatgtattttttgctactgtaggatagagtattctgtagatgtcaggtaggtccggttgtcatattattgttcaagtcttctgtttccttgttgatattttctagttgttctgtccattattgaaagtgggatattaaaatcttcaactattattgaggaaatgtctgtttctgccttcagctctgtctttgttttgcatcatgtattttggggctctgtttttgggtgcatatatatttgtaattttcatattttcctgttaggttgacattgtatcattatgaaatatctctatctctaacattttttgttctaaagtcttacattagtatagccactgtagctctgttggtttctattttatggtacttgtttccattcctttgacttcaactttatctgtgtctttgaatccaaaaatatattgttggttggtgtttgcttggtcatttgtttattttctaacaacttggtttccccccagtaattagcctctgatctccatgctcagattttttaaaaattgtttttcttttagcctggctaatgaggggtcttccctgggttatcacgtacttattggtcaaagtttgtgcttagtccccttaccagtatgatttttttccccttaccatttgatttttatcatttactgttggatgtgtgtggcttggaggctactatcacagtttagagtgtttatgttttttttgtcccacatgcaccaggagactaatagcttgaaggttcactcctgattactctaaagagggtacatccttgggtatgcacacggtcttccagactgcaaggaatgactggatgttatttttaagtcttagcttcccaggagtcgaccctgagttcaggttattcagtgccagtgaggatttaccttgttttgataagtctctgtgtgactttgggaatgctttcatgtctgtccgtcctacatcttactctaattgttccttattgggtgcagcctagtgtatgtgcacagggtttttgaactccaaaattgactgtgatccccaaagggtccttcttggctgtctcgtttcctgattctattaaagttctgtctgttttgcttgtcatagggctgccagcttctcttaattgctttcctccaagctctgttgcaaataatgtcagccctttcaggcagaactgctacagagttctttgtccttataacctgcttttcaccttaggcaaaacctatctctcactacaacctgacctggggtcacggaccagcttttcctggagtggcagtgtcactctacaagtcagcacttgggaggagttggcagtccctggtcttagctcgctcttctggcagaatctctaccctatgagcaagctagaatggggaagattgagactctcaacgttttgttcctggagcttctgccctaagagagggagggagggagagcagacctggttctttcagccacacctatctaaaatagatcttctgtaacatggggctagagaaggatgagaaatgcctctagtaacctgtctcttccctgatgaagccatagctccagattggaagctggagagagagggaacctctgtcttctaggcctgagtagaatgcccagggcaaaacttctgcaacattgagctgagggagtggggcaaggaaacaagttgtaattcatatatcaaaagctctgtgttgttactgagatttagtgagtttccttgaatgaatatttccctgtttgctctatgactttaggacaatatacagggactttaaataatgttttaaattttttcagcagataagctgtgttttgcttgggagagaggctgtgtagacccttattctgcagctttggaagtctacccaaccccaaatcatattttactgcttacactagcatatcctactgatacatctgacgcactgaaagtttgcctatgtgctcatcacctaaagtaaaatattccattattgaaagcagctaaaacatctttcttgctgatattcaacccactatcatgatttggtaacttactccagacgtgtgggaaaatttggttgtcagactaaattytttaaagaactttaatccttatttacttgttgttgcagggttttttttttttttaattcctacatggtatagtagtgaaaactttactaatggtcttaaagttttttaacccaagctttgttaaatcaacctaaagtaaatgtagcatgacttagttagcttggaaagccaaatttcaaagctaaatttcaaacaagaaatgtgcttttataaacatttttaattttagagaggactaaaaataaaatgtctaagaacttggctattactccatacagttttatatttgtaaaccaagctgcataactatgctttcatcaacaatggaccacatatatgacagtagtctcataagattataataccttatttttgctgcaccctttctgtttaggtgtatttacayacacacatacttaacagtatgtcataattgcctacagtattcctacagtaacatgttgtacagatttgtagcttagcaacaataggatatacctgatagccaaggttgtgtagtaggctgtaccatctaggtttatgtgagtacatctataatgttcacacaataacagaattgcctaaagacacatttctcagaatttatccctgttgttaagcaacacataactgtgtgtgtttcttcttctacctcgtaagtactttgaaggattgggtcctttctcactcatctctgtactcctacttagttctaaaatgcagtcccttcaaccatgggattcggctacattgcaaaacagacaactcttaagatgcttatgtattcacacctatgtgtccttcctgatgctctttctcttcatttgtcaaatctttcttaccttcatctaactcaattttatcttctcctttaagtttctgtttttgcagtcaaaagtgatcgtgcctgtcttttattctaatggcaattttgtagtaattttttacttacattgcatttatatctccttctgtagactataagatctaattctttttcatctttttattgctacatactttgtacatagaacttaattgttggatgaatgagtagataaaatagtgattaaattaatggtgtaatcttttgttttatagccgagagacacacaagattgcagtattttatgttgctgaaggacaagaagacaaacactccattctcaccaatacaggaggaagtcaagcatatgaagattttgtagctggtcttggttgggaggtattatttttaaattatacgwaatatttatatttggaagcataagcttatttttcttttttttcctagcttattatagaagtattattttaggagatacaacaacttaacaactagtttgttattgtttctgccttccattttgtctgcacatacagcagcagttgggactttgaaaggaaagatgttgactattttatgagacagtatattgtgaaagagtactaaactcataggtttrtaagatctggattttccttacagctgtgaccactggactggtggtcttcaaactaggacctaatggctacacaaaggctttccaggaatgtgtgggtatacacagttttgaggaaattagcttccagatcctcaagtttaccaaaactaatgccagaaaacccttctacagtctcttgtctctcatttactttgtaaaagaaaagcatactgcttacccatcccaaatcctacattgtcccagagggttttagcaccaacaaaatagacagttctagtgggtatacttttaggagaaagtccctgtcagcaaagcaagaaatattgaaaggtattatactttatgtcattcaagaaaccaacccatgtcaaggttcctgtaccaaatctgtctgtcttagaattataactcagaaggtgggtatttgtcataaggatttgtataagtatgtttatttgaattgaaaaatgaagtaccagacatgttctaacagaaagtaaatctgatgtgggtaattggcttgtgatcagtttaataccagacattttacatatattgaatcagccaaatctgtagctccaagattttgatgaaaatacacttaaagcacatatatttattatatagtacactggaaattgtatccttggctaccatttaaacttttgataaaaattattattacagttttcaatttaatagttttccaaaattgctatagagagtatatgagcaaaattgttaaagagcactgcattagactataagcttctagagggcaggcattttcatctcagtgatttttttttttaattctcagtgcctttcacagtgtctgatatgtcagcctttagtgttttatatagatttttatggctaatctaacctatttttttattattttttccttgggatacatagcttatttataaatgtgtagtttaatttcaaaatatgtgagttttttctagatatcgttattsatacctaattctataccattgtgatcacagaatatactctgtaagatatcagtattttgaaatataatataacccagtataggtaccctgttcccttgaaaacaatgtgtatactctgtcgttattgagtgtaatgaactaggtatgtcaattargtcaaggtggttgttggtagtatttagatcagtatgtttttactgacttcatttcttttaaaaatttttattgctacataataattgtacatatttatgtggaacatataattttggtaagtgcatacaatgtgtagtgatcagttcagggtatttaggatacccatcacttcaaacatttatcatttgtttgtgttgggaacatttcaaatctcctcttctagctattctgacataatatattattgttaactacagtcatgctaatgtgctattgaacagtaggacttattccttctatctcactatatgtttcgtattcattagccagcctatcttcatctccacaccacaaccaccaccttcacctgcctctggtaactgtcattctattctttacctccatgaaatcaacttttttagctcccacatatgagtgagaacatgttatgtttgtctttctgtgtctggtttatttgtcttataatgacctccaattctatccatgcttctgcaaatgataggattccattcctttttatggctgaatagtattgcattgtgtatgcataccacattttctttattcattcatctgttgatggatatttacgttatttccatatcttggctgttgtgaataaagctgcaataaatatggcagtgcaggtatctgtttgatatactgatttccttttctttgaataaatacccagtagtggaattgatggatgatattaacctgctgttttaccttaagtgagttatttaagctctttttgcctctttggttatttgtcaaacgtgtagtatacttttttacccaacagagatgatgtgaagttcaattgagcttatgtatgtgaaaatgctttgaaaagtataaaaaacatcctaagtagattttctgttaaaaaaagtaaaataccataaaagtattagtaaaagtaagggagacatgaaaaagaacaagttaggaagatttacacttcttgatttcaaaacttactacacagcaatgctaatcaaggtagtgtggatagatcctggggcagaacttaggaaaaagaaaaagaagatagtgtggtactgctggtacaaggatagacatatagatcagtggaatagaactgagagtccacaaatagaccccatatttgtggtcagccgtttttgacaagggtgccacaaccatccaatggagaaagaatagtcttttcaacaaatggtgctgagaccatgagccatatgcaaagaatgaaaccagactcttaccccataccatatacaaaaattaactccaaatggatcacagacctaaatgttaagacctagaattttaaaactttagaagaaaatataggaataaatcctcattatcttggattttgcaaaggatttttagataagacacaaatcatgagcaacaaagacaaaaccagataattgtactttattaaaattaaaatttttgtgcttcaaggtgaagtctgataagagactagtatctagaatatacaaactagttgtacaaatcaatgattagaagatacccaactaaaaaatgatcaaaggacctaatagacatttcgccagaaaagatatatgaccaataagcacatgaaaaggtgctcaacatcctttgctgtcagagaaatgcaaatcaaaaccatagtaggtatcatttcacacccattaagataactataatcagaaagtcaggtaataacaactgttggctaggattaggagcaatctgaaccctcatacactgctagtaggtatgtaaaatgtgcagccactgtggaaaacattctggcagttcatcaaacagttaaatgttgagttgccatgtgaccaaacagttctacccccaaagtatatacccaagggaaatgaaagcatatgtccatgcaaaagcctggccatgaatgttcttggcagcattatttactctagcaaaacggtagaaacaacccagatgtccatcaatggatgaatggctaaactgtggtgtatccaataaaagggaatattattcggtcataaaaaggaagaaagtgattatgtgctacagcatgaatgtaccttgaaaacattgtgctaaatgaaagaaaccaatcatcaagatcacatattaatggtccatttatatgtaatatccacaataggtgtatttatagagacagaaagtaggttaatggttgcttagggctagttaagggcatgagggaggaggggggtgacaactaaaagatatggggtttctttgggaaatgatgaagatgttctataattgactgtagtgatgattgcacttaactgtgaatatcctgaaatccattaaattgtacagaggagatttccacttctgggaaagtcaaatagatatactttctgtattcttcctactgagtacaataagcataagacattacatataaaacaagcataagaagactctgaaagatggagaaaagacagaataactagggactttaggacggaagaatgacatagtggcgcattttctgggttttcttttttgcctcatatatcccagacttggagctgaataagtcagcaacctagaaacaccaatgggtgcaaacaaaaagcaccaaccaaagcctgctcttcctagccaaaggaccaggaaaggagcaacctaaaaagacagaaaaacatttagataataactgcactactgtagccaaacaccacagacaattccttgaccccatccccaacctcacagcaaaggtcaggtaaggagcctagacttccatcttcatgaggctgtaatgaggtgcccccaacaccacactgggctagtatcaaatagtgccagagaaggccaagtagaaatccaagactttcatgtctaccagttggtaatgagtctcccattcacacccaagagtcagtggagactacatgggaaatgtagaattccatcgccaccaatattactgaggcacctgctgtccactggagtcatttcagaggaggcctcatggagaattgggacttttaccatcacccagcagtagtgaggtcacccttacgactgtgtcagtgaacatcacataggaagccagaactcctgcttccacatatcagtaatgaggatcttccctgtttcccaggtgtcaacagagattgagtagggaacatataattttacctccacctgacagaaacaagtcagcactttcacctgattctctgctcttttcccgcatacagcagagtcttcaaacaaccagctaaaacaggaattttaaataagatccagagtcttatgaaaatgtgtacatttcaataaaaaattacacatcatatccagaaccaggaaaatctcaaaatgaattttaaaaaaagacagcagatgcccacaccaagattacaaatatttaaaacaaccttgatagaaatgcttcagtaagtaattggtaacacaattgaaacaaatgaaaaatagtctcagcaaagaaatagaaaatgtaaagaacaaccaaatgaaagttttagagtgaaaaatgtaataactgaaataaaaggctatgtagttgtacccaacaaccaagtggagtgggaatgggggtacagaagaatcagtaaactggaagataaaacagtagaaacagcctaaacagcacagaaaacaaacttaggctgggcatggtggcttacacctgtaaccctagcattttgtgaggctgaagctggagattgcttgagccaggagttttgagaccagcctgggcaacatagtgagatcccatctctccaaaaatatacaaaaattaaccaggtgtggtggcaggcaactgtgatcccagctacttgagaagatgagatgggaggattgcttgagtcccggaggtggaggttacagtgagtaaagatcatgtcactgctctccagcctgggtgatagagcagaccctgtctcaaaaaaaaaaaaaaaaagaaaaaaagaaaaagaaaaaaaaggaaaagaaaagaaacctaaaaataatgaacagagcatcagggacctgagggacattaacaaaaaaaaaaaaaagtctagcattctgttatctgagtccaagaaggagaggagaaagagcctgggtctgaaaaagtactggaaatacttgaagaaagtgctgaaaacttcctaaatttggtgagagacataaagctgtagattcaaaaaggtcggtgaaacccaaacaggataaatcaaaagaaatctatagtaacacacatcataatttaatttctgaaagctaaagacaaaaattcttgaaagcatccagagaaaaagtgtaccttatctgtggggggaaactattaaagagatagcaaatttcttatcagaaactgtgggagccaggtgctgaaagaaaaaagaactgtcaactcagaatctgttttttgtttgtttattttgtctgtttgttttgaggtggagtctcactctgtcattcaggctggagtgcagtggcatgatctcggctcattgcaacctccaccacctcctgagttcaagtgattcttgtgcctcagcctcccgacgaagctgggattacartcatgcgccaccacacccagctaattttttttgtaattttggtagagacagggtttcaacatgttggccaggctggtctcaaactcctgttctcaggcaatcctcccacctccccctcccaaagtgctgggattacaggcatgagccactgtgcccagcagacccagaatctgatagcttgcaaacatatccttcaggaatgaagagaaggtcaaaacattctcaaatgaagagaaacttagagaacttgttactagcagacctaccctaaaacaatcactgaaagcagttttattaatagaaaggaaatgataaaaggaggaattttgaaacatcaggaaggcagaccatggcaagaaaaaaatggatagatacaatcactgtgctttctcatcttgagttgtcttaattatttttgactgttgaagcaaaaattataacactgtctaatgtgttttcaaatatatgtagaggaaatatttatgacaactatatttcaaacagggatggtaaaggaacatatagtaaggtagggttactttacttaaactggtaaaatgacaacactagtaggctgtgataagttatgtatatataatgtaagacatagagcaaccactacaaaactgtacaacagtgtacactcaaaagaatgatagttaaaaacagagttctagaaaatgttcaagttagccacaggaggcaggaaaaataaaacagagaaatgaaaaacagaaaacagaaaataagatggcaagcttaagccctaacctgtcaataattacatgaaatataaatgatctaaatgtaccaattaaaagacagagattagcagagtggattaaaaaatatgacccacctatgtgttacctaaaagaaactcacttgaaatataagaatataggctgggcacggtggctcatgcttgtaatcccaacactttgggaggccaaggtgggcagatcacctgaggccaggagttcgagaccagcctggccaacatggcgaaaccccctctctactaaaagtgcaaaaattagccgggcgtggtggcagacacctgtaatcccagctactcaggaggctgaggcaggagaattgcttgaacccaggaggcggaggttgcagtgagccaagatcacgccactgcactccagcctgggtgacaagagcgagactccatctcaaaaaataaataaataaataaaatatatatatataaaacaatatagactggcagaaagtaaaaggatagaaaaagttatattgtgcaaasatcaatcaaagaaaagccagagtgactgcattaatatcagatcaactttagagcaaagagaattactggagaccagaaggacattatataattatagaaggatcagttcaccaagaagacatagcaatgctaaatacatgtgcaccaaataacagagctacaaaatatgtgacactaaagctgatagaactgaaagaagaaatagagaaattcacaattatggttggagacttcactcctcaacagttaagaggaaaactagacaaaatcagcaagtatatggaggaattcaacaacagcagctaccaacaagatctaatctacatatgtaaaatattccacccaacaatggcagaatatacgttattttcaagttcccacagaacatataccaagacagatcatatcctgggccataaaacaagcctcaacaaatttaaaagcattgaaataatagagtatgtccttgaaccccaatggaatcaaacttgaaatcattaacaaaaagataacaggaaaatctccaaacacttgaaaaggttacatcctatgtcctttaattcrtacaacattcttgaaatgatagttatagaagtgaagaacagatgagtgagtgattgccaggggttaaggaggggatagagtaggagtgaagtgggtatggctcacataagagggcaatatgggggattcttgaatttttgaacatgctctcttaactatatcaatgtcgtcagtatcctggtggtgatagagttttgcactggggggctctgggtaaagtgtacatgggatttctttttatttttttcatttcttcatatgactctccagatgtttaatttaaacaatagagatcagcaaatgtgaagtgtttacagcaaaggaacactaaactgagactttctcctttacattatcagagaattgacttgaaaataagtaactttctgaactaaagtaaaacaaaacaaaaaatctacctggagataccatttgtcacctatcagattagcaaagatcataaagtgtgataatatactatatttsaaaggctatgagggaaacgggcattctcatacattgttggtggcatctgtggagggcaacttggtagtgtgttttgaaattagaagtccacatgccctttgacttaaagtttcacgtttaactatttgtccgtagctgtactttcacaaatggagcatgatatgagttcagtgttatttgctgcagcattgactgtgatagcaaaagacagaaaacaacctaaatgtccttcaagtaggggactaaatgattgtacctcagtaaaatgaacttctgtgaagccaggaaccaaaaatgaggaatctctttacttactaataaggagtgtttttcaaggtatattaattccaaaagcaagatgcagaatgttttatatgcatgtactgtgtgtatgtgcacactaacgtgaatggatgtgtgcatacaaacatataagaatttgattatatatgcagataatatttttctaaagatacttaaattgctttctgagaaggtaactgagtagttgcaggcgagagacatgaaaggaagaattttggtrtgcttttttaatgctttaaaatttttaattatgtaaatgtattactgagttaaaaataaattttaaactggaagagattgaggtaatcttacagtaatggcacaaaaatctaacaatcatatatgtattcagccattagtaactgacactgatatttgasatgtgttcagttcatatggtgcagggattttttttgtaattctccattttacctgttattctcattttttaattgcaaagcatatatataaatggttttctctaagtagggaaatactggcgattttcaatttttttttattctcctgtatttccctaattttctgtaatgaacacaaattcttggcttctgtacatcacacaggtccggggaatatcatccaatgcaacaaccctgatattaacatgtattatatttataatcagaaaataaaaattgtttaaaatctttttacaggtcaccttgttgttttttaaatgtaactaaactgtaattaagttctgcatttctaatttttgttgtggactgtaataagtactaacaaatcaggaagccagttttatgagtaaatacaacacaccaaattaatcattttgtcaaactgwtattaccattttaacttttccccaaactatttccatacttgatctttttctcsctggccttggtgtgctctgacagcctttataatttaccattaacacctagtaggctaacaaaagatgcatagtacacagcagttgatacctttcctggttaactcctactaattagaaatcctcaaatacttaaaaagtaccagtacaaacaaatcaattctaacaattctagattaaatattggttgataacatgcaaaagactttgttcccaatttttttcttaagcaagaagtttgagtctttctctgtagtgtatttgggttttgtttaattaatttatgtgactcttcattacttctaggtaaatcttacaaaccattgtggttttatgggaggactacaaaaaaacaaaagcactggattgaccactccatattttgctacctctacagtagaggtaatatttcacgtgtcaacaagaatgccttctgattctgatgattctttgaccaaaaaagtaagtgctgagaagtgctttcaaattaaaatgctcataattgagacagttaatacagaaaatacgtaagtaagaaatcgaattgatcaagcactgtttctggttgtagtacaccactccacccagtgctgtcttgaaaatagggtggttgtacagcaaactatgttttctttaagaaacaatgatatggttaaaggttgcagtctttttttaaaataaagtttattgtgtatatttagggtttacaacatgaaatgttgtgggatacatatagataataaaacggttactatattgaagcaaattaacatatctatcatctcatctagtttttttatgtgtgtatgacaagaacagctaaaatctacaaaattccaaataccatacaatttttattgtgcgttaaatctctagacttgttcatcctacatatctgctactttgtatcctttgagctccttgtcccaatttcataccccactccacccctggtaaccactgtgttattctctatctctgtatattttctcctttgttttttttttttagattccacatataagtgataccatgcaatattttttctttctttgtctggcttatttcacttaggacacatagtgtcctccaagtccattcatgtgtagcaagtggcagaatctccttttttaaggttgaataatattacattgtatgcatatataccacagtttatcaatttgtacattgatggacagttttgcatatcttggttattgtgaataatactgcagtgaacataggaatgcagatatcctgaggaggtggtgatttcatttcctttgagtatatgcccagaaaaaggtttgctaggtcatatggtagttctatgtttaatttctttaagaacctccgtactttttttttttttttcataattgctgtacagtctacatttctaccaacagtgtactagtgttcccctttctccacatccttaccgatgtttgttatctcttacctttttggcaatagcattctaatgagtataaagtgatatctcatagtggttttaatttgcatttctgtgatgattaatgagattgttgagccttttcatataccagttcaccatttttgaataaatgtctgtttaggtcctcaataatgtttttatgtttttgaataaatgtctgtttaggtccagtttttaatccgtttatttgcttttctgctattgacttataagacccttataaattttagatattaatcccttaatagataagcggtttgcaaatatgttttccctctgtagggtgccttttcgttttgttgactgttacctttgttctgcagaagctttttagttttatgtagtaccatttatttatttttgtatttgtagcctgagcttttggtgtgatgtccaaaaaatcattgccaaggccagtatcaaggagcttttcttctatgtcctcttctaggtttcatgtcttatattttggtcttttccccattttaagttgatttttgtgtatggtgtaagataaggattcagttttattcttttccgtgtggaaatgccattttcccaagaccatgttgaagagactatcctttccctgttgatcttggtgcccttgtgaaaaattagtttactgtatatgtttggatttatttctgggatctctgttttgttccactggtatatgcttctgtttttacgccagtaccgtaccattctgatgactgtagctttgtaatataatataatataatattttatttatttatttttgagacagggtctcactctttcacccaggctggaatgcagtggtgcaatcacagttcactgtagcctcaacttctgggctcaagtgattctccctcagcttcctgagtagctgtaactataggcactcgccaccacgctgactaatttatttatttttggaagagatggggttttgccatgtttcccaggctggtctcaaacttttgagctcaagcaatccctcttcagcctataatgctgggattataggtgtaagccactgtgcccagcctgtaatataattttaaatcagggaatatgatgcccctttgtgtttttttctcagtttagctttggccatttgagggttttttgtggttccatacgaattttagaattgatttttctatttctgtgaaaaatgccattggagtttttatggggattccattaaatttatatatttctttgggtagtatgaacattttaacaatattaattatttcaatccaagatatctttccatttcattgtgttttaaatttctatcatcaatgttttatagttttcagagtataaatctttcacctccttggttaatttatttctaagtatgtttatggtatcataaataggattgttttcttgatttttcagctaagtcataatttgtatatagaaatgctagcaatttttgtatgttgattttgtatcctgcaccattactgaattcatatgttagttgtaacactgtttttgtggaatctcaggggctttctacatagcatatcatgtcatctgcaaataaagataatttcactttttctgttctgatttggatgccttatatttctttttcttctctggttgttcttgctagtacttccagtactatcttgaataggtgcagcaaaagtgggcatcctttccctgtatcagatgttaatagaaaagctttcgatttttcctcattggttataatgttagtgatgagtttttcataagttacctttattgtgttgaagaactttccttctatacctaaactgtcaagagttttactcaataaatgatattggacttagttgaatgctttttctacgtcaattgagatgatcacatagtttttaactgttattctgttaatgtggtgtatcacatcaattgatttgtgtgtgttaaatcagcctcgcatgccagggataagtcccacttcgtctgggtgtataatctttttgatatsttgttggattggttcagtttgctaatattttattgaggatttttgcatcagtgttcatcagagaaattgacctgtagttttctttccttctggtgtctgtctagcttagggatcgaggggatgctggctttataaaatgtttggaagtattccccttcactctgttttttggaagagtttaaatattggtaataattctttgaatgtttggtagaattcagctgtgaagctgtctagttctgggctttttgttaaaggtttctaattaattcttcaatctctttgttattggtctgttcagactttccatttcttcctgattcaattttggtaggctgttttattctagaaacttatccatttcctctaggttatccaatttgttggcatacagttgtttataatagtcctttataatccttcttatttctgaagtgcctgttgtaatgtcttcactttcatttctgattggttacagtcttaacaaaggatttaccttcaagaaaatagggatatattagtctgttttcacactgctataaagaaactgcctgagactgggtgatttataaacaaaagaggtgtaattgactcacagttccacaaggctggagaggcctcaggaaacttacaatcgtggcaaaaggcaaaggggaagcaaggtacatcttacatggctgcaggcaagagagcgaacaaaggggaagtgccacactttaaaaccatcagctctcatgagaactcattctctatcacaagaacagtacaggtgaaaccttccccataatccagtcacctcccaccaggttcctcccttgacacatgtggattacaatttgagatgagatttagttggagacacagagccaaactgtatcaagggatataacaaattgaaagatttctgtgtttgtttacattggtaaaattatatttcaaggcccttagtacatggactctgatacaatgtttatattgattgagggagaggaaaaaataaaacagaaattattccaggccaggtgtggtggcytgcttatgcctgtaatcccagcactttgggaggccaaggtggaaggattgcttcagcccaagagtttgagaccaacctgagtaacatagcaagaccccctgccaaaaatttaaaaattagccaggcatggtagcatgtgcctatagtcccaattactcaggaggctactgtgggaggattgcttgagcctgggatgtccaggctacagtgtgccatggtcacaccactacactccaacctagatgaccaagtgagaccctgactcagaaaaacacatacatacatacatacatacatacatacatacatagcacttaaaatataacatgctgtatcctatacatttgagctaaaactaatgtaacaaataagtgttacttaattgaaataaatcttgctaccttagaatctgtaaggggtatcatagaatgatattgatggtccacaactgttaaaatttacaccaccattttgctgtatctcacacagccatggaaaagtcattgtagctacagagatacctcagagtacagttttatgtattcaactcatatttggttttgtgagaaacatttttaaaagtaaaactttatccaacatttctcctttacctcttccttctcctctttcttctcagtttgtttgtttttgccccagggtttctattgaaaatcctatcctcagtttatccaaaactattactaaatgtaaccaactgaacatgatcagccatttcacttgatactctgttgcctgatatcaaagctcttcgcacttcactaataagctttgaaacagggttattaacatactgtttttaaaaggaagtttaggactctttacaaatcttttataagatttgattgactactgtattggtctgttttcacattgctataaagaatactgagactgggtaatttataaagaaaagaggtttaattgactcacagttccatatggctggggagggctcaggagacttaaaatcatggtagaaggggaatcaggcacatcttacatggcggcaggccacggagtgtgagcatgtgaaggagtaactgtcaaacccttataaaaccatcagctttcatgagaactcactaccactagaacagcatagggaaaactgccaccatgatccaatcacctcccaccaggttcctctctcaatacccagtgattacaattcaagatgagatttggttggggacacaaaggcaaactatatcaactaccttttatgccttttgtttacattttagaatattgttagaaattgcctaataaatggataatagctaggaaaactaatatatgggtactaattagattgcaatgagtggtggggtagaggtaattaataagtctatgaaagcatattcagtgaaaagtttgttacagaattttttggcatatgctttttagaagtacaagataagacatcaatactgataatagtatatgatgttaaataggattggaataaagatttgttaaaacttcacataaaccatttgttccaggaatttatcttaaatctctatgaaaataaattatacccaaagtagacacagttataagtatagtgtaaaaagataaataagccaggcacagtggctcacacttgtaatcccagcactttgggaggctaaggtgggaggattgctcaagctcaggagttcgatatcagtctgggtaacatagtgacaccctgtccttacaaaaaaaattagccaggcatagtggtgcatgcctgtagtcccagctatttggaggctgaggtgggaagattgcttgagtccaggagcttgaggctgcaatgagccaagattgcaccactgcactacagcctcagtgacagagtgaaacactgtctcaaaaataaataaataaataaataaatacatacataaatttaatcagggctccatgggcataatttttaaaccccaatgcagagtttaaaattaataatatattactattctgctgtcctacaatagtgactgttttaagtatatttctcatatatttcttttttaaacatttacttttttaattgataaattgaaattgtatatatttatgatatacaacacattttgatatatgtaaacactgtggaatagctaaatcaagctaattaaaatatgcattacctcacataccagtttttcatgctgagaacacttaaaatctattctcttagcaattttcaagtatacagcatgttgttcttaactatagtcattatgttgtacaatagctctctttaactcattcctcctaacttaaattttgtgtcccttgaccagcttctctccattttcaaactcttccccataagtgatgactctctccgtttaaggaaaatggcatataatgaaaccaattgtattttatcatcaaatttataatgaaattatgaaggatatgacattatttgaaggcctgctatatgttgttttgcttaaagttgcagtttccaagaacctattgatgacattgtgaggacttactgtactccatctttctatgaattcaacttttttagattccacttaaaagtgagatcatggtttgtctttttgtgcctggcttaatttacctaacataaagtccttcaggttaatccgtgtttttataaatgacaggatttccttcatttgtaaggttgaatagtgttccattttatatatataccacattttctttatccattcatcaattgatggactcttagattgattccatatcctggttattgtgaataaggctgcactgaacgtgagtgtgcagataatctctttgacatactgatttcattttctctggatatatacccagtagggggattgctggatcataatgatagttctaatttttaattttttgaagaacccccatactgttttccgtaatgcctgtactaatttaaattcccactacctatgtaacaaagtcctcttttttccacatccttgccgttacattttgtctttttgataatagtcattctaataggatatctcatcatggttttatttgtaaaaattaatagtatcttagattgcaaacctaaaagtggaacaaagtagattattttctattaaaatgacttttttgttaaagaaaactatgtcaggatatttttacttcactgtattaaacttgctaattatatggcacttgatastttattcctgtgacctttgtagaaatgtcaaataagatgcctgtttccctcaaagtagtcacaagggcccttaattattttaaaagaagcatctgaaatggatgtttaataatcctttatcatagcaaataagacaaattttaggcatgatagcaccatttaagagttgttggccgggagcgatggctcacgcctgtaatcccagcactttgggaggctgaggcgggcggaacgtgaggtcaagagattgatggatcatgaggtcaagaaattgagagcatcctggccaacatggtgaaaccccgtctttactaaaaattcaaaaactagctgggcgtggtggcacgtgcctgtagtcccagctactcgggaggctgaggcaggagaattgcttgaacccaggaggcggaggttgcagtaagctgagatcacaccactgcactccagcctggtgatagagtgagactctgtctcaaaaaaataaaataaaagggttgttaaatgattgagttttattttttaatttttttaaattatactttaagttctagagtacatgtgcacaacgtgcagctttgttacatatgtatacatgtgccatgttggtgtgctgcacccatcaactcatcatttacattaggtatatctcctaatgctatccctaccccttccccccaccccacgacaggccccagtgtgtaatgttccccaccctgtgtccaaggttctcattgttcaattctcacctatgagtgagaacatgcggtgtttggttttctgtccttgcaatagtttgctcaaaatgatggtttccagcttcatccatgtccctgcaaaggacatgaactcatccttttttatggctgcatagtattccatggtgtatatgtgccacattttcttactccagtctatcattgatggacatttgggttggtcccaagtctttgctattgtgaatagtgctgcagtagacatacgtatgcatgtgtttttacagcagcatgatttatacttctttgggtatacacccagtaatgggatggctgggtcaaatggtatttctagttctagatccttgaggaatcgccacactgtcttccacaatggttgaactagtttactaccatcagagactataaacacctctacgcaaataaactagaaaatctagaagaaatggataaattcctggacacatacaccctcccaagactaaaccaggaagaagttaaatccctgaatagaccaataacaggctctgaaattgaggcaataattagtagcctacaaaccaacaacagtccaggaccagacggattcacagccgaattctaccagaggtacaaagaggagctggtaccattccttctgaaactattccaatcaatagaaaaagagggaatcctccctaactcattttatgaggccagcatcatcctgataccaaagcctggcagatacacatacacaaaaaggagaattttagaccaatatccctgataaacatcaatgccaaaatcttcaataaaatactggcaaaccaaatccagcagcacaacaaaaagcttatgtaccacaatcaggttggcttcatgcctgggatgcaaggctggttcaacatacacaaatcaatgaacgtaatccagcatagaaacagaaccaaagacaaaaaccacatgattatccatgattatctcaatagatgcagaaaaggccttcgacaaaattcaacagctcttcatgctaaaaactctcaataaactaggtattgatgggacttatctcaaaatagtaagagctgtttatgacaaacccacagccaatgtcatactgaatgggcaaaaactggaagtattccctttgaaaactggtacaagacaaggatgccctctctcaccactcctgttcaacatagtgttggaagttctggccagggcaatcaggcaggagaaagaaataaagggtgttcaattaggaaaagaggaagtcaacttgtccctgtttgcagatgacatgattgtatatttagaaaaccccattgtctcagcccaaaatctccttaagctgacaagcaacttcrgcaaagtctcaggatacaaaatcaatgtgcaaaaatcacaagcattcctatacaccaataatagacaaacagccaaatcataagtgaactcccattcactattgcttcaaagagaataaaataccttaggaatccaacttacaatggatgtgaaggacctcttgaaggagaactacaaaccactgctcaactaactaaaagaggacacaaacaaatagaagaacattccatgctcatggataggaagaatcagtattgtgaaaatggccatactgcccaaggtaatttatagattcaatgccatccccatcaagctacaaatgactttcttcacagaattggaaaaaactactttaaagttcacgtggaaccaaaaaagagcccgcattgccaagacaatcctaagcaaaaagaacaaagctggaggcatcacgctacctgacttcaaactatactacaaggctacagtaaccaaaacaggatggtactggtaccaaaacagagatatagaccaatggaacagagcagagccctcagaaataaaaccacacatctacaaccatctgatctttgacacacctgacaaaaacaagaaatggggaaaggattccctatttaataaatggtgctggggaaactggctagccatatgtagaaagctgaaactggatcccttccttaaaccttatacaaaaaaagattgagttttaattaaagttgtactctgaaacgatgaaacttttatgcactagatttattagagaataagttcattttaactattttttaaaccatttttaactaattcattggctttaagtagtctcacagtgctttgcaaccatcaccactgtctctttacagaacttttgcattttcatttgtttcaaaatatttcttaatttctcttgagatatattatttgacccatgtgtttttaagaagtatgttgtttaatctccaggtattttggggttttccaactatctttctgttactgatttctaatttaattccattgttcaagagcagacattttatgatttctgttcttttgaatttccgaaggtgtatttgatggcccagaatatggtctgtcttggtgaatattccttgtgagtttgaagttatgtcagtttttgcttgatgcattttgatgctttgttgttaggcacctacatgtacagattgctatgtcatcttctagtattgactcctttgttatatgaggcttctctttatcgctgataactttcttgctctgaagtctgttctgtctgaaattaatatagttactcctgctttcttttgattagtgttagcatggtatatctttttacttttagtctatatttgtctttatagtggctttcttgtagacaatatatatgtttttagctccactctgacaatctcttttaattggtttatttataacattaattcttaaagtgattattaatatagttgaattaatatctactatattctttactgttttctatttttgtctgctgtattctgttttctatttttgcccttgttctttgttcctgtttttgtcttttatactttttctgccttttctggttttaattgagcattttatatgattcccttctctctcctttcttaacatatcaattatgcttctttttttaackttttaactttttagtgattgctgtagagtttacactatacatttgtagttaatccaagttacaagtccactttcaaattacactataccaaccgggtgcagtggctaacacctgtaatcccagcactttggaaggcagaggctggcagatctgttgagcccaggagttcaagaccagcctgggcaacatggtgaaaccttgtttatacaagaaacacaaaagttagccaggcatgatggtgtatccccatggtcccagcgacttgggaggctgaggtgagaggatcacctgagcttggggaagttgaggctgcagtgggccatgattgcaccactgcactccagcttgagtgacaaagtgagatctgtctcaaaaaaaaaattattctatactgcttatatattactgcttgcaataacaaagtattcctaatccctcctttccatcccttgtatcattgctgtcattcatttcgcttgttttaggtatatataaacctatatatatatatgaatatgagcatacatattcaaatacattgctgctattattaaactatattctgttaaaccaattatgactaagaaaaataaaagttttaatttaccctcacttattcattctgcatactcttcctttcatcatgtagatccaagtttatgacacatatgtttttcttctctctgaagaacttgttttaacatttcttgaaaggtaggtctacaggctgcaaattccctcaatttttgtttgcctgagaaagtcttatttctttttcacttctgaagggtaatttcacagggtacagaattctaggtgtgtggtattttttttcctctctcaatactttaaatatttcactctactctcttcttgcttatgtaatttctgagacatcagaagtaatttttatctttgctactctataggtaagattttttttcctctggtttctttgaagaatttttctttccccttgattttccaagtttaaatgtgatgcacctaggtgtagttttttgacatttaccctgcgtggtgttcactgagcttcctggatctgggtttatgactgacattaagttggggaaattctgttattattgcttcaaatattgcttctgttcctttttctctttcttcttcttttggagttcccattacatgtatttacatctttcatggtagtcccacagtttttgcatattctgtttgaatataaatcttttttctctttgcttttctgttttggaggtttctattgagatatcctgaagctcagagattctttcctcagctgtgtcttgtctgtgaatgagcctatcaaagacattttaaaatttctgttccagtgtttttttaactctagcattttttcttgattattttttcctagaatttccatctctctacatacattgtccatctgttcttaaatgttgtctactttttccattagagccccatagcatgttaaccatagttgttttaaattcctggtctgataattctagcatctctgccacatctgactctggtgcttattctgttctgatgcttgttcagtctytttagactatgttttttgtcttgtaattttttgttgaaatctgaacatatgctcagtaaaaggaactctggtaaataggcctttagtggtatggtggtaaggtgtgggggaaggggaggcactccattgtcccatcattaggtttcagtattttgctgagcctgtggccctggattgtgaacttcactagtgtttttcagtctcttcccttaggtgggacagtatgaccttccaaggagccagagttggctatttttcttctcccaggtagattaggctttggtaaaatagtttctactgagggcaggccttttaaagaagaacagaatgttttggtgtgtttcaaataattgtttttcccctccccctccataaagcaagaggatatttttctctattattcactgtgaggacctggtagagctcttggaaataaaactcacaaaagtagggaagttccccataagactggtttctcctggagttgctaactcttagacttgtccacactgagcttccagcagttcaattttagttcaggttttcctacactggcactagattccatcagtcagctgtaattatctgtctctctccagtgggacaccaggaatggggaggggagcatttttcctgtgacttcatgtctctgatgatgctaaaaagaattgttgattttcagtttgttcggcattttatttgttgttagatcaaagtggtgattccaaacctttatatgctgcaccagaaactggaagacccagaacttgttttgttgttttttgttttttgtttttgttccagaacttttttaaattttcaaacagcaactttgtacccattaaacagtaattccccattcctccttccactacccctggtaacctctaatccacttcctctatgaatttgccagttctaggaacctcgaataagtggaatcataaaatatgtgtccttttgtgcctgttttacttagcatgttttcaagatccattcatgttgtagcatacatcagaatttcattcctttttaaagctgaataataatctgttgcaagtatatacctcattttgtttacccattcatctgtggctggaaattgggttgtttccaccttttggttcttgtaaacaatgttgcagtgaacattggcatacaaatatctatttgaatccctgttttcaatttagctatatagctaggagtggaattgctgggatcatatggtaattgtatatgtagctttctgagaaattgtcaggatgttttctacagcagctgcatcattttatatttccaccaggaatgcttaagggttgcaatttttccacatctttgccaacacttgttattttctgttttaaaaaaataattatagccatagtagtaggtgtgaaatgatatttcgttgtgcttttgacttgtatttcccttctaatgatattgagcatcttttcatgtgcttattgcctatttgtatatactctttggagaaatgtcttattttctctagtagtaatttaaatcaatttaagtaaaatttactttgtcagcgtcaaactaaattaaagcaatgtttcagctctatatgtatgaacaatgtggtcatatacgtcctgatactgcgattctccaagaaacaatagcagcttttaagtccaacagaaagggaatttttatttgatctcataattcagtgtaattagcttaaactttcttttcgtagaaattttttaaaaccttataaacattgatktctctatatactgatgtttcccgtttccctatacctaatgactgttgccttaatcttttcctcagagttctagtatataagatttttctaagtagcaggcttatattttagttttattttagtatcactttatttttgataggttaaatgtttaaacttaatcgtagaagccagttgtcttataccagttgtccctgataaaaaatcactttctgtattggtattttttctcctgaatttaataaattccacattagtggtaataagttgaggctagaacatgtgtcctattataaatgaacaattggatatcattaggttgtcccccctatcctttgtacatatatctttaggtgtgttaatccattcagtagacacattaatgagcacgggttgaagtgtaatattggaggaagtaaggcttgttgacctcagcaaggagtttaatacctctaattaaattagatagtcgacagtcagtataaagaaatagccatgcctctggcaagctagaattatttatgactctggtcctttgctttaaacttggtagggtaaaatcatttatatccattttatagaaactaattttagttctgattttttatttaaaatatgtgatttgtaaattattttcaaacattttattttctcagaatgagaagtaaatatccttggacctatttaaatgtagcatttatatttcttgtgaagagaagctttttcaaggctcaagacagtagcagcagaatatttacaacatagactatacttcttgagcaaattagccaaacattcagtttagctaagtttctcttagaaatgttgcaccaccatataaaaatcctgatataaccccagtccaagcaatctgttctataaattatctcttcctgaggaagattgatggaaaatggttaaaaataatttccacttaactgagtgtattcacccctaaaaatcaaaagtgctgcaagcattggtataaagtgttcataggagcctctctcatttcctctgtctccttgttctagccacttgctgatactctgcttcataggtagctgaatcatccttttagaagtttgatgaagatcaagttgagataattgtaacatacttagttgaactctctagtctatgtttcatttcctggaccccccaaaatagggggaaagaagcactttatttaagtccatttcctctgaaatactattagtgtaatggaaagtgtttcattttctgtcttgaaatttactcacaatagttgtgcaaataaatgaaccttgtagtgctgcttggtctgattttttattttaaatctgtttttctttattttatacagaaatataagatactttccaaagaactatatgctaaatatagtctgaaaaatgaatttgttaaaaaataaatttaaggaataatttttaaattttttcattattttagtaaaagtgaagttaggattatagttaataagtgctgtgaaattatactcattgtttgagtcctaaatataacaatcttatagaagaaactctgcccataactccagtttttacatatatactcctgatgacaagaatagaggattgagaaaacagaaaatataaatggttcaatgcaagtttatcttaccacagtaaatgttatgtgggtgagatagcagaggcctctcattgtatagggaataaaattcttttttttttttttttgagacggagtctcactatgttgccacactggagtgcaatggcgcgatctcttttcactgcaacctccacctcctgggttcaagcgattctcctgactcagcctcccgagtagctgggactacaggcgtgcaccaccttttagtagagacaaggtttcaccatgtttgccaggatggtctcgatctcttgacctcatgatctgcccgcctcagcctcccaaagtgctgggatcacaggcgtgagccactgtgcccggccgggaataaaattctaattcctcactatggcactacrtgatttggccccaccagcctgcctacctctagatctcatctcctgtctttttccttttcatttaccataatctggcctcactgactgacattctgaccttccaacatgtcaaactcattcacatcttaagggctgtgtacacttactactctctcagtttgaaatgttttttctccacattatcaggcttcctcattctaattcttctgttcttaaactcacatgacagtttctcagaaagacctttttagaccatcctagctaaataagcccctttctactcaggaactttatcacattaccctatattattttctttatagatttatcagcatgtaagtttaccttgtttatttttgtatatgtttatctgactcctcccactagaatatcaaggtcatgagaacaaggactttgtctcttttgcttactgctgtatctccagcacctagtaccaggcctgttggcatttaacaaatgttttttcagtgaattaccacagctaccatagccacaaatcaraagaactatctatagacacctttgtctttatcaaagtgacatatttaaataaatgccataactgcagataattctatttttatgctatgtactgggtaatgataggaaaaaaatgcaagataagtattgttatattatctttttaatagtcaccagtatttattgaatgcccactctgctaaggcatagtattggatgctgtgcctgttgttttcaagaaacttttcctgattgctaaaaatgaataatctaaacagcaagtgaatgtaggaaaatatgtgtgactattagaaggtatattaaagcatgttttctcacatgattgagggttatatcatagagtgttttttactaagtgtgagtgcctgaaagatgggggaaagaatgggaacttggggcagtaagaatactaagttacagtttctacacgtatacccctatctcctgaagtaattgcgtaacctaattaacttctgtgtgttcttcagcttttagttcaagagctattatagatccatgtcctttgttatttgtattgagaaaagtatatttagagcatcatttgtatttttaaattatttatttatttattgtatggttattttactctgtctcctccactgtacacaaagctttgctagcagagaccatgtctgtttttactcattgttgcatctgcaaaagctagcatttggtcagctctcaatatttggttatgaatgaaagaaggtggatatggaggagggaaggaagagaaaaaagacttttaagacctcatgaattagtatgtgtggtatgtaggatgagtagcatgtgatctaggacagcagtagaggaataggaaggaaagtacagaaaaggaatatacttttttaaaaaaatgaagagctcattagcaatgtagtaaggaaaacagagtaatcaaaaaagactaaaagacaatcaggttttaatcctgagtgattataattagttgttaggtacttttaacagaaatggagaagtcaggaagataaattgatttagtgagagacataatacagttactttataagaattctagtctccagccccagataagtgatattatatggcactgaggaaatctagaattgactctggaattcctgttggtaatcatggagaatgagtgcattgccataagatgaatgtcttagtccattcaggctgatataacaaaaataccatagactgaatggcttataaaccacagaaatttatttctcacagttctgggggctgagaaatctaagatcaagatgctgacagattcattgtctgatgagggaccactcccttgttcacagatgaccatcttctcattgtaaccttatatataatagcagaagagtcaagtaagctctctggggtctcttttataaggacattaatcccttataaaggagcccgcataacataatcacctcccagagttccctaccttccgataccaacacactggggggttaggatttcacaatatgaatttggggggtggatgggatgcaaacattcagtctgtagcaatgggtgaacatctgattttcacagaagaacatggagcaggccatagactatagaaattaaccaacattcgtgagcttcatgtcagtgcctggcaaaataggattattaaacagatggtttgtgagcacttagataatgaagtgtagtgatcactaggagccaccatgagttcaccataacaaatcacatcaaaataacttaatttgttttaataggattactagattagggaaaaccatagactgcaataaagcatttaactaagttgcttgttgtggacaagttgaagaaatgtggtcttaataagagtttgataagtatattcatgagtgattgtataatcatattcatagcacataaattaattatttaacaagaaacaatatagggaggtggttacagtataggttctagaaccagcctgccttggtttgaatcctggctctgccacttactatttgtatgaccttaggcgagttacttcatccttttaagcttcaattcctctcctgtaaaaatagggataataataattattactacttcatagtgttgttgtggaaatttaatgaattgtcacaaacagtaagcagtaagcacttaataaatacctttaataaatatagggttttgtggatttttttaaccaggaggaaagtctgtaatgacttgctgtaaggctcttaaccaagcctgtcccatttgacatttttgtccaaaatgtaaatgaagacactggaatttgaacttaaggatagcccaaatctggcagagagccagcacatgaatagcatagtcaggctaacaatagaccttcataagcttaaagataatctgaacctggcaagggaaaattatgaaatcccttctttagttctagcagtcaattgtacctgcttaaaagaactttgtaagaaaaagacttagcaacttgaactgactacaagttccatttgagccatcatttttaaaatgcagaaagtaatttattgaacagactgaaggaagaaacagccccactgtgggtttgctgtattatccagagcatgtgttgatactgtaattctattccatacacaagtttaatagaaatattagtaaactgagacaataacccaagataatgaatatgtttgtaaactgtaagaggagctaagaagaacacttttaacctggaaaaggaaaggtaagatatatattagactgatcttcagataacagaaaatatatagaatacagattggatttatttggtaaggctcattttggaagagctagcatccagaaggcagtttttagcttagtattaagatgttctaatgattgtagctctttaaaaatgaaatgggggccaggcacggtggctcacgcctgtaatcccagcactttgggaggctgaggcaggtggatcacctgaggtcaggagttcgagaccagcctggccaacatggtgaaaccccatctctactaaaaataaaaaattagctgggcgtgggggtgggagcctgtaatcccagctacttgggaagctgaggcaagataatcgcttgaacctgggaggcggaggttgcagtgagccaaggttgcaccattgcactccagcctgggcaacaagagcaaaactccatctcaaaataaataaataagaaatgggttgatttgtgaattcataaaatccccaaccttagaagtattcaagccgaggcaggatgtctacttatcaggcatatggtggcacaagctcctgtatcaggtgggaaattagaactttaaggtctcttccagtattaacattctagtgtatttgaggacttcacttgtacacatgttaaatttcatttagctgctttgtcttcttcaagtaataatagtcatctgtagcctatgttatataccttgagttccaaaatgacttcagtagcagttgaaagaaatttagaagagtagtttggttgccaatcgttttaacagacctatcccatgtacagaagtcttctactctatttcagaaatgaattagcatctgggtcaataaacatgtagataggaacttctttggtggttttagagtatagcaaaacctactggttatacaatcttttttttttttttctttgagatggagtctcactgtgtcgcacaggctggagtgcagtggcatgatctcaggtctctgcaacttctgcctcccaggttcaaggaatcctccctcctcagcctcctgagtagctgggattacaggtgtatgccaccacacctgtctaatttttgtatttttagtagagatggggtttcaccatgttggccaggctagtctcaaaactcctgacctcaggtgattcgcccgccttagcctcccagagtgctcggattgcaagtgtgagccaccacaccctgctccataggacacaatcttgtaagtccatagagataaggaataaataaaatcaatattaaataatatataaagtttgtcaaacatacatatgcctgaaatttctattaatgyttaaccattaaaaattgattttttcagtagtctttcaaaaattcccaagacacatagcaatgattagcaatttctcaatttgtgtctaattactatgtaagagattttaaagatataaaaacatatcttgaagaagatatatcataatgtcatatctcattatgacagcctaaaataattacttatttagcatttgaatgtaaatgataagggatttcatgaagcttttcgcttaaaatgtttgaacatgtttagaatgactttgttatgtacatggttctgtgccagaaatcttcattacaacagcttggcaaaaatatgttgttcttttccattaaacttatttaacagacttttaatactatacagaagatatttgaacaagcttcagttataaaataaaagtatacttgcccttttttctcgtttctttagataagtgggcactagaaattatagatagttttggcaagagttcaagggttaatgtagcagataaataaaaggaattttctgtaaattgagacctgcattatttcagttgtcttgtctttccttacctaactcatttaattttaaaaagtaaatacctaaattcttcctgacagtgtgctcagcttttactatcgtttattacttcaattatacttgatatcacttagaacaatctgccatttggaaatctcagtatagcctggagcttagtattagatctggctgctattgtaacatgtacagcatatgacattaatgtatcaaaattagattggatcatccctcctggttaaatttatttcacatttcttttgtattcagttaacataaacctattagggaagctgacacatggggatggctgtataggaaggatatttttaaagtattttgattaaaaaatgaaattatgaagccatggcttttctgagttgtgtaatcttttttgctttttaaaaatgtcacaaagcccaagtcccacacatttatattattcaacttgtgtatgcatataaggagttactccaggattaaggagtgacagaagagaggctttcactaattggacttaactcctttctttgtttaaatcagatattaagttctttttcctaccctatgttcatccttaagccaaaataaatgacatatttctgagatagaaattgcccgtatgttagctgatagcgtaaatattgatgacagttatcccaggtttactcttctaaacctttccacctgccgtgtgtctagttatctgaaactaatggaaatcccatgtaagatctgcactaaaagtcaactcaaatgctcacagtggcagaatcaataaacgtactagtataatgaaattttataataaaatgcattatagcagtctctatgaagaaaacttaagactaaagggcattaagttcatttttttaacaccttattagaaatccaacttctgaatgttttgtgtttttacagttttaattatcataatgttaactctctctgattgccagaaacacctttgtaagcaaaccccacaaacatttaaataacgtcttgagggtctaacaattctcaagacatctatttggaagaatttttgagtttcatgggcaaagaaaacctggaaataaattcgttaaacgaaacataatcaactttctcttactcaactggggattatccaatttatgagttacttacttctttttttaaaacaatcttttaaaagatctgttagtggagaattggtgcagttgctggttaaggagagtatttgggctatatgtgaatctttttaaatctaagttctctgttacccattgattattgacaattgaaattgtctggtcttctgcagtgtctcctgatgtttttgagtgtttgtgtttcatatgtraaactgatcaagtgcaatttaacaattttttaatttcgtttttcccctttttatgttgtatgtgactgtatgactgtactcaaagagcttttaaagcagtataaattgttttcttgtctttccagttgagacatttgggaaatgatgaagtgcacattgtttggtcagagcatactagagactacaggagaggaattattcccacagaatttggtgatgtccttattgtaatatatccaatgaaaaatcacatgttcagtattcagataatgaaaaaaccagaggtaagaactccttatcttccattttagtaatagattttggttctataggggttcatgggtttctttccatgttacagaataaaatttggagtaggcatcaagttgtgaaactgagggtaaatgttacatagaccctggtagctacatggattgcctaagcctggttcagaaggagctaaaacagaataaatagcaagaaactgtgtttaaatggaggatttggctaggtagtgccagagtgaaagttcctgtgtaccaagctcaaaaaggacttaccttttattaagagaacaattacaatttcctaaaaatcacagtaagaagtaatcatttactttataataggactatatgattcctatatttttagttgatatatcttattaagattgcatgattattagtcatgtcaataaatgaggattctacaaattgaaaaaaaataagccaaatggttcagtcacctatcctatagttggatgtcttatatatacaccatagaattcaaacacactattgcagaaatattttcttccaggataataaaagtttggtagtatttttggtgtgttccttcccttttttaaactgaattcttcagtttctagaaaacctacatttgacaattgattaagaatcttcagaattccttgaattagattaagtttctcatgtatgaatttcttatgtgtgaatttaggtttcttcagggttcacctaaaccagaggccagcagactgtggcccatagcctggtttcatacaacccacaagctaagaatatttcggttttggttttgggtttttttacatttttaaaaagacattttgttggtggtggtggtggtggtggtggttttgttttggtttttggwttttttgagacggagtctggctctcgctctgtcacccaggctggagtgcggtggcgcaatctcggctcactgcaacctccgcctcccgggttcaagcaattccctgtctcagcctcccgagtagctggtactacaggtgcctgccgccatgcccagctgatttttctatttttagtagagacaggttttcaccatcttggtcaggctggtctcgaactcttgacttcaggtgatctggcctcccaaagtgctgggattacaggcatgagccaccacgcccagccttaaagaattwaaaaaaaaaaaaattgaagaatatacaacagagagaacatgtgaccacaaaatctaaaatatttaccatcttatccagagcttacctccttgccttcagctgccatttatgccaaccttattcaaacagaatttctaagttttgaaaccatgagtgagtcacctcaaaaaaataacatttaattatcaaaacatagatattttttctaataaactgtgtaataagggttttaggttctgtagtaaagctagtgtcacaaaaataatgaaaaactaacttcttgcctataagtatatatttttcttttgttcactcaatggagaaaaggaaatttacttctagtgttggctttttgtatacaattgaaactagtaaaatttggaaattggctaagtgtgtaaattatttactcagttacatgaagcacatagttcttttgaatagacaccctataaacctttgacatttttattgtcctagtatgagtgacccatcacagaaaagaattgaattcaaatagtatttttactgaaggaagaactaaagaagcagcagaaatacttttggatgcaaagtgtcttgattgctcttatttacaatctgtctgtaatttgaatgtaaaattatgttctgatttctcaatcaggttcccttctttggtcccctttttgatggtgctattgtgaatggaaaggttctacccattatggttagagcaacagctataaatgcaagccgtgctctgaaatctctgattccattgtatcaaaacttgtatcctttttttaatgtaatggtttctactctaacgtatgtctactcacaaaggtaaatatttcttatatattgttaaagccttttattttctagggtttttttwattattattttttgtagaaatggagtatcattatgtttcccgggattgtctcaaactcctgggctcaaatgattgtcccaccttggtcagcctcctaaagtgctgagattacaggtgtgagccactgcacccagcctgattccctgtttattgatgtatagatggttcagttcctccccagtgttggagcagttatatttgaatgatatattttctttcacatgctttttttttttttttgagatggagtctcacttttgtcacccaggctggagtgcagtggcacgatctcagctcactgcaacctccgactctggggttcaagcaattcttctgcctcagcttcccaattagctgggattacaggcatccaccaccacacccagctaatttttgtatttttagtagagacagggttttaccatgttggccaggctggtctcgaactcctgacctcgggtgatccgcccgcctcggcctcccaaagtgctgggattacagacctgagccactgcacccagccctcttttatatacttttaatcagtactaatcttttggttaattagagtcccattatgtgtcaggtactctacgactctggagttgcagaagtaatcaaaatagtcattgcaaataattcaatctagttggggaaacatactgtattcagcrtacatgttgttaatagagatatgggcaggtattccagaaatatagtaacaaggggtctctcactcacctggatggagtggtgttgtcaggaaacacttctgaaacagtgaggattgaaccaattttgaaggacaaataagagttaatcaggtggaagagccaaagagccttccaagcagagggaacaacataatcagagacatggaggtatgagaagatggggaatgtttaagagcataacttccagagccagattgcctaaactcaaatgctggccatgctttcttagctgtgtagacttgggaaaattatttaacctttttgagcctgagttttcttgtctataaaatgagaatgataataatatctagctcatggtgttatgacaactaataatgagtcaatatgtgtaaagctcttaaaacagtgcctggcacacaacatacacaaagttttaaatttaaattgttttctgatattcctttctaaaataaatttatgtttttcatataatttttctatatgatttaaaacattttattttttatataataaactgtaaatgataagctttaaaggaaagtttttaaaaatatcttatgttccagtccacatgaaatagatttattatcttaacttggtagtttaccacgtacattttcttcttttgaygaaaattgacttaagctatctgattactctgtaatttctcatgtattctgacacagtgaaatggaattgcaggtggatcatggtatgttacattgattaagcttaatgacatttctgtagtatttctttttcatagcatttatatcttcacttactttaaactgaaaactcatatttgaagtagtcattttagtgaaatcataatgactaaaatgagccttgaattgttaacaaaagtataatttggagacatccactaagtagagatttatcaattgaaaagaaatttcggtaggcaagttcagtgagtagtatggacatggcgagtttatttctaagtcacttgtctttgactatacagtctgttgattgtttctgaagattgttttgaagactatattgtctgttgattgtttgaagcattaggaggaactattcaagaagacccttgagtttttgtgaaccctgctgagctcagccagcaatcagtttcatttcctttacctttggggcctggaatcttgagtcttttccccagatgtgaataaactatggggagaatgatttgtgaaacccatactcacagcttaccatttataaggtccacacataccatgtgccttttttaggaattacggcttcattccctagatacagtatctttttcctttaaacaaaacaagatgcttactgacaaattctcactttcctagtctactttttctaaatttttattattctgatttttatctcattgtaatacaggttgaatatcccttctctgaaattcttgagaccagaaatgtttcagatttcagatttttttggattttggaaaatttcattatacttaccaattaattgaacatttctaatctgaatacctgaaatctgaaattcttcaatgaatgtttcctttgagtgtcatgtcagagctcaaaagtttcagattttggagcattttagatttcagattttcagcttagggatactcaacctgtacttccataaaagctttgtagttttaatctgtttattggcatatacttttcagtttgttgtctcctgaatatctctagaacagtagctaatctaacatgtaatatacaggttattacccataaattttatccactctgttagcttcatcaaggatgtttactctctgacctttgcctctttcacagttcactatatcctaatgtccattctgagagtgtcctctgtcatttcattaaaggtgcaattgaaagtggagcatagaggtagatatggaagagtttgtactttcttgtgtaaataaatgtcttaggtctttttggaaagtggtgagatcaattagattgtaatgcaaaactctatttgcctcttgtgtcataaaataggaactcaacttattgagcaagcacaaactttctgacatgaggtacaacaacatttaagatgcactccttaccaagtagttttaaaatgcaaactcaagagttttgggaatatggcttaatttttttttctacatccctgttcatagtcttctatttcagacttcatgttacactaaaggtatataaaagctggctttgcagttagaaagcattaatttttaactcaagctctgccttgtgatcttggccaagtcacagaatctctgaacctcactttcttcagcagtaaaaaagatgctaataaccatctcagaattgttgtaaagattaaatgagataatgaacttggatgtacttagtagatataataataagttacattattttgtgcaatgattaatcctgttatgtgtaaagattacagtcaatataaaacaagtctacccaacaccaaggaattgcctaattggatttttatgtttggttgattggtaggttgatcgattgggttggatttttcaggcctacttcatcatgtttttaatagccaatcttgctaagatgttaatagataccacattggagaaaattgatgaaaatagtaaacatgaatactttatttaaacagaaaatctgaagttttctaccagcaaaattacttctgggacacagagtaaatacattaaatcaggtagatcaaacaaatttttcttgacttggaatcttgagtttagaaactacaggaagttgttttcctatgctacctgagtgtagtatatatacctagtgtagtatgtatatacatgcagcaaaggctagtagtatagtatctctacttaatacatacatacatatgcatatatatatagtacaaatatatatatatatagtacaaatatatatatatatataatgtacaaagttctatattctaaatgttggggggaaatgacttcatacaggtggattacttgattttcaaatgaacatttatataataaactacaactagacatttgtattttaagatattgaaatacaggtacatctgtcttaattttaaataaatacttatttcagaaacataatgtattaaattttaagatgtacctttttgaaatatcagattacgttctcattaaggaaaaaatcaagcattttaaaattggtcaacaatttagttaacataaattacaacagaaattgagatacaggtaggctttggaaaccaccagttaatcctttactcttcataaaakaaatgaagggataaaaaataataagcttgattatatttggataattgtactgctgtgtcagttattttatgcccaataaaagtactcactaagattccaaagcataarttgtgctatttatgatcattaaatacagtttaaattttatcctaggaacatgttctgaaaccatgaatctaatgttgttcactaaatggggacagtattgattgtcatatgctacccaaatcgatcataccagcagccagaattacagtaatctgtccgtattgatgactgtctttcaagctgaaacctctccttcgctgcacttgtttcttacattacttgtactggaaaagcattttcttacaacttctgattttgtcagctaggtactttttttttcaggcaggggaggggtctggagctcaatttgttagtttaatcatgcaattagaattgaaatgcaacactgtggaggaaaaccaagcagattctgtgtaaccattggaccagagaggtatttcagctttaatcctagccatcgtttattagttacctattgaaagagtgttcatggtttttttgtttctgttttttcagtgggaatcataatcccaaattattaatttcatgacctcagccatcatgattctattccttaaataaaaattttaaagcaattatttcttttgatcctaaagacattttgactatgacttctgaatatacaaatgttaaatatgatacttttaggtaaatactgtttcttcttttagtgagatttattatacatagaaatttgcagaatttacaatatataatcatgttgtagtagtgagggttctcagagaaacagaaccaataggatgtatatataaagagagagaaaagagatttgttttaaggaatttgttcatgtagttgtgggcgctggcaagttcgaaatctgtaggagactcggggaagagttgatgttgcagtctgagtctgaaggcagaattctctccttcctcaggggacctcagtgttttctcttaaagtatttaactgattggatgaggcccacccacattatagagggtaatctgctttacccaaagtctactgatttaaatggtaatcaaatctaaaatataactgtaacagtataaatataacagtattgtacagtaattaagagtataatatatgttatatattatattaatattataaaatataacagtagcatctagactgatgtttgaccaaaaactgggtcccatgacccagccaagtttacataaaattaaccaacatatcctgtttttcttttctttttatccttattacaaattataatttgagaaaatacataaatcataaatgtactaggtaatgaattattacagtttaactatcaacaagtcaagaaatagaattgtagtttttcttccttcaaaaatatttattgatcacttacacagtaaagattttgagagggatacaaagacaaatcagatagtaatcctgtcctcataagcttataatttaacaaggagagaataatatgtaattactaattataatagaagactaaatgaaaatgtcctggtagggttatagataaaatgctataagagttccaagggtgaagaaattactttggagtaagaagatcaggaaagagtgtttagaaaatctgggcctcagaaggtggggtttgagtagatggaatgcaacatgtctgttttaattcttgtaatttatagtcctaaggttttgtatgcatatatgtatattatagaagtataatattctgaaatatacagtatgggggatattatataattaaatggcattttaaaagaatactttattcctcgatttagaatattctttcctaccacaactagtatcgtttgatttcttctaatctgtttagatttgactttttcttaaataccagaattgggtttctatttaacttgatcagggagattaccagaagtcagtgattattcttcaattagttacagtttattctccctcaagctctactactcaaatgtccagtacctgttgcaaagtaggaaagccaaaactaagtggaatggaattgatgaattgattggttctgctaatgcagttgcctttcgttataataaaacattataaaaccttttgggggggtctgtcagtattgttgccatttcacgttagaagaaaatgagtttattgagaaactatgtaattttatgtatctactgtcttttgtagattattttctcagaagataacatcaataagtatgggttatccttaatttaatgtgtaaaaagaggataatagtaccaaattcaggatgatgtaaggattaagtaaaattatccacatgaagcactaggtaacctatctgtcatgtagcaagagttcagaaaatggtagctacatgggagttaatgatgctatcgttattatcatctacattgacacttgggatattcttctaaaatgcaaacctaagtacagacagtcctcagtttaggatggttcagctttatgatggtacaaaagcaatacactgttcagtagaaatcgtacttagaattttgaattttgattcaaaattcaggagaattgcttgaacctgggaggcagaggttgcactgagccgagatcataccattgcactccagcctgggcgacaagagagaaactccatctcaagaaaatataggctttgcattagatgattttacccaactgcaggctagtgtaagtgttccaagaacatttaaagtggacgataagttatattccttataattcgggtaagttataatgttcagtaagttaggtgtattaaatgcattttcaatttatgatgagtattttggaatgtaagcccattgtaagtcaagaaacatctgtatactaaaagacttaagatggctcttaactgcttattgaaacaagtgtaaattttttgatgacctggaagcaattatttttaccttaccctccctacccttatgtttctcactgcagttttgtccaatatacctgtactcctccccagctccatcccccatctttaccctcatctcctaccacactgacgcccagggcaccttatgtgtccagctaagtcatattcattattcctgaatgctcttctttttcaggcccatgttgttaccccagtaatgcccatctctactttttctacctaacatatttattattcatgacccaaatatcctttgttttaaaagaaaaaaaacctcctttactatgtaaaactattatttacactgcctcaaaacattttgttatagtacttactgtgtgtgtatatattagcaagtcttacttaccctccttgtttcactaacttccagcacagtgcctagcctatggtagatggctagtaatttattctaattagaacaaggtggatgtatttattatctatctttttgaagtttagatttagcatggattcttttttttttttttttttttttttttttgagacggactctcgctctgttgcccaggctggagtacagtggtgctatctcagctcactgcaagctccacctcctgggttcaagcagttctcctgcctcagcctcccgagtcgctgggactacaggtgcatgccaccacgcccagctaattttttgtatttttagtagagatggggtttcaccgtgttagccaggatggtctcgatctcctgaactcgtgatccgcccacctcagcctcccaaagtgctgggattacaggtgtgagccaccacgcccggccatggattcttttaagaatggaaaagccccaaatattttttgtagtaacttatagtttgtgatttgtattagactaggctacaactcttaagagtttactgggtaggtaagaagaggaaacctaggatcagtgaaaattgcctctgatacatcaataagccaggctagcacacatacaagggttttttattttgactacttaatcagtagtatatttttattagagcccattatagtttactgaagataattttcagacgtcattcattaatgagggttttcacttcatttggggttgggagatctcttagggagaaaaatgagctaagacatctctgacttgatggcagtggcagatgacttggggaggacacatcttggtgtcccctccaaggaggaggcagcatgaggctgagccctgaaggctcacacttcctgctgtaaggcaaggaaagtggtagcaacaggagagcagtagggggaagcaatgggagtctagrcgctgatgaggtttccaattttgctgctttaacatttgtaccacctatgttactgagtccattaggagctctcaaaattttgtgccatttgttcttcatgctttctatgaaggtcttaaatatcatggacaaattgattagttgttaaatcaaattgattagttgttaagtcaaattgatttttaactaagatgtatagttatggtcattctcttcaaaagaagagaagataattcttcaaataaaatgtcttaccagctaagtgatccaggttttgtggtctttgaaaagctcacagccattgtgctactggtactaaccattgtagtaggatctctccaagagcagacaaacattcttctttacctaacaatctgctccataattgaaggatttaaatctcctgtattcagccagccgcggtggctgtaactaggtattacaggtacacacctgtaataccagcactttgggaggtcaaggtgggcagatcacttgaggccaggagttcaagacgagcctgggctatatagtgaaaccctgtctctactaaaaatacaaaaaattagccaggcatgatggcacacgcctgtaatcccagctactcaggaggcttgagggatgagaattgcttgaacccagaggttgcagtgagcccagattgcaccactgcactccagcctgggcaacagtgtaagactctgtctcaaaaaaaaaaaaaaaaaaaaaaaaaactcctatattaaagacatggcattacaattaaagaattttttgctgtgcttacacatccccttgtcatggattttgctgccaagtcttgtagtctttgtagtctgtgtatacagagtaattatttaaacaggggccccatatatgtgccacacttctacagtgactctagtatatttttgattatgtcagttttaatttatttagctattcttttcaaaaatggcagtatatgcctgttgatgatgttactgtattttttttttttttttttttttttttgagacagagttttgctgtttcccccaggctggagtgcagtggcgccatctcggctcactgcaacctccactttccagtttcaagcgtttctcctgcctcagcctcccaagtagctgggattacaggtgcctgccaccacgcccagctaattttgtatttttagtagtgacagggtttcaccatgttggccaggctggtctcaaactcctgacctcgtgatccatctgcctcggcctcccaaagtgctgggattacaggtgtgagccaccacgccctgcgatgttaccgtattttaaaagtactgcatacctttaaagatggtagttttggtctagcaaatccttgtcctttcaaaaagcaataaatgtgaatctctgatatgtaataactttgtgataatagtaaagaaagtttattctgtctgaaaatagcattgtctcttaatggtctctagagacagtctttaaggttttactaatattgaccaataattacttacagttaaactgtgggagctcacaaaaatgacttcagtatatggccaacttccatttctgttaacattgttttaattctagagatattttcaatttttatcttctaccaagaacttaatgcactaatgataaacttaagcaatttggggtcattcagcaatagtgatatagaccaagtaggatggtaaaggtgattaattttaagtgggagaggatagggtkagaggatgggatggaaattagaggaatggctttactatggaagaattctgctaatatttcagagacacatggaacttttctagacagatatggtcagggaagaattttttaagggtaagaagtggacatggaggcataaaaatgtgatatggtcaagagataaaaggtgttcagtactgctggatgatataaagggaagagcagtggcagataaagatcaagaagtaggtcaaaaccagataatacagtcaagcagaaagaaaataaacataaatgtggttttctaatgctactgattgttttatggcagccagtgtctaaggtaacagttccttctgctattgtgtgttttttacccgttgactagcgaaacaattacagcttgaatttcttatttttcattttctagcgaagcctttccaaaatgtttattgatcgttattttcataaagtcttttttatgataattagttgagcaataattgccaggctaatagccagtattgcattttctcartgagactaagatctctaaatgtttgatagtatttatacatatgtatcatttttaaaagagcatctgagattttcatatttcttatgatagactcatgatactcttcattcttgcacaacaatcctttacacttttcctatgagatacttttatacaattattgagtttttacacattattacacttttacacgttattgatgaataaagtacttttgtcctagtcttataatacattgacttcatggcaacaacgacaaaaataccaaaagaaagcattaccaccatcttatctgttttgtcaaatttagtgtaacagtatggtccacatatgccaatctggacagttgggtcatatcacagtgcacgagaagaaagagaactccatcagggcacggacaaagtacagtattccctaaaaacaacgaaacttgaagtttgcttctatctttatcaacttctcacctgtgctggaatagggatttttttttttcctgtattaaaaccctatgatgttgcagtttgtgatgactgtgcactgctccactcacattattgttcaccacacctactacataatgtacaacttttattctactctttaaatatgaaaacaactgtagattcagatgctatttcgggatttcaaagagcaaagaagaaaggatgtaaagcagaaattagtctttaaacatatttgacataggaattgaagtggttttcattcattcttttcattgactaaacataggccttttgatattaaatttttaataataatggaattaaaattaaagtatgggtcacaaatctatccattttcttctaactgctattcctctcaaacactagaatagagcctatttaaatcttaacttttgcttgccaaaccactgttaccgcccatctgttcatgccaattgtaaagaaggttcagtttttagtgaagctttgcatttcacataaggtatgtgaagtgaaatttcacaagggacatgatggatcctgattcttagtgataaacctttggggccatcagggttggcatatggtccagtatgatatgaaggcttgggttccctggcttcacttctttggcgtgaagctgataaaacctggctcttgagtattatttcactggacaccaatcatgggcagcaggaactgcccatttaactctctgtgggaaggaagcccagagagcattcacaatggtaccattgtcgagttgcaaactgctctgaacagcttgacagcactagggaggaggggaaggggttgctttactaattgctgttcagaaaagagaagaagcaaaaatagctgttgcagaactgatgtttctacatttacttactctcttgctaagaatgttgacttatttagcatgtaactactatcaaaaaagaaggcaaatgaatataagcaaccacctgtagtaattccttattaacatgccattatctatttttagcccatcagattattgcagagcaaaagtcagttttgccttatttttttattagatgaaaataaggaattttttatcttcataatttaattgaggtgaagtggataaaatcgtcacaattcacatgtcagataaggttataaatttggtttaatttacactttgctttttaggattcccaaataccatctgaatacatataaacgatattagtatagaaatgtaaattaactttctgcataacacaagtgctaaaataatccactaaagataaattagtcagcacatcttaaggttaaatgccagatttatcatttaagtgagtagctcataactatttcagtcgtgtatgattatctcactcattgaattccctctggttggattttttttaatgtgagggttgtttccttttttatgaaatattgtatgcgctgatatttatataaacactccttggcctttctgttttcttggtcagctttatcagcaagcagttgtgtagttttgttgcaaagaaacaatgatctacaacctgaaaaaaaaattaatgcttattttcagactccagggattctgaccccatagatgattctttcttttcagctgaaatgaagttgactaaattatattgcagtattataatttatgcagcatgttcttaaataggataaggaagagatattttaagaaaccttttaaatctgtaaatttttttaatgggatgytcttgctagatttggggaaattcaaatgcatgttttgtaaaatcagtaaatctgtaaaatttactactattccatatcctgtgttctcttaagtaattttagtaaatgggcaccagtgcagtatttcaaaaacagtaattcattgaatgcccattcttccttttactgcagaatagattgtatttaagtcaagattaatggatagattttgatgttaaagtccagtgtctatgcctatcattccctgggggcatatagtgcattagtttaagccaatgtactgcttatcatagattctatgacactgtcttaaatgacagtttactgtactttgtttctacttactatgataataaaatcactttttttgtattcccaataattatagcacttaaataaaatcttaattaaattagtgcacatttaagtagagataacacttaagtaattgtacactgtaaaatttcacttatttgggktttttttttttttctttttgcagtcttctgacagggtccaagtagatctttccaagaatgagaggacattataatttcattaaatgagaggacattataatttcactaaatttgaaatccagataccctagtttttgttttgcttcgtacaactttcatgaaaatagaatatayatayacacayayacacacacacacacacacacacacatacatattggataatcatattagtgctttttgaaacccaccaatgattactggattattaaatcaggaaggattttcagagcctttaggtaggtttaaatttttaagcctatttatttaaggttaatctttttaaatgtatttacacaaactttggtggaattgggcttatcaactttttacttaatgttttcatttagtaattgactgatttatgagcaattatatgtggtccaaattttattcaactccagctttcaataatagggctatcctcacactgccttagcacctgttatggattttgagtcatctggcagcccatgggacttagataaagaagtaccaggtgtcctgcctgtctcctaattgagacgcagtgaaaacaatatagacttggcaatatggttaaaaggatggattaaagcccagctttgtctgctctgacaaatcacagcttttccttcatggtgtagatagtatcaactactaaagaatttcatgaatataaggcatcataaaaatagacaataatttgtcataacctgttgcagactttcagaagaatttttattaacatagtataagcaatattaataacaagattcatgcaatttgtttaggggaattttattttttactacatgtgaactagactgcatgtttctggaaaaaattagttacagtaggaaagaaatggaatatctttccctctgccagatcttaatttatcagatcttgctttataaggtaagcagtatagtttgctttcatcttataaatgaacagtgtatattatatattagtccatgagatactaattacccggtgtatttcggaaaatttgctactttactaccgataataaccatgagatccttgagatgtacttgcaaaatatgtctacccatatgctatgtctcaataaaattcttatttttcattcttttttcaagaccctgtgtaatgatattgcctcagaatgtttaaagatatttcaaggccttttaaaactgaagtgccaaatgtggtttgttttcaaatttttattttagaacatgcaaggggttttactgtagtatagtcactaatgtatagtaaactatagtatagcaaatagtattttactctactaatatgtaaacaaacatctttcaaaaattgccagtcttagaatttaagctaatattcattattttgacataactaaaaggcctaatatacctttgctttttcaccgcacaacacctaggtcattgagattggatgtagagagagcattggactattaattaaaagaccaagattctagtcccagctctatccatcagcagctttgtttatccaagcaaatctctgtactctccattcaggcaagccttattgctgcctataaacattagtaaaataaactaattttaccaagcttcctggaagtaatgttgatggatgtatccttcctctagttcaaactgtcctaaatattctcgataaatgatgccttgtcttgggataacctctttcaaggtggcctttttaaaaacctaaatatttaacatttttcaagtgttgtttttcaagggtattattacttctattcttatggtatacagagcagttttggaaatctgcctaaaatgatttgaaattacccttcatttaattttctctrtaaagattttctcattcttccctttttttcccttctctataaatggccacttaagcaaatagaattagtttgactaaattcatttctcatgccattgtagaatttatgaaaaaaatttaaacaattatcacaaccaatgggggaaatgtttatttcaatgctaaattatgagttataattacattgcctaaagaaaaaatccttctttaagattatgaggatttaaagaagtaattatcagttttcttttctcttaatgtaatactttacrtatttatacattgtgctttatttacttttttttggttccagagagggccagcaagatcaaggggcatggtagaaccaaaatctttctcacaagaaagattcaaagtctaaatccagttctaggaaagttccaactatatttccccctaaaaggtttgcctttacagagccatatggggattagaggaaaggggctgtcagcataacagacatctcctaatctactatcaaaccaactttattcattccttctagaagttgtaaacagtcattgaatactaccaggccctgtgttgggtgttgaagacataaatataagaagacaaggtctctgtccccatggcgttggtctcaccactatctgtaaccacaaaatggatcataaaaatttcaataacataagtagaatggctggattagtagtctctaaagtgaagaagtaacattgaagaaccaccaaatctgcccccaagaatcgggtataaaaactatttcttaagaaagtgtatttaggccgggcgcggtggctcacgcctgtaatcccagcactttgggaggccgaggcgggcggatcacgaggtcaggagatcgagaccatcccggctaaaacggtgaaaccccgtctctactaaaaatacaaaaaattagccgggcgtagtggcgggcgcctgtagtcccagctacttgggaggctgaggcaggagaatggcgtgaacccgggaggcggagcttgcagtgagccgagatcccgccactgcactccagcctgggcgacagagtgagactccgtctcaaaaaaaaaaaaaaaaaaaaaaaaaagaaagtgtatttagtagaagaacaagcctaaggaaagagttctctaaaggggacctggcaggtgggcgttttgcagcaatcttcaagatgtatgatgtggaaactcaccatagccaatttcaggctaccaaccttacaaactttatgagtattgaataatttactctaatctgctcaacttaagtagtactcagatttcagctactttaagttacaactcaaatatgatttaagttgtactcaccaaaaattttttttaaatcagtaggcaacatttctaagtaactattggaacactccctcttcctgtgcttactatttttggaatcttctgtctagagaagggagataaaattcctaagtgctgaaactgcaaagaagccatagaaatatatgagtgtagggaagtgcttactaaattaagaatttcagaatgggccttaaatccctgagactatgccattgagcacagatataaacactttatacttgcctttattttaaaatgagccaatcgttttttcttgtttaggaaataaaacatgaaacctgaacttaagaggaaaataagcaattatacagatttttgatatctgcttacaagttgtaatttttataattcctttttgtgaaaattataccttatattcattcttgtgtataacatatgtatacgcatacatatatacacacacacacacatttccatttctttcagactagtcacaaattagatttgaactgaatgtttatacagcctactggttgtgccatggaattacaaaactgaaagctttcccttttctaacattacaagcagttcacaattaccagattaataaaattattgtggagaacgaaaggtgttgcttctttaaaaccaaatctacctttatctattcttttatgtgttaataaagttgaaatacttgatactgcataaccttctgcagtatcttttgtccttttcctccatgagaaatcagtttccttgcatcagaataagtcaaaattccctctctgtacgtgccgcaaacaagaaatagtagtagtattatcaaagagttcttgcacatgaatacaggtatatttcttaaactgacatcaaaaattgccctcctagagacagcacctgctgtttacaaagatgtgagccaaaggtcaaaataaagtatttcaggacaggtgtcagggcacttttgtgttaccccgtatttgtatcctttatcttcaacaccctatgaagtgagcaggtgatggtatccccacttaacttacagatgtatccccatttaacatacagataaattatggcacagaaaatttatgcttatctttccaggatcagtctgaaattgaacccagtttcttaatagctggtcttgaagcttaaaatcaagagtaataatttaaaatatgtaatgatgttaacttaatattaatgaattacagattacatttaaactgtttctttacgctatagacattttgttcccttatttttagaataataatattccttccccccttttttccttttgtagaaagcggaaggaggattagtggataattatattgctgtgattgcagcacctgtgtgttattttttttttttttttgattggctagttctgtattaaagattcctactagctaaaagtctccctcatcaaatggtttttattagctaattttggcttgagttgttttaaatttacaaccaaaatctgcttacttcaacttagatttgtactttaaatttttgttctgaatttttttatttaccttcacctttttatcatcttatccatttcggttttttaatttcaatgccaatggcaacaggcactcaccatataaaacgatagcttgagttgtcctgttgttgccagctgtggagtttgtgtgccactcaatgtatatgtactaataactcttccctagagagatgccttttatggagtaagtgtctaacctattataatgagatataggaattaactgctttggatgattacaattgcagattctaacagcactgtttggaactttaatcatctcaatcacaaaaagcacctcgttgtggactcagaactgtggtctaagtgcttagagtttattatatttccttaatacatgttttcagaagtaaaaaaagcgggggccggggggggatgtaagtmctgtagattgggttggcttgttttcatgttgttatttatttatttggctacatcaaactgggaaacttataaagatcatttagcttttagaaagtgatttaccttagatatagttattttaccaagctaacagtgtttgaccccccaaaaaggaaacttacctaataagtgatgagcactgtagttttttcatttaaattcaaccgttaatgattgcttcccttcactctgccatcctgacttgaacttttaaaataattttagaaagcattgttttcattaatgaaatttaattaatttattgtaaatgtattaaatatattttttatacaaaatgagtatgttatatctggataattttakttttgtgcagctgtgtattaggrttttttccattttataagcctctttgtataaggaagtagaattagtctgcaaaatgtattttagctagataatcattttcttgctttgatgaatttactacattggaaatatcctcccctgctttaraaatattaacatttgctttctttctgcctaatttttatataaattctaaatataatgtaaaatatttcatttataggccctctgaaagtagaacatttttaaaagcaggtaggtgtctccaccctacttttcatgaagcattttacccattcaagcagacttttaaaaacagcttgttttgatagcagactgttctcctgtgggccttcagcctttgcttcctggcagcacctttggtgcgaaaagagagtgatcaattggaagactatcagtgccagcatgcatagagtgataagttaacacaccactgggaatttctagggcccaccaagatacttcacttctaatgtgctaacaagctcatttttctacctcttgcctcttcagttattttttttctcagaagagcttagaagttgagtgcatcaggcataatgaaaagctctgtaggagggagaagcaataaccccatttttcccttttcagccaaatagaaaattagtttctggtaatacacaaaggccagtattttttgtacaaggggcactgctgtgaatcaaaggactctattaactgcagaaaattcggcagctgtgaatctcccccaatgaaaaaagtactttccaacaagttgtgagatatgtggtattatttagattgtaccatcagtttcatcctcttctatttataaccatataccccctttaaaagtgtgccatattacttgtttatgttaagactcaaaaatgtccgtattatcctcatgtaaaatccttgatgctgatcattttaatatgcatcttgtcctattgcttcccacctcaaaagtaaaattcttttgaagttcacccccagtgtacagaatggaaggtaatagaattgggattcaaggttattttaatatttgatacataagataaattgtaatagaagcagataaattgtaatatgaaagccacttagcaaaagttaccacaatcaaagtcaagtgcataatgaatatagtcttgcctttaactcttatactttttttttctcttcttactcagtgaacttgtaaatataactaactggccatggtatctcccattgaattatttaaaattatcttcctctcaaattatttttttgggtcttggcttagtctacaatttctagagttttagaactatataataattaaattgcatttttttaaaaaataaggaattttgagggaaaatattaaagtggactttggggaaaaattcagtggaaaaaaagaagaacaagtagacaaatttttattatccttatttaaatgtcttatgtaaagcctgtcagcatagcacactgagtaccacagggaaacttttaaaagttttaaaagaaaggttaactgatttctcagttcaggaactatatgacatgaagtcagcatgtgagtttttcctgataattgtatgttgctgcctgctgctctacattttgacagccatttccatagttgctttcgtgaacaacagaaatattctctctctttctcgccctctctgtgctaacagcacaatcaggcctgctgaaacaggaagcctggagtgggttgttcaaaagcaacaacgcttcaaggtactggttgcttgtcaataatatcagagaagaaaatgtggtgaaaaggaactacagtatttttctgtcagtgtcagtgccctggagatgctttgttagacagtatttaggagtcctgtggactctttgcaaatattcctgcttgtttcagtgttataattgactaggtattttttcccagcatacagattcagctatgtatttatcttaaccacatggagttattcgaggattacagcaacagtaatcttccattcaaaatgagaacaattgttgagaaaatgcagggattttagaaaaagaagaagatatgtaggaatttttcacaataaatctttacaaatgaaaaacagaattttggacgtagtatcttaagcaacattacaatgtttcttgcgtggcttttgagagtaaatctgcagatggaagctgattaacaagataagatgagcctaggccgatataaatttcagcctagactcctgatagaaattgaatcctttctcaagtaaactgttaacttccttcatttcagtagtttagtattattgtaattattatctaataaatgtctccctgttaagttgtcatttatactgggatcatgaagagtaaacatacattaaaaactatatttttgcactttaaaaagccatactgttaacaatatataagaataattagtgaataattctatttattaagaagtaatggcttagcaatcatagcagtcctttttgataagattttttttccagtataagctgcacttaagtttatccttaaccaaaggaaatcagctatgaggagagagcacgatacctgcaaacaattgtccagcaccacttagaaccaacaacatttgaagattttgcagcacaggttttttctccagctccctaccaccatttaccatctgatgccggtaagattaaaagcgagtattagttacttgttattggaacttgaaatgcagtacccttttgttctaaaaacttgcttgaaaaaaattctaatcattgaaatatgaatttttaatcactatttaatatttgaatttggcctataaatttgatttayggtttcttttacctaaatgcagttccttaaaaagtcaactatcttcataaaagtacatgtaccacattytatatgagctaatattcaatgactcttgcatcttctggaatcatttctgaagtatctgcaaaagaaatacaaattaagcatgcactctgaacttcagaggatcaaattttgtggccaagaatatcaccccatcatctctgattttacagctaaagctaatataactggtctagatttagaagtacttaatactgtaatttatgttacaataattaaagagtgtaagagggtactgcattttatgattaattttgaagaaatcagtaagaaaataaatgactcgtggccttcctattctgtaatatcttgctctccttatgattgtttcatttattttccctctttagatcattaaatatcagttctgtttatctgaaggtaagacaaagtgtcaaccaaaacaccctctgttcttctcccatttccttttttcaaaattagcaggctctaagcttgtaacttaaacaataagtaaacttaacactgtccggttcatactaaacatttcagaaattgtcactaaattttttccagtattatactgactaacccaggtctgcatgaaacactaacatggtttggggataaaaataactaataatagaatcccttggttgaaattagttacaccttgttatattgaccttttttttctgtttctcagcatgaaaaagtagtactattgaactgaagtagtgtgtctttgtattttgtgatgtgttgcattgttattggatatcctaactcatcaaatgataactctctgtgtgccttgcacttcactaggcacctgaaatacaaagatgactgttgtaatggtattcaagggaagcaggaaaagaggacataatatgcttgaagtttatcataataaaccttcaaatctctttatattaaataagttttctttatattaaataaattcaaaaggcacaacacttcttttctagcctaatttatttggaaaaagttactgtaattctcaattgagatttagttagtgaaattaaagtttccattcctgtcatcattaaattgctattagaaaaataattttacaaaaaatttagatcgctttcagatagtataaaagacctagcaaagacaaaaccgtattaaaccaggttgaatcttttgaaagagataaaaagtctaagattcactttaatggattgacactatccaaaattacccagtttggcattaaaaaagatggtaaaagagaaatattaaattaatgaacagcaaaataactaattaagtatatctggcaattttcttgtttaataatggagaatgtccgataaaatgtcagattatattaaaagagatatgaataacacttgtgtatcctatagtcaagccataaatttcacaagtgaaaaatattgataatagaaccacacttggactaactttcccccttagattgataaaggctgttcagttctcatgtgtcgttgtttaccagctgtactctttcgtatttgtcatcttaatgttctccccatattttgcatgttatcctgcacatttggccaggtattgtggaagtgagtagtatctcacttctgagacattaaaggatgctacagcagccaagtcagggttctgttggcttcatttttaatgtgtcttacaaaattattgtgtaagttgtttaaaataacacttatgattgtctaaatagtagtaaaaatgtgaatttgaacataaacctaatattgtgctacagattttttcagttaatttttaagagttgtcactgcatttaagaaccatcctctaattttaatatgcactctgattttcaaaagggtgtttttgcttgtaaataacttgtgccagtattactgaatacgtttctatataagtttttgcagactttaatagttatgacataaatttttatcagagtggttctcagttcaacacaaaataaaaatgaaatatttactcttaagagtagcaaaaacatagaatctgaaaaataatttttttccagttatctcaaatcttaacttttctgtcataagtcccatacatatagagctccctttaaagttataagtcaaagtggacagagaagacataaaataagctgtataatagcagtttggacctgactgctggtttgcaaaaatgacataatagtgtaaagtttttaatctttttcctagcagaagtataaaatgtgttcaccacattgaaaaaatggattcataattgcaattgaaaaatcaactttagatatcctgtgcacaccctatgtatataaaatagtactaatcaatactaatatggtcatttgaaattaaattttaaagaaatgccaaaatggtgattatattctgtctaaccaaccctataacataattatattcagtggaatagtatagaaaaataatatttattattattattattattattacactttaaattttagggtacatgtgcacaatgtgcaggttagttacatatgtatacatgtgccatgctggtgtgctgcacccattaactcgtcatttagcattatttttttaagatttcttaatttggttcaagattatctaaagcccactttctggttagcggtaacgtgcaaatcaactgtggtgacatttaaatccgagaaaacatttttccgtattactttcagtattattaaaatagatatgaaagattttggtgcatcatagttgatccataaatttcataactgtattttctcaaaatgtactgtctgtggcagtagactgatacttaagggaaattatttttatccctaaggtcattgagggaaatatcgtgatgtcacactttgttgatctttcataactacgttaaaatattattagatttttcttgtcttttatttttaaaaaattacaggaaaaaatccctttatctttgtcaggcatgtgtgtggaaaatatcaaaagtttttagtgacttcttaaagttttttcatatttacaaatacctctcctttaattataaactttaaaatgaaattactgctcttcttggccagattacactgtttgttcatatgtacatgtttctcccaatgttatattgtcttttcaatattatctttttttattttgtaataagagaaattctagaatgacaacaagaaacaggatcctgttttgctgaaagtgtatagtaaatattaattggtttaactttctcaatttcaacattaaaaatatactcataattttttggagtattatgtctttaagttacagattttagttatttacagttaaagtgttgataggtgtttctgtctttctgtattcatatacatatatatacatacacaaacatatatctatacatacataacactttttataattacttttggagaatataggggttcctatttaaagcaatattataaaattaataaaattcaaatataatttttatgataccaaattcagagataatcaagagtgactatgaaaacctagagtagtatctagtctgccttctaacctcagttgtgctgttaatttgcaaaatctatattcccatatgtagataggatggaatttatgatggtcagatctatttctttgaatctttgagtgggatggatcatcaaaatttagccattgctttaggtaaccttttttagctcaatgtcctttaaaagttatttaaactactcaggctttgaaatgatctgaaataaaatattttagctccttagaagatagttattttataaatatcttaaatattagtaagtgccaacagaagaattagttgcctgcaatatgtaacataagctataaatctgtttatttaatggtttggtttttgtttttgttttttttgagacagaggctggagtgcagtggcgcaatcttggctcactgcaacctccacctcccgggttcaagcaattctcctgcctcagcctctcaagtagctgggattacaggcccatgccaccactcctggctgatttttgtatttttggtaaagacaggatttcaccatgttggccaggctgatctcaaactcctgacctcaggtaatccacccacctcagcctcccaaattgctgcggttacagatttgagtcaccatacctggctaattaatgtttttaaaaacagattcctacgcatattaatttatcattagattagcctgaaattataggcagccagatatgttctatttgatactttgaacttggaaatttggcttatatgttgttgaccaagaggcaagtaataatcttaaataagacccactaaccttttgtgataactgctggttcagtttccacatagaacattcactgagatgtgaaatttttgtaatgaaaataataaaataataattgtgctattactgagtgccagacactgtgctcggtactgtacatacattatgaaattaaaaaatgcttacccagagtcacctggtactttgtcaagctagtatttcaacctagactgatctgatttcagagggcatgatcttaactattacagttacccatttagtctaaatattttcatccccttcctgctgttgatagagagatattgcccaataacctgtcatatttacaaattataaattgttaaagatttttattttaagggttttactttcccacccattgaaaaatctcttttcccccatatatctttaaggttgccaggggagaagtatgagctttggaatcaaactaatctggatttaaatcctagttctgccagttgttatccatataaatgcaaattaatcaattctcccaattttttcctttgtaaggaggaggtaaaatatgacaagcttggcctgatttgttctaaatctaaaatactagtagttcttgaatgtatcttaaaatgaaaccacatgtttgcctttatttctctactattttaaattatgttatttcctggccaggcatggtggctcacgcctgtaatcccaaccctttgggaggctgaggcaggcagatcacttgaggccaagagttcaagaccagcctggccaacatggcaaaacccttctctactaaaaacacaaaaattagctgggcatgatggcatgcgcctataatcccagctactcaggaggctgaggcaggagaatcacttgaacccgggaggcagaggctgcagtgagctgaaatcgcgccactgcactccagcctgggtaacagagtgagactccctctcaaaataaagaaataaaaataaaaaataaattgtgttatttcctttatgatattcagtgccatccatgctaatcttaataacttatcaactcctttaaaaatattaaaagcaaggttatttgggtagcctttaacctttaatataaggttatattttataggactatcaacataagagaggataaatttccttcaaactaaatttaatggtatgttgtgcttttcacatttgaacaataatattttgtataggtggtcattttcttcaaaaatgttcctcatttctatcccttcgtttctaatcctcatctgttctgattcaaaatgtatcagcttttatttttctctgtttaatagcattattatgtagctatacttactgtgctcctactatgtgccaatatctttgcatatgtaatcttaatcyctgggatgacttgacaaaattgcaagtattagctccattttacgaatacaaaaatgtctcaagtcagtttgcccaagatcaaacagctggtaaagtgacagagtcggcatttaatctaggactgtctaacctatgcccatgttctttctaacaaatcacatcgtcgctggagttcagtattaattgaaattgcttttaaagatataatattttatagggctatatctgcccaataattagcagctttaaaccagtcatacctgtcaccaaacagtacaaacgaaaccacaataaaaaatgatcttttgagctccctcttataatccctatatatcccaaaagtcatatccattatgttaattgtaataatagtttattgtaatcaatgtgcaatatatgaatcaatttatcccatcagattacacagtctgtgtgagcactgtaagaatgttagtaacagatacggtatgcacaaacataggagctcatgtgtacttttaaaacctcatccttgaggatatattaataatagaaataaatcagcattctttatgactcaagtagtataaatcaataggtagagtaggatgtgaaatgaaatgtaggttgttactacattttttacatctaaaattgaggtctttctactgtaaattatttatagagtttgggaatgttgaatatataccacaaatgtaatttgctaaattgttaggaagtactgataactatacaccacacacactaaaaatccttatttgactctgttgagtgaagggagatttcactttaaaggcagtgaggaagacatggaagaattgtttttgaggaaaatattatttgagtttgccataatgtagagcaatgctctctgataaagccctccttctatggtgatggaaatgttctatatctgcactgtctaatgtggaagccgctaactacatgtggctgttgaacaattgaaatgtggctagtgtactgaggaactgaatttttatttaattcattttaattcaataaatttaaacttaatgtggctgtggctaccacattggacaatgcagctctagagattttatgtctgagtgattaggataacatgccaacagtacagtgaacactttaaaaggtagatatttacagaatctctcatagaccttttttcttcttttcttttttcctatttgaacttgttttgttagttggtaagtataacatttgaatttacaaagcattgtcattgtgaaccatcaccctaatgcattgcatgcccaattatatttcataataaaaaccttgattcctctctctctgctcctcagttaacacctagaaaattctgcactgtgtctctcatatctgttatctatcttctcttttgctttctcacttctgcttgctactccatttcttcattcacaacaaagaaagaaatgcagtgatagttctcttcctcccaaaacctccgctagaaaacattggccatctcaaggtaaacagcaatgggagggcctctcgtgatggccgggaatgatatgcattaccagaaaagcatgagctactactgctcttcactttccttctgccatccatctgcagtgcttccctaaagggggtcatggattcatattctcccataaattttccagtatgggtctgctatgaaccaattcagatcttcaggaagagtaaaggtgaacagaaatatgtttccttctccttgtattttgaaggccagtcttatttcaattagaaaataatgctggaaaagttactttgagaagaagggcaattgacctggattatgagtgacagaatatttttccttggaaacatatattttttcttaagtataactctaacatttggtcttaaaaactttttgaaggccgggtgcggtggctcacgcctgcaatcccagcactttgggaggcccaggagggtggatcatgagatcaggagattgagaccatcctggccaacatggtgaaactccatctctactaaaatacaaaaaaattagccgggcgtggtggtgcgcacctgtggtcccagctactcaagaggctgaggcaggggaatcgcttgaacccgggcagtggagattgcagtgagccaagatcgtgccactgcactccagcctggcgacagagtgagactccgtctcaaaaaaaaaaaaaaaaaaaaaaaattgaagtgttctgcaaagacatattcttaattgcttaagacatctcaataggatcttcaccccttactgaactttttgtttttgtttataaacattcagtaacttcagtttaagcacaaaacatttcatagatatgaaagtgctagcataattatttcctagtttgaagtatcaatgaggtgctacattggctaacaaatatgctgaaagtctccctgtaaagtaaggacatgtatgtgtacagttaaacctgcaacctgtgtggtgtttttgtttgtaaaacacataaagaaaattttcatgtacttaagacccagaaaatctggattaaaatgccttaaaatatccagaatctcttgctgttattgttttcagatttttttttctgaaggacttttatttttaatgtgattttaattaattactcattttgtttaggaaatatttgaaagcctacagtgtgcaaggttctgtagtattgctgcatattagagaatgataatttatagaaataaagcacagagatgaaaaactactttataaatgacacaaagaactttcctatttgattttgttttacttctaaaattgtatatctactaattctactggttacctgcttgcttatgattgaataagatacctgcaaaagtttaagttaatgaaaacaaaagcattgtttatgtcttttaaattaagacattttgggggagtcagtttgcctttttttaactgacattcagaggagaattcttgtcctccyctcatccacaaatttatcttgctccttcttaaagccgtctttaaatacctagcatgtatatgatctcatagtgctgagttcctttttttgttttgttttgtttataagggcatctagtgaaactgacttcctttttgaaacccgtggttccaaaactgtttggaactgtttggtgctgtttttcaagtttgagtagtgaaggctcttttcttggttgtaccctgaatcctagagataggaattggtccttctcacctgcttcttgaccccttccctgcatgctgatggtgctttggatccctgttctttctggctcaaagattttgcttcccactgctttttccagggttctagccctgggaatgatgattggcgctttcttgctaatataatgacatgagccaccagattgctgggttttaaatacattagtaggctattgtaacaagcaagtttggggcttgctttttccctcgaaagatcttattaagggatgggatccttgctgcagattagtagcagaaagattatttctcaggggatgagaggctggataactgtagtaatgctcttgctgtttcctacaggctcctacccagagattctacccagtgaaactcccacagcaacgcaggtagatggggctgacctggcctctccaatgtctcctcgaactagcaaaagccgcatgtccatgaagctgcgtcgttcctctggctcagccaataaatcctaaggagacaagcagcccagcagtgatcagcagtagccaccttagcaygaacatagggttaaccctttcaggccttcatgtctgccataacatgcatgtttcttcctgtacatttatttgagaaaacactggatttaaataattttaaataatttgtagcttaatattaaagatttaagttatttattgtttcattttttttcccacaatccaagctgccatattttgagggcagggggagttttattctacaccctttaccttcctagataattatgtctaagtagttttatctttaatttcatggttaactgtgagccaaaatacaattggacaattagtctcattatttattgtgcyccattgcaactttatggttcaataaatatataattttttacaaatgtaaaattttacatttaagcatttgtaaagttacagcaaaagatgtacctgttaatacacagaatgtgtacagattatttgttatgacaataaaacactcaaaataaatggtctttagcatctcaaattccaactgaaatcattttagtattaactcttcttcccaaagcaatgtctcatttcttggctgtgcaggtgatgccatgttatatccaataactagaaaaatcactgtgctgaacttttatgtttagcttccaagtatttttctaatgttttgcatttcaagtggtatcactgttaaatgccatttgttttcagattgtggccttttattattggctgctagatcctggtgtttctatgttcttttttaagcaccaaaaagaagatggggaagaaaagaaggaaaattttctgatataaatatgttgttcaaattatgagtaytatttaaaaaagaaaaaggaacataacccaggagtctaagttaaatctaatattgttaatactgaacttgcaggtccaggttggtatacattccaccctctagaagtattttcttacagtagataagctgctcacattttgttttgaatgggcatctcctgaggaaatgtagcatgacattggtactaactgcatgtgtaaatacatcatactggcaaaccgtaaaatataaattatgtatcatcattcatgtagtatctataatttgtaacagtgggggggaaagatgacatggtatttaataatacaataaaaatattcttatcacttcctatccatgagtgttgatttgtcttctatgtttcatatattttcaataagcagggctatatgagtagtgaggagatttaaagcatgaacctagattatcttagctaatcatcaaaaataaacttgaattcccttttcaagatacattccaacttatttctcacagatcctaccacagtcgttaaaaacacaggaaattttctgtcttcataaaggctggccagaaattcacccaatgcagttggttagattgttagtttatctcagcttcatgtttttgttttgttttgttttgctttttgagacggagtctccctgtcacccaggctggcgcgatctcggctcactgcaacctccgcctcccaggttcaagcagttctcctacctcagcctcctgagtagctggaactataggcgtgtgccaccacgcccggctaatttttttgttttgttttgttttttgttttttgttttttagtagaaacggggtttcaccgtgttagccaggatggtctccatctcctgacctcgtgatccgcccacctcggcctcccaaagtgctgggattacagcttcatgtttttttgattcttaaattttactttgttttataatatactttcagcaataaaacttcgtactaacaagtttctaagacaatctttcagaaattctgtgcacccaatttcattttcttataaatgaaaactaaaagtcctatgtaagctgatgtagaagataaacaaatggatagagtccttgggaagaagattgaacaatgtagacaatttcctacagccaaggtgaagaattacaaaaaggaaaatcagagtaactgcatacatgtttctaaagtgctataaaaaatctaatggattgatgatatataacaatatggagtaaaaatacaaacctgaaataatgaaattaattagcaccattaaaatacttcttttcatcttcaggtaacactgttcactagcttgaaatatatatatatatatatttaaaatatgttttcggttgacatttcttgggggggatgtcttttttagattcaaagactagtgcatattccttgctttttgcagctcagtctttgcagccatacttcaaaggaaaatttttcattgcattcctgcaccatcacattcatttgcaaaatatttccgtctttgtattctgtccaaatgggtcactaacattctaaaacaggataccgacattggggagataagaaatgtggctttgaaaataggctgtgttcaacaggattcttaagacaaacacagaacacaacaaaagcacagtctatgtacatttatttggtggtaagcatcttacaaatacgggctttctgtcaggcagtgctcagccaatgtcccaaactggctagtagggaattagtacacaatgtacactgaaatggttttttaaaaaaatcaaaaacaagttgccgctgaaaagaaaatactgaatattgagcaaattgccattcagttccttagtggattacaggtgttaacatcttccttaagctgtacatattttcataatgaatacacagtatgacatttacagcagaagcattaaacaatttgggtgaaaccccattaaaacagtcaaacttgaggaaacgacttctgtatttccaaaaagccatttaaagaaaggtttgaagtagctcttcctgaatactgcccacaaaatagctgagggtgagaattttagggggtgtctcaactccagtaaagtagcatcctccccacctccaaacaccaacttaagaatggacatgtacatataattgggcaaaggaaagtttacaggggagatccccatgcaccccaaaagcagcaaaaatcctcttacattttctgccaggtcttgaatctccttaagtttgacaccaatcacataacttttaattcacagaatatacagtgcaaaatatctgaccctattgagacagaagctgtataggcgcctgtgatgacaagacaaaaaaaacattggctaccaaagggtagccagaatcctttgtggacattgagacatgcacgcattcaccgcgactttccataggaattacaaatcatataggattcgttagggtctccagagttttaaggggaaaaatcctattttagtggggaaagtgagaaggatttaaagctgacagtctttgatctcaaggtttataccatatacatacctgctctagagagggatattacatttcactgtccgctcctctggtggaacattgactacagggagaattttaggggattaaaacataggaaggaatgaaagtaaacttgcaagttgaagaaagccccacagaaattcccatgatctgtttcctctaaggccaacctcgaaatcatcctggtctctcgtccctcagcagccaggccgcagtggcatctgcagcagcagcacttgccggctttctgaggggtggcacttattgatgtgccgggtcagccctggagagctaaaaaaagtggacgggcagtgcttgcacgagaaaatttgctgggcactcccgtcagatggcccgctagggcccgacgtttcgggaggagcccccgccagagcgggcaggagcagctcctcgcggacagcatgccacagccggtgcttctccctgatatctgctgtagggaagtgcgctccgcacaatgggcaagcgaaggcaagtggggcaccgcgttcggagccaaagcccggcgctagcgcacgggccgagcccgcctcgtgagtgctcaggtgcttgcgcagataggcttggcgacgaaactttttgtggcaatatgggcacacgaaaatctcggatcccctgccaccactggtactgcccggcacaggtacccggcgccccaacaccccctccgtgtaggggccctgaggcagcggtggctctggatgcgtcagcacctggaggccctgcctcggggcgctgtccgggtgctgatccgccccggagctgtccctggcctgcgggtgctgatccgcagtccgctctattcggctgttctcctttccctccgccagaaaagatgcaatggccccggagtcccgggaggacgaagacgacgaagaaggcggcttcccgtcggcggaggagactgtggcggcgtttgcagccgcaggacgcggcttatgccagcggcgatgggaggccaggttcgcaggacagctgaacaccttgtcgcactcagggcagcggtactctacgcgcacgatgcgggagcagcggtgctgggccagcgcgaaggggtctgcgtactgctccttgcacagctggcagatgaactcccccagtggcgtgcggctgccccccaagccccgggacggcgctccgggctcctcctccttgatcttcaggcccaggacaggggatgtggtcacctcatcggcaaagctcaacttcctcatggcctttggcttcttgattcccgcggccgcgggtccagacgcgcagcccgtgggtgccttgccgcggcgctcgccgccggccgcccgcttcagactctgaagggcggccgagaggggcgcagggtccggctgaagcgcgggctctgggaacggcgcccgaagcggcagcagaaactgctcccccggggtcggtgcggctgctggcgccacggagcaggagaaagcggccacggcggcggcgcccccggggaaagactcggcggagacgggcgagctgaggcagcgctccaggaacgcccgacgcagctctgcgcctgccggcttcgctggactggggctggggctggggctgggcccgggaccttccctgccacccgcccgccactccgcgccttcccgcccgcccgtccccgggctcaccccagccgcccgacatggcgaccccgactgttcccgggccgcctccgccgtcaacccctttcctggttcctctcgggtggggggtgtcgcccgctccgcgccgggcaaggaggcgctgggagcctcctccaagaagggcggcgccccctggggccccagcagagggaagacacgctccgcaaggcgaactcggtacaagccgcctgtccgtttagttcgcttcaccaggaatccccttggcatggtggagtcgagagcgctctgggacaagaggaaagggggcgccacggggactgagagccggccagcagatgaactagaagagcttcgccgcggctgtcatgccggggctatctttatagctgagacgcgggccggggtcccgccgggcctccccgggctggcccggccaatcaggagtgggagcgggcgccgggggcggggctttctcccgtgccgattcactggagtagacgaatctggcggcggcggcggcgcacgcccagccccgcctcacagcgccgcgaacctgcccctgtggccggctgggtccgcctccccctgcagcctcccgggcgaagacgccagaaggtaaggtccagagtgtgagggagctcgacactccccgccttggctgcctccgcggagcgtcccactggggagccgggcgaaaaggccacctcacgacgccctccgctcgggccgggacccggctgcccccaacgcgagggcgtctggctgaaaagctcccgctctgcgccggacggccgagcggaaggggcggtgggcagaaggtgcggcggagaccacggggtgggtgtccgggagggaaccggtgcacgtcctctgcgggtattgagctgatgagaagtgcgaccgagcggccggacagctgactgcaccgccctgtggctgctgtcggcggcgggagcacgtccgcccgccggtatcgatcgggcccgcgcgcggcggcgacactcgagagttcatctccgcagaagggctctcagcgcgggagagcgtgcctgcccgccgccagcctccgagtcgggacgcccgagcgcggctgggtcctgggcgtctgcgctcttaagtgcttctcgataggagcaggagtagggagaggaaaggaggatctcattttccactgtcctcgcataaagtggtttctctgttcacactttccacttgtactacccagagtatgacttaattcctaaccggcctgtttagcatggagtagattgagtgagaaatgccggcggaatcagcattacagctgcttccccgtacaccacaagtgatactttgcaaaaggtgtgctgtagagcaaactcaacagattttcatctggcaccctgcaatgctcccaccactattttgagaactagaagaggtttgaaagtgtttagtagtaattgaactaggcaacaattagaccatctatgacagatataaagtgccaagatccataatataggtaaataaagtgtgagaacaggaaggggaaagactatgtgcacaagtctccttactaaaccaaattggagaaaaagactgacagaggtgttttaaaagtacacgatagcataacagatgtagtcatcaataaaacacattgtctttcttcagtgaagtatttttacagggagaacattattttgagaaagatttggaagtaattatatattaatcattgactatgttataggcattctgcttaagtaatctctaatcttcatacacacgcacacaacatgtacacacacaaaccaaaaaggagatattatttctctcttttttcaatgtggtgattgagccatttagttagataatgggtaaaagccaagcagagctcagattcaaacttgttctggctaattccaaagcccagactctttccactacaccaatggcttcaaactatttttttccttaatcacatcccacaataataaatgtgttctatagtatatacacacatgtaactgaaacaaaagtctcacaaaataatactgtgggtcctaatctatttgtaaattatgaaatcatacattgaaatgtttgcagtgcattctcatatttttcattctattgtattttgtttcttaaaaatagcagtcatagaaaatacattgatttcat

SEQ ID NO: 97338 - DNA, 15645 bp, Homo sapiens
cccaccctgaggcttgtttctccatctgtacaatggaaatgatgaagatgcccacctgatagggtttttgtggcaaataagtaagtagtttttttgtttttctttttctttttttttttttttttttgagatggagtctcactctgtcaccaggctggagcgcagtggcgtgatctcggctcactgccaactccacctcccgggttcaagcgattctcctgcctcagcctctgagtagctaggactacaggcgcccgccaccacacccagctaatttttgcatttttagtagagatggggtttcaccatgttggccaggatggtctcaatctcttgaccttgtgatccacctgcctcggcctcccaaagtgctgggattacaggcatgagccaccacgcccagctcccccacctttttttttttttgagatggaaagctctgtcacccaggctagagtgcattgagccatcttggctctctgcaacttctgcctcccgggttcaagcaattctcctgcctcaggctcccaagtagctgggattacaggcgcccacaaccatgcctggctaatttttgtatttttagtggagacagagtttcactatattggccaggctgatctcgaactcctgacctcaagtgatctgcctgtgtcagcctcccaaagtgctgtgattacaggcatgagccaccatgccccaccgcaattaagtaaagtaatcatctaaaagccctgccatggttcctgccacacagtgtgtgctggggaagcgcgcacgaattaaacagtagctggcgttgacggggcacctatgcggcattttctgtgcacgatctttactctccctggcaaccctatgaggtagatagtccatgactcccattcatggatgaagaaacaggcccacacaggtaaagcaacttgtaccaggtcataccgctagaaagatgtagagtcagccacgcgcggtggctcatgcctataatcccagcactttcggaggctgaggcgggatgatcacttgaggtcaggggttcgtaaccagcctggccaacatggtgaaaccccgtctctactaaaaatacaaaaattagctgggcgtggtggcggacgcctgtaatcccagctactcaggaggctgaggcagaagaattgcttgaacccgggagacagaggttgcagtgagctgagatcacgtcactgcactccagcctgggtgactgagcaagactccatctcaaaaagaaaaaaaaacaggccaggagcagtggcttacacctgtaatcccagcactttgggaggccaaggcgtgtggattgcctgaggtcaggagttcaagaccagcctggccaacgtggtgaaaccctgtctatactaaaaatgcaaaaattagctgggtgtggtggcaggcgcctgtagtcccagctactcgggaggctcaggtaggagaattgcttgaacccaggagatggaggttgcagtgagccgagatcgcgccactgcactccaacatgggcaatagagcaagactccatctcaaaaaacaaagaagggagggagggaaggaaagaaaggaaaagaagcaacaggtagagtcaggctctgaaccccacaccaatcataacacaacacacagtaggtttgtttttgttttttattttgggcttttgtttgttgtggagacagcgtcacccaggctgtaatgcaatggtacaatcatagctcactgtagccctgaactcctagactcaaacaatcctcccacctcggcctcctgagtagctgggactacaggggcatgccaccacgcctagctaaattttttttttttatttttagtagagatgaggtctccctatgttgcccagattagtgtcttaactcctgggctcaggtgatcctgccaccagggattacaggcacgagccaccatgctggcccttgttttttgttgttttttttttttttttttgagacggagtctcgctttgtcgcccaggctggagtgcagtggcgggatctcggctcactgcaagctccgcctcccgggttcacgccattctcctgcctcagcctcccaagtagctgggactacaggcgcccgccactatgaccggctaatttttttgtatttttagtagagacggggtttcaccgttttagccgggatggtctcgatctcctgacctcgtgatccgcccgcctcggcctcccaaagtgctgggattacaggcgtgagccaccgcgcccggcctgtttttttttttttttttgagactgagtctcgcactgtcgcccaggctggagtgcagtggcgcgatctcggctcactgcaacctccaccttccaggttcaagcaattctcctgcctcagcctcctgagtagctgagattacaggtgcccaccacgatgcccagctaactttttttttttttttggtatttttagtagagacgggggtttcaccatgttggtcaggctggtctcgaactcctgacctcgtgatccgcccgccttggcctcccaaagtgatgggattacaggcgtgagccaccgtgcccagctttttttttttttttttaagagacggggtcttactatgttgcccaggctggactctcaaactcctgggctcaaggaatccttctaccacagctttctgagtagctggggctacaagcccctgccacagtacctggctgtttttgtttttttataattgtggtaaaatataaacaacatggccgggtgtggtggctcacgcctgtaatctcaacactctgggaggttgaggtgggaggattacttgaacccaggagttcaagaccagtctgggcaacttggcaaaactgtgtttctacaaaaaataaaaatattagctgggcagccaggcgcagtggctcatgcctgcaatcccagcactttgggaggctgaggtggatggatcacctgagaggtcaggagtttgagaccaccctggccaacatggtgaaaacctgtctctttaaaaatacaaaaaaatgagccagccatggtggctcacgcctgtaatcccagcactttgagaggccaaggcaggtggatcacctgaggtcaggagttcaagaccaacctggccaacattgtgaaaccccgtctctactaaaaatacaaaaaattagctgggcatggtggcaggcgcttataattccagctactaaggaggctgaggccggagaatcgcttgaacccgggaggcggaggttgcagtgagtcaagatcgcaccattgcactccagcctgggcaacaagagcgaaactatgtctcaaatacatacatacatacaaaaaattagccgggtgtggttgccgcacacctgtaatcccagctacgcgggaggctgaagcaggagaatcgctggaacccgggaggcagaggttgcagtgagccaagatcacaccattgcactctatcctgggtgacggagtgagactctgcctcaaaaaaaaaaaaaaaaaaaaaaaaacttaaccattgcagccatttttaggtgtacagttcagtggcattaagtacattcacactgttgtgcaaccatccccactatttgcaggatgtcttcgtcatcccaaacagaaactctgggtgttttcaatctgctgatgattgctacagaggaattccaggggacatctgttgcgcacctactgtgctcacgctggggcctctgggatggacaggattctgccaaggcagacatctgggtcaagacagtcctgcacagttgttcaggttgtggccaaggttgcgtttgcagatttgccatgtaaaaatacaggatgctcagttacatttgaatttcagattaatagcaaaaaaaactttttggtataattctgaaatatttcatgggacatatttatactaaaacgtcatgcactgttgatttgaaattcaaatgtaattgggcctcctctatttcgtctggcaagcgtagacaaaagaatccagtccaggccaggcgcagtggctcaagcctgtaatcccagcactttgggaggccgaggcgggcggatcacgaggtcaggagatcgagaccatcctggctaacacggtgaaaccccgtctctactaaaaatacaaaaaattagctgggcgtggtggcgggtgcctgtagtcccagctactcgggaggctgaggcaggagaatggcgtgaacctgggaggcggagcttgcagtgagccgagatcgcgccacagcactccagcctgggcgacagagccagactctgtctcaaaaaaaaaaaaaagaatccagtccatagtcccctgagccatgtgccctggggtgcagctgggtccttcaggagaaaaatgctctatttctggcactgggaccgagcctgatgtgggttttttgttggtttttgttgttgttattgtttttgagacaaggtctcgctccaccacacccggctaatttttgtatttttagtagagacggggtttcactacgttggccaggctggtcttgaactcctgacctcaagtgagccgcctgcctcggcctcccaaagtgctgggattacaggtgggagccaccgccctggccctgggcctgatgttgatgacctcctactatgtgcacctgcagctctcctgcataggcctcagccgtcctgcatgaggacactgggaggcaggtgctccctatcaaccccgtgttacagttgaacaaactgagccccagaaaagaaaacgtatttgcccaggtcacacggtgaagaagtgagggattcgaagcccaggtccatctgaagccagagtcacccagaggagaaagagttggaattgagaactcaaggaatgcttggaagtgatcgggctcgagcccacctaggaagaaacagaggctggagacatgagactgtgttgctatttcctctcatcaacccttgggccctattgaggccctaccacaagcctggccctgcagcccagtgactaggagaaattagacacaagataataataacagcaatgatcttttttttttttctgagacggagtcttgctctttcgcccaggctggactgcagtggcgcgatctcggctcaatgcaagctccacctcccaggttcacgccattctcctgcctcagcctcccgagtagctaggactacaggcgcctgccaccacgcctggctaatttttcatatttttagtagagatggggtttcaccgtgttagccaagatggtctcaatctcctgacctcgtgatccgcctgcctcggcctcccaaagtgttggggttacaggcatgagccaccgcgcctggccaacagcaatgatctttgagcacctatattgccagtctccacggtaagagctttcttcattttttgttttgttttgtttcaagacagagtcttgctctgtcacccaggctggagtgcagtggtgtgatcgcggctcactgcagccttcacttcccgggttcaagccattctcctgcctcagcctcccaagtagctgggattacaggcacgcatcactacttctggctaatttttgtatttttagtagggacagggtttttcaccatgttggccaggttggtctcaaactcctggcctcatatgatctgcccacctcggcctcccaaagtgctgggattacaggcgtgagccactgcgcctttctttgtatttgttcaagtaatatactgaaatatgtactgtgcctcccactttatggaggaggaaactgaggccagcaaatgaggctgtcatgggaggtggagacaggatttgaacctgcctcagtgcaggaggctcaagagcctctgtcttctctcagggcactgtgtgggagggtgagaaggagggaggcccacagaggcatgacctctgattgccactgtcacctgggccctgctctctgaagtctctgccaagcggggaggtggccgggggagggccctgctctgtgcagcctcccctcccccggcccgcagagttgagcacagagggacagargcacggaacccccagaaatgtccctcctcagaaacaggctccaggccctgcctgccctgtgcctctgcgtgctggtcctggcctgcattgggggtgagaagaagtgggtggagggatgtggggcccacacctggtgggtgtgagtgtggctgtgtgtcctgtggctctgtagccacgtgagacatgagtacggagtgtgtgcgtttcatggcrtgcgtatgcatgtgcgtgtcggggagtgtgtgtgtcggtggctgagagtgaagtgkgaatgtcacattggtacaaactgggatcatctgtgtgtgtgcacgtgcgtgcgtggaagtgggagtatgcagtcgtggtaaaaaagtgcatgtctgtgtgcatatgtgtatttgtgtgcacctgtctctctgtggggtatgtgtgtgcaaaatatttgagtgtgtggacatgtgtgagggggtgagtgtgtgctggtgtgtacgtctgtgttttgcatatgcatttttttttttttttttgagacggagtctcactctgtcacccaggctggagtgcagtggtagcagtggtgcgatcttggctcactgcatcatccgcctacccgtttcaagggattctcctgcctcagtcttcagagtatttgggactacagacacacgccaccatgcctggctaattttttttttttgagacggagtctcgctctgttacccaggctggagtgcagtggcgtgatcttggctcactgcaagctccgcctcccgggttcacgccattctcctgcctcagcctcccgagtagctgggactacaggagcccaccaccacgcctggctaattttttgtatttttactagagacggggtttcgccgtgttagccaggatggtctccatatcctgacctcgtgatccgcctgcctcggccttccaaagtgctaggattataggcgtgagccactgcgcctggccaatgcctggctaatttttttatatttttggtagagacagggttttgccatgttgcccaggctggtcttgaaatcctgacctcaggtgatccgcccgccttggcctcccaaagtgctgggattacaggcatgagccaccrcgcccggccatgtactttatgttaaaatgggatcatattctagatcagcattatccagtagaaatttaaatttttaatacagggccaggcacrgtggctcatgcctgtaatcccagcactttcggaggccgargcgggtggatcgcaaggtcaggagatttgagatcatcctggctaacagatgggtaaaaacccatctctactaaaaatacaaaaaattagccatgcatggtggcatgcgcctgtagtcccagctactcgggaggctgaggccggagaatcacttgaacccgggaggcagaggttgcagtgagccgagatcgcgccactgcattccaacctgggtgacagagcgagactccgtctgaaaaaaaaaaaaaatttaacacgtatgtagacaatgtgcaaggcaccattccatgtgcatcgtatgtagtaactcttaattctcacgataaccctgaggtasatattattaccycgttctacaaaaggagaaacagtcctggggagacaggataagtcaccrgccaaggcacacagcyagctacatgtggccccygcgtgacggctggtctctgtaggcgaggctttgtccagatgcgtgggtagaaggtctggcccggaaagaggaactgacagcaaggctaagccaatgtctgcccctgggggcagaaagtcacctcctgctctccctccactgtccacagaggtagctcagacagggtgggggtcacaggagaacgaagggagaagggggtagttcctgggcagcaaaatcaggtggtgaagggaggcatcagaggatggcaattagagaggccattagaggggaaccacaggcagacagggtgacaggagggactactgacacaaggtgaagagatggcccrgccggacggggtggctcacatctgtaatccyagcattttgggagcccgaggtgggtggatcacttgaggycaggagttcgaggccccaacatggcaaaaccccatctcttctaaaaatacaaaaattagccgggcatgatggcagatgcctgtaatccctgctactcgggaggctgaggcaggaaaattgcctgaatccaggaggtggaggttgcaatgagacgagatcatgacactgcactccaccctgggcaacagagcaagagactgactctgtctcataaaaaaaaagaaaaaagaaaaaaaaaaagagatggctgatggttaaagaggggttagcggtcaggggacacataagggtaaaggcaggaggcaagaggactggcagggggctgcccctgggccaccgggagcgacacaggatgagcatggagggaaagggagaaggggattctagggtcccagcctacccaagttgccctctggttccacctagcatgccagccagaggcccaggaaggaacccygagccccccaccaaagctaaagatgagtcgctgragcctggtgaggggcaggatgaaggagctgctggagacagtggtgaacaggaccagagacgggtggcaatggttctggtgagggtgtgctgggctgggtggtgggaggggactcctgggtctgagggaggaggggctggggcctggacccctgagtctcagggaggaggaaagggtgggagtggggctgtgacccctaggtctgggaggagtggagggttagagctgagagcaggaactcctaggtcacagagaggagcrgataaatggggcagagaacacctggggagagctggggcctccactgtgatstcctctctcctgtaggagcccgagcaccttccggggcttcatgcagacctactatgacgaccacctgagggacctgggtccgckcaccaaggcctggttcctcgaatccaaagacagcctcttgaagaagacccacagcctgtgccccaggcttgtctgtggggacaaggaccwgggttaaaatgttcataaaagccaggtgtggttgtggcgggtgcctgtagtcccagctactcaggaggctgaggtaggatgatggcttgagcccaggagttcgagaccagcctgggcaacacagcgagatctcttgggggtaaaacaaaaagaaaaaaaaaagttcatacttctccaataaataaagtctcacctgtgtccctgtctggatccttccccagtgtggccagaaaaaaacccaccccactgcctcccaggaatcaatgagtagaagaggtgacacctgatggggaaggaagagtagggaggtcgggaagggtatcaaggaataacaccctattgtgggcttgcggagaatgggggacttcaaggcgtgtcagtttcaggagggtgagggcaggagcgtgggtggagtcagcaggtccccatgatggccctcactgagagcttcgcccttgtctcctacaagctctgactccattcccagtgggcacccagcacctccaacccctccacagcccccaacccagcctctgtcggaggcgaattctcagagtgagggttccctgtcacttgagagaaggttccctgtgacgtgaccttgggggacgtcattgccctttctgtccccacccaccccctccgcagttctgttggccaggactttggcctagacaaaggatgggggttgtggctgtggagcggaagtgggtctcaaccactataaagcctctctgtgcccgtccggagctggtgaggacagcctgccagagtctggtaagaaagggactcagggtgcggggacaggggggcgtcagcagggagagggcaaagatcgataaagcaggaattttaagaggcacaatattagaagcccgtgttggaaccatgactgtgtgtgtgtgtgtgtgtgtgtgtgtgtgtgtgtgagagagagagagagggagatggagtctcgctatgtagcccaggctagactcaaactcctgggctcaagcaatcctcctgcctcagcctccccagtagctgggactacaggtgcaccaccacactccacaaatcacagaatttagaactgtagactatttgagcttctgcttagagttagggtggctgaggtggggaggatcccttgagcccaggagtttgaggatgcagtgagctgtgatcttgccaccgtgttccagcctgggtgacagagaaaccccatttctaaaaaagagaaagaaaaagggataggtacaatggctcatgcctgtaatcccagcactctgggaggccgaggcgggtggatcacttgaggtcaggagttcgacaccagccttaccagcatggtgaaaccgcatctatactaaaaatacaaaaattggccgggtgtggtagcatatgcctgtaatcccagctattccagaggctgagacaggagaattgcttgaacccaggaagcggaggttgcagtgagcccagatcgtgccactgtactctagcctgggtgacagagcaagactcagtcttggcggaaaaaaagaatgaaaaaatttaaaaaactaaaaaagaactgtaggctgggcgtggtggcttacacttgtaatccaaacgctttgggaggccaaggcaaacggatcacttgatgtcaggagttggagaccagcctggccaacatggtgaaaccccgtctctactaaaaatacaaaaattagacaggcatggtggtgcatgcttgtatttccagttactcaggaggctgaggcaggagaatcgctcgaacccggaagacagaggttgcggtgagccaaaattgcgccatcgcactccagcctgggcgagagaacaagaccttgtcttggaaaaaaaaaaagaattgtagaccatttgcttgtgttctttctccggggatcagatctcaccctctttctgccgtacttcctcatctcctacgtgtggatgatgatattgtgccctgtgcatgttcttcgtcaccaaaagtgcctctctcatagagcaggtgagaactcagtgaggagatgcagggacatgaggtctgacttagggcagagccctaaggtaacacatttgatctactgtaggtccttaatggtgtctgcagagcacctccctgcactgactcagccttagcaaagggcagaggctttgctgtgttccctgctgggcccagaactgtttaggtgctcaagaaagccttctaggctgggctcagtggctcacacctgtactcccagcaccctggggaggccgagatgggaggatcgcttgagcccaggagttccagaccagcctgggcaacaaaacaagtctcccatctctacaaaagaataaaaattagcagctgggcatggtggctcacgcctgtaattccagcactttgggaggccaaggcaggcaaatcacttgaggttaggagttcaagaccagcctggccaacatggtgaaaccccatctctactaaaaatacaaaaatcaggtggggcacagtggctcaagcctgtaatcctagcactttgggaggccaaggtgggcggatcacgaggtcagaagttcgagaccagcctggccagcatggtgaaaccccatctctactaaaaatacaaaatattagccgggcatggtggcaggtgcttgtgattccagctccttgggaggctgaggcagaagaattgctagaaccctggaggcagaggttgcagtgagccgagaacacgccactgcactccagcctgggtgacagagcgagactccatctcaaaaaatacgaaaacaaaaatcagccgggtggtggcgggtgcctgtaatcccagctactggggaggctgaggcaggagaattgcttgaacctgggaggtgggggttgcagtgagccaagattgcaccactgcactccagcctgggcaacagagtgagattccatctcaaaaaagaaaaaaataataattaaaatgttaaaatcaggagtagaatcacagaatgttggaaagtgaggcccaagaagggggctgtgtccaagtccatgcatgggaaacttgactgggacaccgagctcacacagagcaggatctcagtcccccccaccagagtggggcgtgaccacaggaacagccgcctccagtcagcctgccacatgacaccccctcaatgttccaggtctctggacactatgggcacacgactcctcccagctctgtttcttgtcctcctggtattgggatttggtgagtgtgggcttccggggagggaagccttggggaggggaatgagctccaagcatcttcccagcccaggcccttcttacctctgcctctgccctctcctcttcttccttcctcctttccccctgctgcagccccacgggctctcctgacacactctccccctgcagaggtccaggggacccaacagccccagcaagatgagatgcctagcccgaccttcctcacccaggtgaaggaatctctctccagttactgggagtcagcaaagacagccgcccagaacctgtacgagaagacatacctgcccgctgtagatgagaaactcaggtagcacctgcccctggagaaatggggtctggcccataccaccgactgcatccaggacccagaagttcaggccccagcccctcctccctcagacccaggagtccaggcctcagcccctcctccctcagacccaggagtccaggcccccagcccgtcctccctcagacccaggagtccaggcccccagcccctcctccctcagacccaggagtccaggcccccagaccctcctccctcagacccaggagtccaggcccccagcccctcctccctctaaccatctgtgctttctccccagggacttgtacagcaaaagcacagcagccatgagcacttacacaggcatttttactgaccaagttctttctgtgctgaagggagaggagtaacagccagaccccccatcagtggacaaggggagagtcccctactcccctgatcccccaggttcagactgagctcccccttcccagtagctcttgcatcctcctcccaactctagcctgaattcttttcaataaaaaatacaattcaagttgcttctcatggatggcactgcttttctgaggactcaagggccaagatggaggggctgactcagtccagccaacatttaatgagcacctactttatgtatggagctctaacccatgggtccatgggaataaagcagtgaatagtaacaataaataatcgtaacagcaattagagactaatctttattgaagtccggctttctctcttttatttttttattttttgagacagggtttcactctgtcacccaggctggacagcagtggtgcaatctcggctcactgcaccctccgcctcccaggttccagcgattctgtgtgcctcagcctctggagtagctgggattatgggcatgtgccactgtgcacggctaatgtttgtatttttagtagggttttgccagttggctaggctggtctcaaacttctgacctcaagtgatccacccgcctcagcctcccaaagtactggggtgacaggcatgagccaccgcgccatgccaaaatccagccttctcatttgtaaaataacaaatcatagacacagctagtccacagtggcctctgacagtctccagttgttaacggtgaatggtgtccaggtttttggcgtcctgaacaaagaactggacaaaacgcacaaacaaagcaaggaaggaatgaagggatttattgaaaacgaacatacactaaacagtgtgggagcgggcccaagcatatgggttcaaaagccctgttacagaatttttgggagtttaaattccccctagaggattccccttccactggttacttctggtacaccctatgtaaatggagaggatgaagaaaagttacaaagtcatttatggcctaccggagaggatgtttcctgttatagctgaagtgaattggccttatgttccctgcctccctattttcctgccttacagttgctggactgacacattttttattttatttattttgttttgagataaggtcttgctctgtcgcccaggctgaagtgcagtggtgagatcttggcttactgtagccttgaccttttgggctcaagagatcctcccatctcagcctcccaagtagttgggactagggatgcccactgccacacctggctaattttttgtatttttagtagagacggggtttcgtcaagttgcctaggctagtctccaattcctgggctcaagcgatctgcccaccttgcccttccaaagtgttgggattacgggtgtgaaccaccgcaccaggcctgggctgacactttaaacgtgccattgcaatcagtgtataatggtcccgtggcagagggagaatggtgcccaagtcagtacttcttggctgggacccaagaagacaaacctctagggccggcgtggtggctcacgcctgtaatcccagcactttggttggctgaggtgggcagatcatctgaggtcaggagttcaagaccagcctggccaacatggtgaaaccttgtctctaataaaaacacaaaaattagctaggggtggcccgcgcctgtaatcccagttacctggaggctgaggcaggagaattgcttgtaccctggaggcggagatagtgccactgcactccagcctgggcagcagagtgagactccgtctctaaaaaaaaaaagaaaaacttattaaaaaaaaattgcaagcaaaaagcacagaaggcagaaggtgcaaataagcagaggctccatggtctgaaggaggccagtgctgggaccatgaatgaagggggctgggggccaagattcctgtatcctgagggagtccagggtggtactgctccccaagtcccatgggtggggctattggtctctggggatccactgcttgtatttctcctaatctgcttggcattaacctcctgccaggctttcaacacccttggggcagttttcccaggtcctgaggctgggcagctgagtccagtaaaaaacaggggccctggagagggactgtgggcaatgcccccgagtccccggggcctgggaagaacagaggctgccaagtgcagggggtggtggggaggggaagaccctggagtaacaatccctgctgtgtccacttggttcccacggactcaagccaagccaaagcactgcccggaccagttcggcttccaaccaatcctggtgctggcctcagactcctcctttctttctcagaaccccattcccctcagggcccccagagtccaggcccctagattcttcttcccctagaactcaggagtctgggaccccccagtcccttctcctcaggacctagaaggttggatccccagccccctttctcccttagaacctgaaatcacagcccttgatcagtattttgcgccccctagtggagagaagagtgggtctgtcctgtgacttacatacagcaggaatggcagaattttttacttattatgatttttaatttctttagagacagggtctcactctgtcacccaggctggagtgcagtaatg

SEQ ID NO: 97339 - DNA, 14432 bp, Homo sapiens
agggggttcctgcaccaccagcatacagggctggagagagggaagtagtcaggtgagagcaaaagaaacccacatacaagctccttcctctgggccaggaacccaagaagcaaggggggagaagaagcctccccagcttgctccttgggtcttgacccaaaactctacctcctgggaagtatccacctcccccaaggaaaagcggctgtgagaacagcagatcttcctacagcaggctaggtctccatgtgcaaccacagcagtgagccttcaccaacaccttgtggtagctctgatgaatacgtaagttaaatattaaagacctggaaaaactggggccttcgagcaagggctagaaggtaaaacaaagtccttaagaccctgcctgggttttctcagaacttaagagttcagttaaaataatggaggcattcttacatacctcgtaaaccttgtaccaggatccactttattttttaaaatttactttcttttctttattattttgagacagagtttcgctcttgttgcccaggctggagtgcagtggcacgatctcggctcactgcaacctccacctcccgggttcaagccattctcctgcctcagcctcccgagttgctgggatttaaggcatgcgccaccatgcccagctaattttgtatttttagtagagatggggtttcaccatgttggtcagactggtttcgaactcctgacctcaggtgatagctgatccgcccacctcggcctcccaaagtggtgggattacaggtgtgagccactgtgcccagccttttttttttttttgagagagtccgactctgtcccccaggctggagtgtagtggtgtgatctcggctcactgcaacctttgcctcctgagttcaagtgattctcctgcctcagcctcccaggtagctgaaactacaggtatgtgccaccacacctggttaatttttgtatttttagtagagacagggttttgccatgttgcccaggctggtcttgaactcctgacttcaggtgatctaccaccttggtctcccagtgttgggattacaggtgtgatgtaatggcacccggccccattttcctcttctctcagcagcacttcccatccctttcccaactcctcgccccacagctcagcaccaagaccctgtgcttggcagatctttgaatcaagcactgagaaattagaacattttgaaaaagcaaacatttccttttccacccccggtgattacaaaagtaacatatgttctgtgtcagaaatctggaaaaacaccacgaagagggaaaatgaggccgggtgtggtcgctcatgcctgtaattccagcactttgggaggatcacttgaggccaggagtttgagaccagccagggcaacatagtgagactgtctctccaaaaattaaaaaaatcagccaggcgtggtggtgcacgcctgaagtcccaggaggtgagtccccttgagtccaggaattggaggctgcagtgagctataattgtgccactgcactccagcctgggtgacagagcaagacactgtctcaaaaaaaaattaaaaaattaaaaaattaaaaaaaaaaaagaagggagaatgagactctcagtaatcctaccatgaagtggtaactacagtcaatgcttgtgtgaccctgcatttctttgttttcaaacagtctcactctgttgcccaggctggagtgcagtggcatatctcagctcactgtgacctctgcctcctgggttcaagcgattctcctgcctcagcctcctgcgtagctaggattacagacgcctgccacatttttgtatttttagtagagatggggtttccccaattggccaggctggtctcgaactcctgacctcaagtgatccacccaccttggcctcccaaagtgttgggattataggtgtgagccaccgtgcctggctgtgacccaggatttctaagagaatgcaaagatgtgctgcttctaaacttccttaggcacctcagccccctcagctcacttttgaccttccaatctgtttcatcccggctagagtctccccaaaagcagaggcaggggaattcccacaaaggaatgccctaaatcatcccaagatggggccagtggggatttcaagaaaacaccaattaccagagcaatcagtccaaagcatttattagggaaacttacagagtgctccaacaatcatcaagacaggaacgaaaaggggtgttctaccgaggcacagctgcagctagggggtcaggacatggagttcagatgcacaagtcagcatgtctggtttccattactattttgagtaatgggccacctgctggtctggcaggtgtcagcttgaccaaaacaggattgtggattctttccctgggatgggacgttccacaaccttggttttatatttagattttcttttttttgtttggtttcttttggagacggagtctcactatgtctcccaggctggagtgtagtggcgtgacctcggctcactgcagcctctgcccccctgggttcaagagaagaattctcctgcctcagcctcccaagtagctgagactacaggcgcaggccaccacgcccggctaattttttgtattttagtagagacggggtttcagcgtgttgcccaggctggtctccaactcctgaactcacacaatccgcctgccttggcctcccaaagtgccaggattacaggtgtgagccaccacacctggcctatatttagattttcaaggccagtttctggaatttttaagcaaagtacacgggataaacattatgagaccttagcacagaaaaacagaagagaggttgggtgtggttgcttacacttgtaatcccagcactttgggaggccgaggcaggcggatcacctgaggtcgggagatcaagaccagcctgaccaacatggagaaaccccgtctctaccaaaaatacaaaattagctaggcatggtggtgcatgcctgtaatcctgggagtttctctcttgttgcccaggctggagtgcaatggcaccatctcgactcaccgcaacctccgcctccctggttcatgcgattctcctgcctcagcctcccaagtggctgggattacaggcatgcgccaccatgccaggctaattttgtatttttacaaaattaaagagatggggtttctccatgttggtcaggcaggtcttgaactcctggccttaggtgatctgcccactttggcctcccaaactgctgggattacaggtttgagccactgcacctggccttggagaattcttaaaccactgtagcagtatagttcaacgatagtaaaagggggttttagtctctggatcctgccattcaaaagcaaataggccggttgcggtgcctcacgcctgtaatcccagcactttgggaggtcgaggtgggcagatcacttgaggtcagcagttcgagaccagcctggacaacatggtgaaatcctgtctctactaaaaatacaaaaattagctgggcgtgatggcatgtgcctgtaatcccagctactaaggaggctgaggcaggagaatcgcttgaacacgggaggttgtggtgagctgagtttgttccactgcactccagcctgggcaacagagcgagactctgcctcaaaaaaaaaaaaaaaaaaaattgagatagcctcactctgtgttgcccaggatggagggatggagtgcagtggcgcgatctcagctcactgcaacctccgcctcccgtgttcaagcgattctcctgcctcagcctccaggtagctgggattacaggtgcctgccaccacacctggctaattttttttttttttttttaatagagacggggtttcaccatgttggccaggctggtctcgaactcctgaccttgtgatctgcccacctcagcctcccaaagcgctgggattacaggtgtgagccactgtgcctagcctcaaaaaaaatttttttttaaaggccagatatctccacaggtagcttactttatgttatggaaagtgccaatttactgagcaccaaatgaatacataatggagtattcttcatgtagattaaataatgtgaccatactctccctctttcccctccagcccacttttccctttaaataatgaagccctcaaaatcatatttggaaaaaagcacggatcacagattgttcctggggttttgtgttccttttctcccaggcttgtccttaaccttgtctacataaacctgtcaatttattgagacctgtctcagatactttttggtttacaaattgtttgactgaattgaggaaggacggtccttgtcccaccagccctcacaaacctggaatctggtacaaagtgctccccaaagatacagctgcaggagattgtgcaaatgtgcaatgtttccagttacctcgcaggcatttaaggttggtgactggcagtgagaaaggagaatagggaaaatgaggcagaagaatagcaaagggaattaaaagttggataaagggtaaaatacgtaaaagcagagagcagaagcaaggtgaaagggcacccgccccttcttgctcacccagcaagaagcaagataaatggcagaagctgaggagacaaaacaaaaggaagattaaaaactgagtaaaggccgggcacagtggctcacacccaacactttgggaggctgaggcaggcggatcacgaggtcaggagatcgagaccatcctggctaacacagtgaaaccccgtctctactaaaaatacaaaaaaattagccgagggtggtggggggcgcctgtagtccctgttactcgggaggcggctgaggcaggacaacggcgtgaacccgggaggcggagcttgccgtgagcccagatcacgccactgcactccagcctgggcgacagagcgagactccataaataaataaataaataaataaataaaattaaaaaaaaaacagtaaaaatcccacggccggggaaatcaggaccaaaccagtaaggagcagctctttaggcataagcacgcgcattaaagacaaaaagtatccttaacatgataaggataaccagctcattagcgctcatgcatatggacggcatatcatgcatgtacttaaaattatggaatggaggcggctctcaagcacacaggggccaaagtaagcaacacacctatcattcaaaaaggtagacactggctagatattaggcagccttgggaagagaaaaaaagcctggccaataaggtgaaaccccatctctactaaaagtacaaaaattagccgggcgtggtggcgggcgcctgtaatcccagctacttactcgggaggctgaggcaggagaatcgcttgaacccggaaggcggaggttgcggtgagccggcaccgcgccattgcactccagcctgtgcaacagagcgagactacgtctcagaaaaaaaaaaaaaaaaagacccaaactataccaagctggggctgatcttatctcgcagaggtcagtccgctctccccactccgagagtggaatactgtgcttaataaacttgcagctttgccatctctgtgtgtctggtccaaatctttcttcaggacaccaagagcctggaactgtccggcaccatgcggtaacagcagctgttgggcagcgtagagtctactctaggatcaagcttcgcctactgactggagtccgtatcccgggggaacgcgatggccagagggaagaggtgagccaaatgctcaccaagcccagccctgaatgaacccagggggtcagaagggatgactgcagaactcgtcccccacccccaccctccgcccttgctcctagttgccgctgcaagaggcttcgggctcaggatcaggagcttacccctactcccgggaccctctggcgtccccaccatgtgaccgagtctccctgcaacaaacaatgacttcaaacgagctgggcgccggcgcctgacctctgactctcgctccacgccccttccctggccacaaacccgccgaggcccccctctctacccggcgcgcctaccacaggcgcgacacctgtcaagccttgggacaccgaaaccgtacctgggaacagcaaacacaccacagactgcagacccggaagaacttgtcccagtgttgaccacaccccctggctaggggcagggcttccggcctcgaacttyaacttccgcttccggttcctagcgttaactgcgaccggggttcagcgctcgggtgaggagctggtggcgtcggcaggttcgaggcgattcgaggtgagggggtcaagcggagaggctcggagtcggagaaagctgtcgcgacccagccacccagggtctggggtcggtgggaggtgaggccagggagttttgtggcagggctttcaggcggcgagaaggggcggaggcgcggctccccggggttcgcggccctgggacaggggacttggggcctgggagtattcgagtccggggggttgggggcagaacggaaggctcagtaacctggaattttagggcctgggactgggagacttgtaggctggggcttctgggcctgggagacgcctgaagctctgactttgctgcctcccacccaccccccgctttgtgtagctccagctaggatgatcgaggttgtttgcaacgaccgtctggggaagaaggtccgcgttaaatgcaagtatccactggcagccgagaggyagtggtacccgcaggggtgcttggcgtgaggcaggcaactcaatctgtgttgtcggatggttttagttaaacccgggagagggggcggatggggtcctggcagatggtattctgccctagaatgtcctcttcctcgttctaccgcttccatttgccttaactgctctgcgcccagcacggatgataccatcggggaccttaagaagctgattgcagcccaaactggtacccgttggaacaagattgtcctgaagaagtggtgagtgcagcggtagagccactgggtggactggactaggccggaaggttttggttgggggagcgctgcaggcagccctttgcttaggcttggctacctcatttggcctacagactgaagagcctccttagccttatctctgaaatgtctctttttcttaggtacacgatttttaaggaccacgtgtctctgggggactgtatcctttgtgtgactttttgaggaagcatctacatacccagcctcggttatctgttcaaaactaaagtctgcatgagcttatgcatattaagtgtttaacttaatacgtggcacatggtgagcacttagaaaatgggagctaggtaattatttggttggggaggagagtggttggtgaaatagtttgacttcaagttcaaaatatttattactgacctccacctgagtgctggacagtaggtcagggtggggtgagactcaggcatatctattgtgcaaaaggagcagaaactttttacaatttttattttatttatttatttttttgagacagtctggctctgtcgcccaggctggagtgcagtggcacgatcttgacccactgcaacctccacctcccgggttcaagcaattctgcctcagcttcccaagtagctgggattacaggtgtgtgccaccactccctgctagtttttgtatttttagtagagatgaggttccaccatgtatgccaggctagtctcaaactcctggcctcaagtgatcctcccgcctcggcctcccaaagtgmtgggattatagccgtgagccactgtgcctggcctagaaggaacagaaacttttttttttttttttgagatggagttttgctcttgttgcccaggctggagtgcagtggtacaatcttggctcactgcagcctctacctcccaggtttaagcgattttcctgtctcagccttccaagtagctgggattacaggtgcccaccaccacacccagctaactttttgtatttttagtagagacagggtttcatcgtgttggccaggctggtctcaaactcctgacgtcaagtgagccacctgcttcgtcctctcaaagtgctgggattacaggtgtgagccactgcacccagccagaaattcttttgtaaagttttggttctctccaaataaaaatggcctggtccaaaatgggcttccttagccctgggctgagacctcaggccacctgacccggctgtgaatggatgagaggggtggggacrgaagtcagagtcaggattccttaacacctttccttcagatgaaatccacgatgggatgaacctggagctttattatcaatagatgagaatcctcatcttcctgccccgctttcctctcccatcctcatcccccacactgggatagatgcttgtttgtaaaaactcaccttaataaagacttagatgttgctttgttgttgtctctgtatgacagctgtctagtgatgggtggatcagtcgctgtttggtcatcactgcaccatcagcatgcagctgctaaaataagagctctgatcaactggatccatgagggcagagtagaccagcaggctgggagtctgtgtgggagcccagagagagctctggggtttgctgtgggtgtctgaaggtcaagagactctgggattattgtcaccctaataaaccaaagaacctccggctaatgacagtagatgtaattgttaggaattcagattctgaaatcacacagaccatgtgtggaatgtcagctctgccaccaagcagctgagtgacactaggcaaaattttttaacctctgtaagcctttacttccttatccactggaaataattgcgtttacttcatgtctgctttcaatcggcatattgtgaggaggtataaatgagtttaaagcatgtttaaacatccacagttcctggcattttttttttttctttttttgagacaggatcttgctctgtcacccaggctggaatgcagtggtatgttcatagcccactgcagccctgaactggactcaacacagtcctcctgcatcagcctcccaagtagctgggcagtgtgtaccaccacgccagctaattttaaaattattattattatttattttatttgagacagagtctcgctctgtcacccaggctggagtgcagtggcacgatctcagctcactgcaacctctgcctcctgggttcaagcaattctcctgcctcacctgaggcaggagactgggactacaggcgtgccccatgacaccagttaatttttgtatttttagtagagatggggtttcaccatgttggccaggctggtctcaaactgctgacctcaagtggtccaccctcctcggcctcccaaagtgctgggattacaggcgtgagccaccgcgtctggcattttgaaattttttgtacagacagggtctcccctatgttgcccaaaatagtcttgaactcctgacctcaggtgatcctccagccttggcctcccaaagtactgagattataggcacaagccatcatgcctggccctagcacttcttttcaagacaaaacgtgatagtagacagtgaggcagtgtggcactataagtgtggctacatgatcccagcctcaagagtcagaccgactagatttgaattttgattgatccttagcagtgggatttcagcctctgcgaccctcagtttcatcctctaaaaatgagcactacagtggcacccacatctcaatgagaccacgcaattagaatagcaggatgcctggcacataatgttatttgctgtattcttcctctaggtgtgagtagacaggagaccaactgtccctctgttcccctggccacagttctttgtgtcaaccttgctcctgtcctgttttattttttaaattaaaaaaattttttttttgagatggagtttcacacttgttgcccaggctggagtgcaatggcatgatctcagctcactgtaaaccccgcctcctgggttcatgtgatttttttgcctcagcctcctgagtagctggaattacaggtgcatgccaccacacccagctaattttttttagtagagacagggtttcaccatgttacccatgatggtcttgatttcctgacttcatgatccgttcacctcagcttcccaaattgctgggattacaggtgtcagccactgcgcccggccctgaatttcttatttcttataccactcctcccaccagtggtgggcattaatacatttgagtgactctagaaactttctggaataacctagagtttttatcatacggggataattatatgtcccgtaatatttatatgacattccatagtttgcttttctgtgcttttttttaattattattttttattattattttttgagatggagttttgctctttttgcccaggctagagtgcaatggtgcaatctcggctcactgcaatctctgcctcccgggttcaagcgattctcctgcctcagcctcccaagtagctgggactacaggcacgagccaccacacctggctaattttttgtatttccagcagagacaaggtttcaccatgttggccaggctggtctcaaacacctgagctcaagtgatccgcccgcctcagcctcccaaggtgctgggattataggtgtgagccgttgggccagccatgatttagcaattttgaaactacttttgtgtgtgtgggtgtgggcacatgggcccatgtaatacacacaaacagggttgaacaaataagtaaacttgtagataatgagagctgggtgtctcactgtggagaaggaagttacaaataaaacaggagatgggaatgcttaaaatgaaccttgtaggactggatttggaggcatcagtctgaattcatggttttcgtttaacagatatattgatacatatagatgtgtgtatacatatgtatatttccttgctctatccacttagagggaccagaaacagtgacactccaggaacagtgagcacccatcctggaacataaaaacactagtgggaaaacaggattggggggaatttgtggtttagttaatagtattatattgatattggtttcttagtgttgataattatattatagcagggtttctaagctttggcattgttgacttttttgggttggatttttttttttttttttttttgagacaggctggagtgcagtggcacgatcttggctcactgaaagctccactccaggggttcaagcaattctccgcctcagcctcccgagtagctgggattacatgcgcccgccaccacacctaattttcgtatttttagtagagatgggttttcaccatcttggccaggctggtcttgaactcctgacctcttgatccacccaccttggcctcccaaagtggtgggattacaggcgtgagccaccgcaaccagccttttatttttatttatttatttattttttgagacagagtctccctctgtcacccaggctagagtgctgtggcaagattatggctaattgcagcctcttaactcctagactcaagagatcctcccacctcagcctcccaagtagctgggattacaggcacgtgccaccacacccagtgaattatttttgtagagatagggtcttgccatgttgcccaggctggtccccaactctgggctcaagcgatcctcctgccttgggctcccaaagccctggattacaggtgtgagccaccacactcagcccttggattggataattcttttggtgggggctgtgccttgaaggatgttagcagcatccttggcatctaatactaaatgccagtagccagtagtatctcctgttccaaaatgtctgaaggtgttgtaacaaccaaaaatgtatcaagatgttgccaaatgtcccttgggaaacaaaatcgctactggttgagaattctgttctattgtttatttaagacgctaatattagggaagtttgggtgaagggtacatgaaaaccctactgtttttgtaactgcccatgtctaaaattatctttataaaaagtatctttttaatattatgctaatacttgtaaaaaatgttctattaaaacttaaactttttttgttttttgagatggagtctcgctctgtcacctacgctggagtgcagtggtgcgatctcggctcactgcaacctccgccttccaggttcaagtaattctcctgtctcaaccacccgagtagctggaattaaaggtgcccactatcacgcctggctaatttttgtatttttagtaaagacagggtttcaccatgttggccaggctggtctcgaactcctgacttcaggttatccacccacctcggccttccaaagtgctgggattacaggtgtgagccaccgagcctggcttgagtgctttatgtggattaatttatttaatcttcacatcaaacagaaggatgtaattgcttatccccgctttgcagattgggaaaccgaagtacagagtaacgttaagtaatcagttcaaggtcgcatagcaagtgtcagtcccaggctttaaacccaagtctggctccagacttctcttagccttctactgcatcctgcgtctaatttgttgtgggcaggtttccctatgagttcacttcactgagcctcattctttttaacggtcacatagggttctatgctaggtgaactgtagttgcaccctttgctgtcagtgtcttcaactcccatatctacccacagttccccaactctgggtccccaaatacctcccctgtgtcccacgggctctgcagactctattttaagttggctaaaactgagcccatctcctcccacctgcacctcctccgtgttcttatatgaatgtcaatgtcggcacccactggtcacccaggatggaggaaggagccagactgcgagggaataaaggaagtaagcaggttccaaaggacgtggaaggcctttgggtccagagcctagggaaaagttgagccctgcaaaaaataaaagaggctgggttagctttggacatctgtgggaaacaggtgggaagagggaggatggaggagccaaatttaagcatcgggtacttaggtgctcatctccaaggcaactgcattgctatggcaacagcagaggcagcaccgccccgcccaagtacctcctggaccgccgttacctctgcaccagccagactcttccgcatgggagggctgggggcttgcggacctccgggaacagctcaggcaggcgggagttgctgcggcattagccaatccataagctctatcccgcctgggtgggctctgcggcgacgcgcgccaagaaggggtcgggagttttttggcgctcgctaaagggcgttgagaagggcgggcccgcgtcgcttcggaccactcaggagccgaggagagcgagtgggcggggccaggctgaggctggccgggggcggggcgcagggataacgtgggagggtccgcccagcctttcttctacccaatagaaggccagaaagccaatccggaccgttagggagcccaatgggcgtcgccgccaggccccgttgcagagcgcgtctagccaataggcagcggcggcgggcgggcgcgggcgacaggcggcgcagctgaggcggagcaggcgctgcggcaggagggaagatggcggacgaggagaagctgccgcccggctgggagaagcgcatgagccgcagctcaggtgccgcgggggtcggggctggggcgggactgcgcgggcccgcgtaagcagggctcgagctcgccccttgggcgcggcggcagcgctgcctccctcccatggggtcctggctcttccgcgtcgtccccggggtaacggccccggcccgccctgttgtggggactgcgagcctcaggagccgccgggaagcctgaggaagctgaggcagggggctgggcgggtgagggtccggggagtccggggcgatggccctggccctgccggcccggctgatacctctcggcctaatgcacctgacaccccgggggacgtctctgcaccttgctgggcccgggggcacccctgggagggagacaccccagtaccctgcaaagggcgtagggtgttgcccggcctcgggtccacaacctacccctgctaacacccctactgtgtacacctaatgctgagtctgcgacatcgcccgtgacattctgccagacgatggcccctgtgcttaggcccgatttaagggttagccacaatgataatattgccagtaacagggcatgtttttctctgtgtcaagcgctttaagttctctctgaattgccgcaactctgggagccaggtagttattacttccaccttaccagcaaggaaactgaggtcagaaaactgaaggaactcgtccaagatcattcatttcaggggccgggggttggattaggacctaggcagtttg

SEQ ID NO: 97340 - DNA, 13467 bp, Homo sapiens
aaaataaaagggttcaacagtggtttcggccctcgtttgataatagtagcccattttctctttgagggagataaaagaaggttaccaggagttggtgaatgcttcgggatgaccctctatttgatgacctgtgacagtgtggttagacttttgaaatgggagcgtgttacccttttgtctgagacctcgatggtgccttgggctcatgaattcgtgacctttgcaataacacttttccatggaaggcaccaacttcccttttccattcctggagatgcagataacactgccgcaggccagagcccagaggcatcggacggtaactttgtgaagcttttatgctccagggtttgggaataactgttgcaaaattgtcagagcctttgttgatggacgaggaaatggtcactgatgtgttccctgggatctgtcctcctgcagcctgggaatcttgtcagtgactgattgattggggccttggtgccaggaaaggcttcacgaccacgacaggcgcaagaggaagtgaagcggtcatcctctgggtgggccagtggggtaatgggtttgctcaggtttcttcctacagtgaggtttacagcaaatgactgaggaagcccccacaagctgagagattccagtaatagggtgacaagctggccttggagccaggctagtgggaaagacctgagcctgcagctttcaacagcgggctttcctggacttctacttcaattgcagagagccgttcgcagagacttccactgtagctctgtgccagggcggtagagagtccttggtgactttggccaggggccaggatgggttctgcgtggatctgagttgcttgggggagcaagtcctccaggcctgtgcctggggtcctggtactgaccgtcctcccccactgccctagtaagggcactgaacccacatcctggatcttgagaaaagctggggccgcctgtggttagcagctgctttctcaaatgacatatttgggatattttctttttcttcccaaacctgaatctcaggggcttttgcctgtgggagggtggagggtggtaggtctgctactgtagctcttccattctttagggatagactgatttctctgcctgtgaaacgcagaaatatgtttccagataattccacctatgcttatatactgggacggcagctgctctcctgagccctacagtgcccggtccctagaggccaaatcctgctgggactgcccagcctctagcctccccacaacccagaaagtccctaaagccccagccaccgtgggctccctgctctctgaagctgtctctggagatctgcttgggaattcagggaggggccctcctattcatgtcacattgggcactgggaatggggagatatttttatcagaatctgaagcccctccctccacttagtacatacaataaacactgaaagcttcctggttttgttcagggaacacagtttaccacttgtgacccaagaaagactccctcgaacagcgtcgtaacctcgtcagctgacttccttctccatccctgttgtggagtctgtgaggaaacctaagtgtttctggtaatttagttgcaatcttggccgggtattcatttgaagacacaaagctggagccaggtctgtggagactcctgcaaaccagccccctgagaccagagctggctcttccatcaggcacgtccagccagggattgggacctcagcagcaattaggaggccccatgtctgtgacacgcggggctgcggggctgctcagttgggagtgtggcatggacccacgatggggcccactgagcatgggacgggggcagggggtaatgaagtcggggcctggctttccccagctcttgatgggaaaagccaaggccacattctgtagggttctggagtgtggggtgaccccttcctgaccccccggggcagaggagttgccagggctgtgtcctccctcccggcctcctgagcagggagtgtgccactttgagtggcacaggccaccgctgctgctgtcctgcggttggcactgtgcttctgtggtcatcacctgtggtcctcacggcggtgtggatgtaggtatggcccggacattacggtggagagcgctggagactcagtggaggagagagggctagagtcgcggtgcaactgtgtgagcgctgccaggcgccccactgaggacactgaggagagagcacttggagggcagactcttacaagagaagcttttcaaagatcccaaacaccatttcggacaaagcatatataaattttttttttttttttttttaatggagtcttgttctgtcgcccaggctggagtgcagtggcacgatctcggctcactgtaacctctgcctcccgggttcaagcgattctcctgcctcagcctcctgagtagctgggattatgggtgcatgccatcacgcccggctaatgtttgtatttttggtagagatggggtttaatcacgttggccaggctggtctcgaactcctgacctcaagtgatcctcccaccttggcctcccaaagtgctgggattacaggtgtgagccaccgcgcccggccgcatatataaatgtttttaaacctgtttttaaatatgaaattaacatgtgttcactataaaaattaagaaaaacagaaagaaactaaccctttctgtagggaaaaccactgaagccattgtgatgattggctgcctgccttctgtgtacagcgcacggaggcacagctttaagcatcagatgacgattctgtcgtgtgtgtgtatttcgtgtccagcttcctttgcctgccgatttctgggcactttcccatatgattaggtcaacactcttctcatggcgaaaactggtttgtcatatgagttgttaataagttcgtggtgaatgctggtttgtcatatgagttgttaataagttgactgttggacatttaggtggtttccagtttttccttgttataaatattgtgataaatatctgtatataaaaatcttagcgcatagtgattttcttggggtaagctcttgcaaagggagctttataaggttcttgatacctgttgccagagctcactctagaggatgacttgtcccccttgccctcagcactaagcgttcatcagtgtgggggataatgacatcacagatgtcattggcacaaattggctttgtgccaatttgatagaagaaaaactgtgtctcatttaaaaaatacctcattttaatatgcattacctcgtttagtgagggtgaacatttaaaatattttttccaccagttatatttcttcaactctaaattgaagaaatttagagtcctttacatgtcttggtcttaaaagccttttgggttttttttttgagacaaggtctcactttgccacccaggctggattgcagtggcagcatcacagctcatgcagctttgacctcccgggctgaaacccttgcctacctcagcctcccaagttgctggggctacaggcacacaccaccatacccggctaatttttagaattttttcatagagatgatgtcttccctgtgttgcccagggtggcctcagactcctgagctcaagcgatcctcctgtctcagcctccaaaagtgttgggattataggctttagccactgtgcccagcccttaaaagtctttaggaacacggcttcttagcttttctaaggaatgtttgacagtggcaacttgtagggcctggccttgcctgccaccagagcaccctgggaatctctgggccaggtagacatgggaagtcagggttttctgggctggcctgaggggctgggctggggccagccggccatgtggtgtggtgctggaggggactcctcactattcctgtctgttcctcttcctcaggagcaagagcagctctacctgaggtcaggtgtggtgtcctctgccaccttcgagcagccgagtcgccaggtgaagctgtgggtgaagatggtgactccactgatcaagaacttcttctgaggacagacaggtgctgtctctagcatcacctctcagcacgattttcccgagagttcacaggtggggcaggtggttgttctgactcaaccagagcttccagagggctctttgatccctttctcagttaaacacagagcagcatcttcaggggtatggcagctgtcctcaaagttagaagctggatgctaaattaggcagtctgttcactttccatctggtacccactccactaagtcccaaggcgcctgtgctggggtcggcagtggcagcctgtagtccccttctgctctcccttcccagggggtcctgaagaagccctggggcaagggctcagggatgagggggcagaaaggcagattgagcccctccaagctgagcacactggtgcaggagatgtagacgtgggaggaggggagcacgtttgctcgtgagagtggctctggcttgctgccctggccggctgtagtgcacagggtggggcgtcggtagagccagaccgtgggctgctgcctggacgcctcgctgacatccctgtgctgcggttacagagctgcgcccttctagactctggaagttgagtaacaggacctgctctgcccacccaggaggggcctgccgcttcaccagaggcaccagtggggtcccacagtcacctgaggtacccctggactgtcttgacgcctagaggtccgggcagggggtggctgccattaaaggtggggtctttgctgagtgaccttttgtgtcctggatccctcagggcctggactgcactccgggtggggtcaggctcccgaggcccctgctctctggttctggatgttgtgggtagttctgttgctttggatggctgggcctttggatggtggcttgtggggaagggacggtgaggagtcaaagatgagccaggacccatgtggccggcacatgcgctagtgccggcatctcatgtgtgcagcgtgggctcccttagtgcctggcaccttagtgctctgctaagtctcattgtttaaaaatgtgtagtttatctgcagcttttcctagttattttaattacttttcattttatttgaatagtgtgtgcaaatgtagagagtaaaacaatactgcggccatttcctgccctcccttcccccaggcagccactcttggcttgtttcttctgatgtgcacacgtgtccgtatttctaaataacgtgcatatcctgctgtcttcccccaaaatgtgtacttaaccaaaacagcaccagtgtcactcctgaaacaaaaattaccaagaatgtcttagtatcatcaaatacctaaatggtgttcacaattccacttgccttaaaattaattttttcgattatttgacttgaagtccaattaaggactacaccttgtgattgttttttccctagcaatttattttttgaagaatgaactttatttttattggatctacttaaaacatttttgtgtcacctagtagcaggggattttgaatacatgtcatgtgtgtttataaagccagctctccatatcccccagtgtctccaggagctgcttttgtgacctcactgcctgatctctttatcatcttcaggtgcttgacccttgcacagagagaagcttcctgggctacagggcatggcagcctgtcctttcggggagtgagattagatttagtccctgcactttgcctctctagaagcagcttctcgcctttccctcccgagggctggcaggagtcactgtcagtcacccttcatggggtctgaaaggttgcatgggctcacctggtcttagacaaggacagttgcagcttccgcaccaggcagacctgcagtttgagtggctggggataggtggagcggcggcctggccacagtgccctggacagcagcacatcacatcagttaacactgtttgccttccaactagttattacggtgtcctgtgggacaattagactggaggagccaaaggaatgtgcaggggcactgggtttctgtttggagagaggctctcggtaaacagagttcgcattcctccagattctgtgggaccagagtaaatatcattatgccacagccaggcttaagcaatctatctgcagtgccgttcccgcagcgcacactgctccctctgtctctgcygatgaccttcgaggctgtcctaggcaggttctccctgaggagctccccacaccaagcctccctaactctgcaaagcagccggagcaacagagagcagcgggcgggcggccgccgcagtcctcccggctttctaggtgcgcggggctgtcgtgttccagtccgtgttccccgtcgctggagtgcagcttaagtgcgaatcatttcttggaaagtttagagataattttgtcaactacccacaatatgtatgtgtggactagattactttcttatttcaggatctaaaggcaaaatggaaaaacgtcacattttgtggttattaccagggactgaagtgagttgcccggtggcccctggtggctttagctcccctggtcacctgaagggctgcagtgacccctcctggccagcagaggtattggcccagccaggctgggggaggctgaaactgcttcccttctctgcagccacaaagggctggattccttgggcgccaggaggggaggatttttcttttccctccgatagccctactgggcgctaagattgttgtgaatcattaccctcagaatttggactttctagrtgcttcttaacccatgatttaggtgagtaaacttggaaaaatgtttttgcaaaacttgatgatcaagctgaacgtagaacgatattcctaatgggtgtgtttgccttttttcccccttttgagacagggtctcactctgtcacccaggctggagtgagtggcatgatcatgcctcgctgcgtacttgacctcatgggctcaagcgaccctcctgcctcagcctcctgagtagctgggaccacaggcacatacaacattcccagctaattttttgtatttttgattgatagagatggttttgccacgttgcccaggctggtcttaaactcctgggctcaagtaagattgccgtcctgggattagaggcgtgagctgctgcagcggcctgcttttctttgaagcctgagaaatgttgagggccgggcacagtggttgacacctgtaatcctggcgctttgggaggccgaggttggtgaatcacctgaggttagaagtttgagaccagcctggccaacatggtgaaaccccatctctactaaaaataaaaaaattagctgcgtgtggtggtgggtgcctgtaaccccagctacttgggaggttgaggcaggagaatcgcttgagcccaggaggtggaggttgcaacgtgagccgagattgcgtcattgcactccagcctgggcgacaagagtgaaactctcactctccctcgaaaaaaaaaaaaaatgttgatcctgtcttggtccccctgggatccgtcttttctgacgtttgccgctgtctcccctcatcccccaggttgctagttaattctctcccctcgtgcctgcaccctgctgccctagctagcctggccacctcactgccgtgtcctgcatcaggccagccacagagtcctacaggtccggggcttgcttgtgggaacggcttgttcttctagactctgggggcgggggcttgggtgtgtttccttacttgtaaaaggtcctgttgtttttgggagcagggagtaatggcggatgagacgctgtgtggaggcggcagctcctggtatggggtaacgccctgtcccctcattggcaggtggtttgcatgaagcatcaggccagagggtgtgagtgccaagccctcaccccacatgctgctcctgttaaaagcaaactccactgacccccccgggaagtcaggatttgggatttacttcctggaatgcttgcctctggctgctgggaattggggcctttccccaaagcctgaaccaggcctcacagtggccatcaggcacagaatggatgggcacagctgagtggctccactggctttaatctgccccacctcttccacaccaacctccaccctctggttccgatgtgcttggttacaaagcacctgattatttaagagaacgaaaaaccaccaccagttcctgtaaagaataagtcacaggtgcacaggtgaagggctgagttgtggtccagccccagggagtgtgggctgtgaggcaggagcgagctaaacctgtaggagcagcgccacggctgccaggatccacttcgctgccttctctttggtcttcaagttaaaggtccagacataggtggggccgcggatgcgtgttttgtacacgggacactcatagatgttcttggtctccatgcggtccacaggaatggccttgatgaagatgacaggcatggccggggtcagctctttcagccgcgcttcagcgatgactccagtctgggtgtcccagcgagcccctgcagggacagtatggctgagggtcaggtgtgctgccagtaagtgagggaggggctggcaggaagggtggggtcctcacactccccgccctctgcagagctgggctctaccccaaaaggcttcaggccagctgccacagctggaagcagaggccttcgtaggtgatggcctgcatgttgtaactaccccgtcccgctgggctcaaggaacagctcagctaaagccctcgggttccatccgtttaaatctgtggcattttcagagcctcatctgtcagccttaatgtcagtggcaggaagtcataactccagctaaaaattacagagtaaagttccctgattcttaatgtgtaatgtctgccctatgtgtacatacacaatataattatacatctgtgcatataaatattgcctttaaccagactgctattatttctactcgccctatttaatggtgtttttatttcctgtctgaaatctcaaaataaacaaacatggagagcttatctttggttgtgtgggaaatggggtgcctgagccgttgctggcccaaccctgccaccccacaggtaatggggtgacgtcagctgttgaaggggacaggtatgtggtggtggcattgctgctcaactcagaggcgggctgagaagatggccggcctcggtgtcctggctgacctcttctgtgtagcaggacaggggtgatgtgggggcggacttctaacaggtgccccagcctcttttcccttgaaccctgtgttccaggagtggcagcagctggggagtgggtgagactgggccagccagcatgacctggagtctcagtgcagccacaaaacgcacttctgccctgggctgactgctccgtggcagggaaagcctgggcttttcagcgcttttcatcacgtcggagctgctctctcacaagctctgctgttttcattaaagcagaggccaggtgactggggtgtttttggtctcctccagaccctgcacattccctgaatcctctcaaccctctctagggtcagcgtggctctgacctgcaggctgatgccccctgagagcacctctctcctgcctgtccccacagctcttgaacagcctgtctttgccaagagctagttttatcttgtcttggcaagtagcactggctctggaagcttctgcagacagacaagagccctccttaccttccatgaagagtccgtacacgtaggagccctctcgcggaggagcggtcatgtcctctcggtttttcttggtcacctcgacagacagacacatcttgtccaggggccactcgttcttcctggccatggactgcatgatggccgtgaggaacgactgggggttgaagaagccggccagccacacggtggtgggcagggcaaagtctgtcgtccaggcctcgagttcctgcaaggacacacgagccgctaggaggagaggacatagaatgacatgggaacgaccgggccttggccgttctgagcaggggtcacgccagaaccttccacgggccactcagcgagctagaagtgctggacagagtaggggccatggagcccagccacctaccatgacgcaactttggtgtctgctttttttttttttttgagatgaagtatcgctctgtcacccaggctggagtgcagtggtgcaatcttggctcaacgcaacctccgcctcccgggttcaagcaattctcctgcctcagcttccagagtagctgggattacaggtgcaggccaccatgcccagcttatttttgtatttttagagatggggtttcgccatgttggccaggctggtctcgaactcctggcttcaagtgatctgcctgccttggtctcccaaagtgctgggattacaggtgtgaaccaccgtgtccagctgctgtttgctccattttaaacaagggaacaggtagagaagggtcaggaagaaaatggcttcctgtttgtggataatttaggagcccaaagaggctcttgccttcattgcctcgctccttatagaggacggcttaccctttgagggtcgcttgaggaggagctgatggaagctgctctgcggcctggcttgttttcctcctttgggaggaaatggctgcactgtcagggtgtgggaggggcatgggctaggcccttctggccctgatctgacagaggacaggcccccaggagcctcctggccatgctcctgcaggctctagggtgtggggcgtgccgagctctgggcactcggtccccgagtcttaggaagcctctcagagaaaacggcacttaccctgatgcggagcagcaggtctgcgtaccaggccgccaggcccatcatggaggggtaggcccgggccacccacgtatcaggcacggtgtcatagaagagagccgtggacagatcttccacgtcggtcgtgatggtcagttctccctaggagacacacagatgggtgtggggagccctgagctggggcctgggagagcaccagccccagtgcgtgtcatgagttgtcaacacagtgtggctttgtgctgcgcctctggagacgccctgcatcagggccacgcaagcgcttcctgctaaggaacggtctagatgagctcccggggcttgttctggaactgccagagctctggagagggagcagtaccatgctgatccggggcctgtgctaggcctgggttgccagaggcctgggtttctgctggtttcaccatccagccacgtccctggggccgggctgacccatgtttaccttcagccccaggttcagctccttgagcgaacggcgcatttcgttggtcaggatgttcattctttcacattcttgaaaggcgactaccacatagggggtcttttccgctgcctttgccatgatctcagccatgttgaaagtctccggaatcttctccaggatgtcgtccagcacggccttcacctggaagccagtccccggacagcccctgtcactgcaaagagcccaccccacccactgcagggtcagggagcctgcccaaaatgttcccagccccaagtcctggagaggagggaagaggcaagtagagttgccagaaatgcagggtcatgggtgcagccacacatttgatgaggagagggagccttggccagcggctccgagcattctgatctcactacaagtccctgcagccgcggccatgagcgcatcaggccacctggctcggtgcctcatttgttcattcccacgcaccagcctctggtcaaatgtagccagcggttgagggattgcgactttgtcctttacgtgggctttctgtagggaccatgctggtcacaccctgttaaggagtggcccacacagtgcagtggtcacctgcaccaccgtctgtcagccaattcctgatttcagtcattagactaagagaaagtcctggacctaataggaataagggtctcacatcaagaattcagtctttaccgggaagtcctgtacttagctagtacgtaatagagcctttccacattctattaagaagtacaggccaggtacagtggctcacgcctgtaaccccagcactttaggaggccgaggcgggatggtcacctgagatcaggagttcaaaaccagcctggccaacatggtgaaactgtctctaccacaaatacaaaattagccaggtgtggtggcaggcgcctgtaatcccagcctgggaggctgagccaggagaatcgcttgaacctgggaggcggaggttgcagtgagccgagatcgtgccattgcactccagcctgggcaacgagagcaaaactccgtctcaaaaaaaaaaaaaaaaaaaagtggaggtacccaggaggcagcacagagccacccagacaagcgagaatttgttcagaacactggcatcccctgaactcttctaatcctttgagcagtaacaggacctgccattgtggccactgagcggctctggagtacctgcctgcacatccggctgcccggtgcgagctgctactgctgttgtgctggccaggccagggtggggaatggtcggtgcccttcctggcgctcagctagggaagctggaagactgcagggtggagggctgggatgctctcggagccgcatccacacccccaaggatcccttttgtctgggcccgtacgctcacccgaagcctgcagctgccacgtctgaggacctgctgaccagcctgcgggccataccccagtgtttctgatacccaagcccgaggctggggcagagtgtacctcaccagcaagttcccctgtactgccgccagtccctgtgaccccctcctcagttctagatcctcccccttcctctcgcttgggagcagtttcaaagatcctgccttctcctcgcgggacactcccgtgcctgcccccgagtccgtctcttttggctgcatttccaggacagtgcggaacagcttctctgaggtgaccgtcagaaagccaatctctgcgttggggtgcaggccatacagatagggactctcagggggcaggttctcatcgatgtattcgtggtaaccctgaaaaagagggcagtttgtaagcagaggcaaagctgtgcaggctgaaacccatgtcctgttggttaagcattccttgccagaacgttcacccacaccttgctgtctgtacagatcccacttgtttcccagccccctttgtgggctgccccctgtgctcccagcgacataaaggaaaattccattcccccttccctgaggctgcatttctttctttaaaaaaaaaaaaaaaaaaaaaaaggttgtttgtattagccttgtgcttcttccaagtgagacgcatttctcatcctctcttattttggctgcctgggttcttgctcaattattgacactccatttgtgctggcaggctctcaccgggaggcacgagccttcattacgttgagctcctgtttaacttgtcatcctta

SEQ ID NO: 97341 - DNA, 40365 bp, Homo sapiens
agcctgggaggttgaggctgcagtgagccataatcatgccagtgcactctagtctgggcaagagagtgagactctgtctcaaaaagaaaaggctaaggagggccaggactcctcagccccagctggcgtcatgtggccccaagattgccagaccaggtgatgtttcaaaaatccaattttgaaatgatggctaactaatttttttgaatttataaacactgtttggggtaatcacaacctatctgtggcgtggatgcaatgtgtagacacttagacataatctgttttcttttctttcttgagccaaggtcttgctctgatgcctaggctggagtgcagtgcagtgttcatggctcactgtagcctcgacatcctgggctcaaacgatcctcccacctcagccaccccagtagctgggactacagatgtgcgccactgtgactagctaatttattttattttttgtagagacagggcctctctccctatgttgctcaggctagtgttgaattcctggcctcaagggaacctccggctaggattatacacataagccaccacagtaggcccataacctctttttttttttttttttttttttttggtgagacaggatctcactccaattgcccaggctgaagtgcagtggtatgatctcagctcactgcagcctcaacttcctgggttcaggtgattctcccacctgagcctcccaagtagctgggaccacaggagtgtgccaccacgcctggctaactttttgtatttttagtagagatgaagttttgccatgttgcccgggctggtcttgaactcctggactcaagcaatctgcgtgtcttggctttccaaagtgctgggattacaggcatgagccaccatgcccagcctccataacctcttttctatggaagagtgcagaagacagaataagacaagggggcagaaccagctctctagctcctttctgggtctcacctgagaacccgttaggaaggcaggttcgtggaccctagcccaaacccactgaatcccgatctgcatttaataagaccccagctgactcctctgcatgtgcaaatctgagcagctctgctataaattttgtctaaatcagtcctgagtaggtgactgcaggtaaagtacatacataccacactacactagagcaaacgaaacccgcacaatactgacggcacagcaggtctgtggaaggagaaggccccagcgagaggaagtcacaaccttgcctccacttgcccaaaaaaggcttcgtttgcaactggcttttctacaagtttcactcacatctattatgccatttatttaataacatacttcaaaggttgggaaggggctaataaaatggaggacaagatttaagagtcaaaatgcaagtaaatgattttatgatcaggggaggcctaggtggcaaaaggacgtatgctggtgggaggggcattatgatagtttcattacacctttactggaagatggttcaacttgcacctcctgtctttcctcacttataaacactgcgtggctttacatctctgtaatagcatctaaaatgaagttaaaaagaaaatttccctcaatttccctctattgctaaccttcactaagaaagtcctcagtgttaaccagtgacaagagctgttctgttaattcagatttactacacatacaatcataaaaatacttctttagtaaaacactgtattaaatcaagaatcagggccaggtgcggtggctcacgcctgtaatcccagcactttgggaggccgaagcgggtggatcacaaggtcaggagatcgagaccatcctggctaacacagtgaaaccccgtctctactaaaaataaaaaaaattagctgggcttgctggtgggcacctgtagtcccagctactcgggaggctgaggcaggagaatggtgtgaacccaggaggcggagcttgcagtgagctgagatcgcgccactgcactccagcctgggtgacagagcaagactccgtctcaaaataaataaataaataaataaaataaatcaagaatcacacgtgctgtcccactgtccctctctgcctgtttacaatgacaaccatctctaataacaagacctacattcatgcagcacttactaagtgccaggcacaataccaagccctcacaccccttgccccttacatgtcttgcctcatttaatcctcacaacaacccaaggaggtaggtactattgtcatccttatttaacagatgagaaagctgcacagacaggttaagttacttgttcaagtctccacagcaagtgagtggcagagcccggattttaccccaggcagtcggactcgaaaccgttgctcctccttaccaccatgatgattatccactcaccgctccatctttgatgaaagtatggcacagatctgcaattttgtttcttgacagtgatattctcctgagaaaaagttctccccgctcaatcatgatctttttacatttggagtaatcctaggaagaaaagagcaaactgaggggacagggaagatccagttaatgctgagaatgtctgtcactaaacagagaagtggaaaggtaaccccagggagaacaggcacttacggagtattccagggaggcaagactgatgaagcggaggaagagctccccgccagaggacactgccacagaggagtccacaccacacagggtttctatggcactggtgagattcgccctcagaccctggattgtctcccctggaatgatccaacaaggaatgtgatgttcacattagggccacagccccgacctgtatcttcaattcattcattcattcagtgaatatttactaggtacatactatataccaggcactattctagatgctagggatacatcagtgaacaagacaggtagggttctgctgtgatggagttttgattgtaatagaggaagcggatagtaaacaagcacacatagaaataaagctgggtggctgggcatggtggctcacgcctgtaatctcagcactttgggaggctgaggcatggaaagacattaagtagcagcggcagatgaggtctgcaaggtggtatgggtgaggctaaggttgtttggatgttattttaagaacaatgggaagacactggaggttgccttaaagacatgtgtctctaggcaagcccttcagattaaaggctgcattattattttgcttatacaagatttcatgctatacccagatgcttacatttagggtgctgaattaggggatcacaataaataatactaataccagaatttattctggaatattccctgtagcatctgtacagaatctggcacaaggtggaggcctaataaacacttataaagctgaactgctactgaaatttacgcatcatggttaacacaatataacatagtcactctcgattcaaagtctgtttcacttatgaaagggatccttttcatgacaacgtaagagctctctccagattgaaaggtctgaaatgaaggcagaagctgagcttggagctgtattactactttatgcaggcaaacatgcatctctcactttctacatttctaagagtcattagaagactttcctggccgaacatggtggctcacgcctgtaatctcagcactttgggagggcgaggcggacggatcacctgaggctaggagtttaagaccactgtggccaacatggtgaaaccctgtctctactaaaaataaaaaaatttggccgggcccggtggctcacgcctgcaatcccagcactttgggaggccgacatgggcggatcacgaggtcaggagatcgagaccattctggctaacaaagtgaaaccccgtctctactaaaaatacaaaaaattagctaggcatggtggcgggcgcctgtagtcccagctacctggaggctgaggcaggagaatggcatgaacctgggaagcggagcctgcagtgagccaagatggcaccactgcactccagcccgggtgacagagcgagactccgtctcaaaaaaaaaaaaaaaaattttgccaggcgtggtggtgcatgcctgtaatcccagctactcagaaggctgaggcaggagaatcgcttgaacttgagaggcagaggttgcagtgagccgagattgtgccattgcactccagcctgggagacaagagcaaaactctgtctcaaaaaaaacaaacggccgggcacagtggctcacacctgtaatcctagcactttgggaggccaaagcgggcagattgcctaagctcaggagttcgagaccagcctgggtaacatggtgaaaccctgtctctaaaatacaaaaaaattagccggacaaggtggtgcacacctataatcccagctactcaggaggccaaggcaggagaattgcttgaacccaggaggcggaggttgcagtgagccaagatctcgccactgcactccagcctgggtgacagagtgaggctccgtctctttaaaaaaaaaaaaaaagaaaagaaaaaaaagactatcctaagtcccagagtgttaacagatgactctctatatacctttatctctcttcaagaactccagcaacgtccggatggcagccactgctgaggccatgtcaggatcttctttcatctgagacttaaagtattcaattaactctggaaaaagggaaaaaagtgattcacctaattcatttagcagcctataaggcaagagagcttgttaatgactgttgactttaagaagcaaacaatttaaaaaatactttctttttagggtatttggtttcagggatgcaataaatgttgatgggaatagagaaaataccactttgctgtttgcaagagctcttttttattttgaaaaagctactggtggccgggcgcggtggctcacgcctgtaatcccagcactttgggagtccgaggcgggcggatcacgaggtcaggagatcgagaccatcccggctaaaacggtgaaaccccgtctctactaaaaatacaaaaaattagccgggcgtagtggcgggcgcctgtagtcccagctacttgggaggctgaggcaggagaatggcgtgaacccgggaggcggagcttgcagtgagccgagactgcgccactgcactccagcctgggtgacagagcgagactccgtctcaaaaaaaaaaaaaaaaaagctactggtgtgcaaggcctaaaaattaagcccgagtaaatgatgatgaaaagtcattctctcttcagcctctttggtcctaaaatctgagaggatcccagagtcaaccatcttgccaatttctcctgcacccctccagacagtctatgctaatacatgtctattcacatacacatatatgttacaaatattatacatggagttccacccactcccctttatttctttacatgaaaagtgtattagtttgcccttgtttttcacttaataaccatactagatgagcacatcaaatatgccttattcattctaattttaatgacagatccaacaaggcaggaaggagactggcactgggaaggagcgtatgtgtgggagggatgcctgcagatactgccagggcgcatccctgaaaacaagagcagcgcgagggatttagttgtgactctggaaacacaaccagcggagcagcctgaaattcaaaagaaatctcttcgggagctcagcctggatgtgagaggttggggggacccctgaacggcgctgctgtagcctagcagccctggcctgtcttgatttacccttgtcgtccatggcgtcctcctgctgcggagccccaggggacccgagccgcccgcgctgtctcgaacgggtccgccggccgcgccgcctgcgagccagtctgacagcgcgctgcacacctccgcaccccacttccggcgcacttccgtacccctcttccggcgcactccccgcactccacttccgcagattagggggctggcacgagtcacagcacctcgtgcgtcacttggcggcgccggacgttgggctgcgcaggatttgagacgctcccctgaccaccacttgctctgcgctgaggtgctgggacagccatggtttcagacggtgaggaccctgcagggcgggacttcgactccggggctcggctgtctcggtccggctacgactggccagatggaatgtgtcttttgggctggatagaatccgtttggtctttagaggagtagccaaggcattcagtcattcattcagtaaatagttttggatcgcctcctgtgtacaggcattattttctggattttagcagagatcgtgacagacaggggccttagtggaggttacagtctactgggtgaaacagatgacaataaataaaaataatttcggccgggtcgcaccccggtggattaggcctgtaatcccagcactttgggaggccgaggagggagaatcgcttgaagccgggagttcgagacctgcctgggcaacacagccagaccccatctctacaaaaaaaatgaaatattagccgggcgtggtagcgcgtgtctgtggtcccagctacgcgggaggctgaggcgggagaatcacttgagcccaggaattcgaggcttcagtgagctattatggcagtactgcacccagcatggccgacagggcatgacctcgtcaataaaaaattaaaaaataaattatttttcaaaggatgaaaagagctatgaagatgatgtaacagtacggtcctagttacaatagtacattgtgactaggattgaggaggagctgttttagataggggcctaggaaaagtgcaggatattgaaaccgacttgaatgattatgtgaagttctgggggaagtgcactttaagtgcatgggccctgtggcagattgagccaccaagttacactgagaagggagaaatggagagcttgcgggtagaggatggtggggagactcattcatacattaaactaccacatacagagtcagatgtcttgaagatttaaaaggaggctagagggatgagatcagagaaccagccagtttcaggtcatgcagggccttattggccgtgatagagaagttggcctttatttttaggtgcaatacaaagacattgtagagttttaagccagaaagtgttatgatctggtttgcaattttaaaagatcactgtggctgttgtgtggaaaatggactgtggggagcaagaatagagataggggagtcctttcaggaactgtaataattgtccatcctctcttaattgatgtgaaaccataccacaaccctgtgagggaggcaggcctggcattgctcctgtctacaaatgaggtagcgaactaaagaaggaaattcacagggtcattgcatgtgtatagatgcacacctttctttacaggcaacgctttttctgtctggcagacacagttgtattaagtgcttctgtcctaggtgctttgttgtgtgatttacacatttttttgttttgtttttctattaaaaaagaaaaaaagtggctgggcacagtggctcacgcctgtaatcccagcattttggaaggccaaggtgggtggatcacttgaggtcgggagttcgagaccagcctggccaacatggtgaaaccccgtctctgctcaaaatacaaaaaaattaaccggacaaggtggcgcacacctataatcccagctactcaggaggctgaggcaggaaaattgcttgaacccaggaggcagaggttgcagtgagccaagatcgtgccactgcactccagcttgggcgacagagcaagtctccgtcgcaaaaaaaaaaaaaaaaaaaaggtagagataaggtctcactgttttgcccaggctggtctcaaactcctgggctgaagcaatcttcctgcctcgacctcccaaagtgttgggattacaggcgtgagccactacaccagttctgatttacacacattattttatcctaggattagcaaattccatcattttttaagaagtccacagtcttaagtgggcaggactgggacgagagatcagaagcacaactaactgtaaaataaaatagtaagtgctaagtgtcattagaagagagagctgtgggttgtcagaggtgggcagtggggcagtgaagagccacagtctttatagtcaagcagatctgtctttagaacagggctttggccttgccacttgttagcaggccatatgtgacttaggacaagttactttcatttgcagaatacgaataccatatatcatatttcagctaatctaagataatattgattatgagatgtgcccttatttaatataccattaagaaagaaaaaatgctgctaatcttaatgataaagataccatccagatgtcaacaactattcaatgtaaaaaacaaggggtgggggtcatcttataattgatgaaaaatggcaggaaaatgtcctttgctgggtggttgtcagggtggaatgggattttgggattgcagattccggtgcttagtgcagaggaggctggcattccttctgctctgagataggggagtcatgaagaagaaagagtttgcgctggtttggggctttgaggagtaattgggatttgaatacacagaaatcaaagatggggtagagattctcctaatgtagaagacaggactgcaggaagcaaagtayggagggaggaaaggcattactgctctttgctattaaatgagcatcctagagccgggcacggcggcacatgcctgtaatcccaacactttaggaggctgaggtgggaggatcacttgagcccaggagttcgagaccagcctaggcaacaaagtgagaccctgtctctacaaaaatttaaaaattagccaagtggctgggtgtggtggctcatgcctgtaatcccagcactttgggaggccaaggcgggcagatcacctgaggtcgggagttcgagaccagcctaaccaacgtggagaaactctgtctctactgaaaatacaaaattagctgggcgtggtggtgcatgcctgtaatcccggctactcaggaggctgaggcaggagaatcgcttgatcccgggaggcggaggttgcggtgagccgagatcgcgccattacactccaccctgggcaacaagagcaaaactccgtctcaaaaaaaaaaaataataattagctggatgtggtagtgcacgcctgttgtcccagctgtgtgggagactgagacaggaagatcacttgagcccaggaggtcaaggctgcagtgagctatattcgtggcactgtactccaaccttgagaccttgtctcaaaaatttgtttaaaaatacataaataaataaatgagcatcctgggcctttcataacagtgtatactcacaggtttgtatgtctgtctgtcacctcaattagagtatagtctctttgaggggttggacccagtatccccaacacctaacactggtagtgtgaaagtttgttgaaggattaatgtgtttggggtggtgcgtgcatgtagtccttactactggggaggctgatgcaggaggatcacaagcccaggatttcaagaccagcctgggcaatttattgagacccccccatctcttaaaaaaaacccaaaaaacaaaaatccaaatgaatgattaatgtgttgtggtagcctgtttagtttagagaatagaattcctcttaacagtaaaatcttgacgtaggaattgcttttccctctgttttttaacttttttttttttttttgagacagagtcccactctgtcacccaggctggagtgcagtggcaagatctcagctcactgcaacctctgcctgccaggttcaagtgattctcctgcctcagcctcccgagtagctggaattacaggtgtgcaccaccatgcccggctaatattttgtatttttagtagggacggggttttgccatattggctaggctggtcttgaactcctgacctcagtgatctgcccacctcagcctcccaaagggctgggatgggcgcccagcctggtttttttaccttttaaaaagtgactcttaattacgattggccttgctgctacatgatttgatgagtacgggccaaattgacagctacgcctccctttaattttttgctcctgaaattctaccactgggattcctactactagttaaccagtgccttctgtccttgaccaggcattcagaatgcagtaggtggttttgtttgtttgtttgtttgtttgtttgtttccagacggggtctcattctgtctcccaggctggagtgcattggcaggaacatggctcactgtagcctcgacttcccggtctcaagcgatcctctctcctcaccctcctgagtagctgggactacaggcatgtgccaccatgcccggctatttttttttccccgagatgaagtcttgctctgttacccaggctggagtgcagtggtgcaatcttggctcactgcagcctccgcctcccgggttcaagtgattctcctgcctcagtctcccgagtagctgggattacaggtgcttgccaccaaacccagctaatttttttttttttttgtatttttagtagagatggggtggctcaacatgttggccgggctggtcttgaacttatgacctcaagtgatcccccctccttggccttccaaaatgctgggatcacaggcatgagccaccgcgcccggccctaatttttatatttttagtagagaaaaggttttgcgatattgcccaggctggtcttgggaacttctgagctcaagccatctgcctgtcttggcctcccaaagtgctaggactacaggcctgtgccaccacacctggccctcgttcagtagatatttattgagcagctgcaatgtgctaggcagtgtggtaggagtgaggataagcagtgaacaaaagagacaaaaattcctaccctcacagagtttacatttagtgcattggagatatagtggttcaggacgtagacaagaacttgctaagggcccactgtgctttaaagctttttttttttttttttttttgagacagagtcttgttctgtggcccaggctggagtgcagtggcgtgatctcggctcactgcaagctccgcctcctgggttcacgccattctcctggctcagcctcccgagtagctgggactacaggcgcccaccaccacgcccatctaattttttgtatttttagtagagacggggtttcaccgtgttagccaggatggtctcgatctcctgacctcgtgatctgcctgcctcggcctcccaaagtgctggggttacaggcgtgagccaccacgccctgcccagctttaaagctttaactgggtcttctgttaatctcataattataaggtgataaacatttaaggcatatagtggtgctctggatttaatttatgaattgggaatgttagctttgattcatttttatggagctaatgttttaaattttatttcttgttaatattttcagaagatgaattgaatcttctggttattgtagttgatgccaacccaatttggtggggaaagcaagcattaaaggaatctcaggtaagactgcttgaggaggcctttggagaattctggtttaactgagtgtttatattgcttttttaaaaaatggctttattaaagtataatttacatactgtaatattcagccactgtacaattcagtgattttttttaagtaaatttgcgaagttgtgtaaccagccccacatttctgctttagaatatttctttgactgcgtagcgttccctcatgcctgcttgcagtcaatccctgcttctatctccaagctgcaagcaaccactgatctgccctctatctctaaattcccttttctggacatttcatgtattgatttcatacaatatgtggtcttaaaaaatactttctattttgaaatattttatttttaaataatatagacataggaaaccagaaaagatacagagaggtcctgtgtacccatcactcaagttctttcagtggtgacattttacataatgatagtacaattttgaaactatcagtgcaatctacagacctaagcagattgcaggttttacatgtgctcacttgtgtgtatgcgtgcgtgcgtgtatgtgtgtggttctgtgcagttttaccacattcattgatttgtgtgtccatcagcaccaccatctcatgcctcagcctcccgagtacttgggactacaggtgcgtaccaccatgctcagctaattgtttgtatttttagtagagatggggttttgccatgttggccaggctggtctcgaactcctggcctcatgtgatctgcccgctttggcttcctaaagtgttgggattatgggagtgagccaccgcacctggctgattcttcatgtttgttcgtttgtaatctggtcccactctcgaccacaccttctttgcctgtctgtactcccaggcaactcttgatctctttgtgtcactgtagattagtttggattttctagatttttttcatgtaaatggaatcaaacaggttatagtggggaggtttttgtggccttttttttttttttttgagacggagttttgctcttgttgcccaggctagagtgcaatggcgcgatctcggctcactgcaacctttgcctcctgggttcaagtgattctccttcctcagccttccgagtagctgggattacaggcatccgtcaccacgcccagctaattttttgtatttttagtagagttggagtttcaccatgttggccaggctgatctcgaactcctaaactcaggtgatctgcctacctcggcctcccaaagtactgggattacaggcatgagccactgtgcctggccttgtctgttctttttaatgacaggttagctgttttccacttttaaatggtttaaaataaaatcagaagaataacatttttgtgacttgaaaattatatgaaattcaaatttctgggtctataaataagcctcactcataaatttatgtattttctgtggcagcttttgcattacaaaagcagaggtgggtagcaataaagattgcatggctcaaaaagcctaaaatatttactatctggcccttcacaaaacaagtttactgacctctggccgattgtgtggtctgttctggagaatgttgcatgtctacttgaaaagaatgtgcattcttttgtttctagtgaagtgttctataaatgtctattagtttaagttgcgtgatagcgcacctatagtcccagctacttgaggcgctgaggtgggaggatcactggtgcccaggcggttgagtctgcagtgagccataactatgccactgcactccagcctgggagacagagcaagaccccgtctcaaaaaatataaaataaaaaaataaaaaaattatcgagaatggaatattgaaatgaagtattgttgttgaattgtgtatttcttttttttttttgaaatggagtttcgctctgtcacccaggtcggagtgcagtggtgtgatctctgctcactgcaacctctgcctcccggttcaagcgattcttctgcctcagtctcccaagtagctgggaccacaggcgtgtaccaccacgcctggctaatttttgtattgttagtagagacggggcttcgccatgttggccaggctgatcttgaactcctgacctcaagtgatctgcctgcctcgacctcccaaagtgctggggttacaggcatgagccacgtgtctgcccccgtttttttttttttgtgttttttttttgagacagagtctcactctgtcacccaggctggatagcagtgctaggattacaagtgtgagccaccatgcccatttccccatattttgatagcagcagttagtgtactcacatttaatataattattagtgtggttgcgttcatatctgctattttgttatttgttttctgtatgtatcatgaattttttggttctttgtcctcctttactgtcttttgtgttaaataaatattttttacgtactatattaattcttctgttgatttgattaattcttctgtatatttttagtttttttgtttgtttgtttgttttttgagatggagttttgctcttgtcgcccaggctagagtgcaatggcacgatctcggctccctgcaacctccatctccctggttcaagcaattctcctgcctcagcctcccgagtagctgggatcacaggcgcgtgccaccatacctggctaatttttgtatttttggtagtgacagggtttcaccatattggtcaggctgatctctaattcctgacctcaagtgatcctcccgcctcggcctcccaaagtgctaggattacaggcatgagccactgcacccagccttcagttattttctttttcttttcttttttttttttgagacagagtctagttttgtcgcccaggctggagtgcattgacatgattttggcttactgcaacctctctctcccgagttcaagcrattctcctgcctcagcctcccgagtagctggtatttcaggcatgcaccaccacacccagctaatttttgtattttcagtagagacggggtttcgccgtgttggccaggctggtctcgatctcttgacctcgtgatccgcccacctcagcctcccaaagtgttgggattacaggcatgagccaccacacctggtcaatctcttcttacttgtgattctatttccaaaaaagatcatgtacacatgtaccagaagttaggacttgaacatatcttttggggggacataattcgacccacaacagttgctgtagggattactgtatgtatcttatcattgtgtactttagattaatactcatttaattccagtaaaatatagaggctttgctccaatatagatccacttccaccccttccccatgttcttattgtcatacatattacacctgcgcatgttataaatctgataacgcagtgttataattgttacttacacagttgcttacaccaagtataagcatcttttctcttgttaacaaaaaataaaaatatcagacaatattcatgttagaactacactcatttttcagctgaaaccatactcttttttctttttttgagatggcgtcttgctctgtcgcccaggctggagtgcagtggtgcaatctcggcttaccgcaatctccacctcccgggttcaagcaattctgcctcagcctcccgagtagctgggactacaggcacacgtcaccatgcccagctaattttttgtgtgtgtattttagtagagatggggtttcaccatgttgcccaggctggttgcaaactcctgagctcaggcagtctgcccgccttggcctcccaaagtgctgggattacaggtgtgagctactacgcccggcccaaccatactcatttttcaattagctatggatacaagaattcagcaaaaatcaacataggcattctgtgagaatccattgacttatgcaatttactataaagagtattgtgcattttactgttatttgtaaattgtgtgctacatactgctgtatcagtaatattcgtatgtacttgtgtacatgggtacctcggttttggggagcgaatggttaaacatccgccagcacatcactgcatgctgccctgttactccagaaaggctgcgtttgcactcatcagtgctgtatgagagttccttttttcttgtaccaacacaaaatgttcattctccttatttcatcttttgtcaatatgaggcaaaaaacaacgtaatctcaatttgcttccagtgtatttcgtggccatttgtatttctctcttgggacatcacccacttctttctttggatattcatagtgtgtggttttttttaaattaatgatttatggacagtcttttatattaaaggattaacccattacttgccatgtgttgcaactggttttttccagtttgtaacttgttttctttcacttttatttatattgtcacttttcgccaattagaaattttaatagatttaagttttttttccagtagggtgaaatttaccagtgtgttggtctattttttgagatggagtctttgtcacccaggytagagtgcagtggcacgatctcagctcactgcagcctccacctcctgggctcaagcagtcctcccacctcagcatcccgagaagctgggactgcaggcacgtgccaacacgcccagctaatttttgtattttaagtagagatagggttttgccacgtaagccaggctggtctcaaactcctgaccacaggtgatctgcctgcctcggcctcccaaagtgctgggacgtgagccaccacgcccagccaccagtgttctgttttctacctgaagtatttatttaagagaaacaggccatattccaggattatgaaaatatctacttatgaagactgaaacttcaaggatcatttgtttagtttgttactagagaagtttctctgaacatatgagtaccaaaaaaaaaatactgacttatgtttcttaataatattagttcttgtgggaaggtgagctcgaggaaagaagggatattctttatttgttttttcaaactttaaaagtttttaggctgggcatggtggctcacgcctgtaatcccggcactttgggaggccgaggcgggcggatcatgaggtaaagagatcgagaccatccttgccaatatggtgaaaccccatccctactaaaaatacaaaaattagctgggcgaggtagcacaggcctgtagtcccagctgctggggaggctgaggcaggagaattgcttgaacccgggagttggaggttgcagtgagccgagatcaggccactgcactccagcctggcgacagagtgagactccatctcaaaaaaaaaaaaaagtttttaattcatttacccactaagtatactgagcaacaactatattgttcactaagtatataccagacgtacagtagtggctcagtatagttagtgaacaaatgaattaaaaaattgtaaaggtctccagtgttttcagtatgtattcattatctactccacatatagtaatagtttgctggaaattttatcacagaacatgtgacatgtttgttattctttaaatgttacactgcaaatatttgtggaatattgtactgatgtagaaatgatctcatataagtacaattagaaaactatagttttcaagtgtttttgtttatggctttggaggaggggagctcctgagcaaatttttaacagtgaataattgtctaaaatttaaatgaagtcttttttttgtttgtttgttacagggtctagctctgttgtccaggctgcagtacagtggtacaatcttggctcactgcagcctggctctccagggcttaagcgatcctgccacctcagccttcagagtagctaagactacaggtgcacaccaccatgcctagctagttttgttttttttatagagctaagrtttcattatgttgcctaggctggtctcaaactcctgaactcaagcagtcctcccaccttggcctctcagggtgctgggattacaggcttgagccactgcacccagcctaaacgamatcttaattatgtcaagacctgacatggttatttggatagctaatttgtttttctaatgtctttttttttccaacagttcactttatccaaatgcatagatgccgtgatggtgctgggaaattcgcatttattcatgaatcgttccaacaaacttgctgtgatagcaagtcacattcaagaaaggtatgaccattgtgattgcytttgctcttcagtgcttaatattcatgagttttctgtgccagttggcatgtattgttcctactccatgttgcaaaagaaaatgttttctgtaccagtgaacagccacagcaccaagagccagtacatgtacattgtgatatccatgaaatttgcaaaccttattattagtagatagtagagttacacaatggcccatgtaatttgcacagattgaactatattatttaggcaaaaagggaaagagagctatcaaatcggacagctactttccctcacctgtcttcccattttgtgtctgccccagcgtgcaagttagatgggagatgtgattctgttttcctttagctctgcgtagttctcatggcctgtttccctgctctgtgagtgaacctggtgctttgaaataaggatttttcttataacgttggcttctaaacccaagccaactactccatctggtgcttggcagaagaaacagtggtcgcttctaacactagtgtgaaaactggctgtgttagactcactgcaagatggtgcatagcctgcagctgatgtgtaaatgtgaccgcagatacagcaaagtttttgtgaataatttgggccatatttacttctcacattatgcactgacagaagagttgaattaccatgtaagacacagctcttctatgtcttttttttttttttttttggagacaggatcttgctctgtcacccaggctagagtgcagtggcactatcatgggtcactgtagcgtctgaccttctggacataagtgactggacctcctgcctcagtctcccaagtagctgggactacaggtgtgcaccaccacactcagctaatttttgtattttttgtagagatggggtctcactatgttgcccaggctggccttgctctcctgggctcaagcagtcctttcaccccagcctccccaagtgctgggactgcagggatgagccactacacctggctcttctatgtcttaatcaccacattacaatagaagtgactcttgctcaccaacatatttcatatggtagctgtcagattttcttggttcttagggctgcctgcttcctctggtgaggtgagagagcccatgggccaccaaacacatactcttactcccatcctcgctgcatattttttctcagaattggatgaaaagatgatattagtttggttaaaataccagtaaaaactatacctgtcaaagttttttttttttttttttaatcaaaggtatcctctacctgattatcttaaaagtcacaaggccatggctgggtgcggtggctcatgtctgtaatcccagcactttgggaggccgaggcgggcggatcacgagatcaggagatcaggaccatcctggctaacatggtgaaaccccgtttctactaaaaatacaaaaaaaattagccgggcatggtggcgggcacctgtagtcccagctactcgttaggctgaggcaggagaatgtcgtgaacccgggaggtggagcttgcagtgagccgaggtcgtgccactgcactgcagcctgggcgacagagcaagaccctgtctcaaaaaaaaaaaaaaaaaaaagtcacgamgtcacgaggccgggctcggtggctcacgcctgtaatcycagcacttcaggaagctgaggcagattacttgaggtcagtttgagaccagccatacatagcagccaacatagtgaaaccccatctctactaaaaatacaaaaaattagctggacgtggtggtacactcctgtaattccagctacttgggaggctgaggcacgagaatcacttgagcccgggaggtggaagttgcagtgagctgagactgcaccactgcactccagcctgggcgacacagcgagactgtgtctcaaaaaaaaaaagagtcatgaatcactgggagaatcttttcagggacctttgggccagatttttattactgggatagatatgtacctcaaataataaactagtagtgagttagaatttggtatgaacctgttgtggttgtcatttgagaaaggaaggcacgggcacccctctgcagcatttctgagattataacccaacgccctctgtatttccccacacttttcagaaaacactggaatcagtaaaacattctgtggtgatagacaaatgttggccagtttgcctattttatacattttttctttgtttttatacgctttttctaattttatcttacacattttttttaaaaaatgaaatttaccgtggaatcttgtgagtcccacattgttgtaattttgtttgttgcctctgctgaatttcattctgatcatgagtgagcctgggcggtgaggcctggtgtaaccaggttttttcccctgctgtttcagccgattcttatatcctggaaagaatggcagacttggagacttcttcggagaccctggcaaccctcctgaatttaatccctctgggagtaaagatggaaaatacgaacttttaacctcagcaaatgaagttattgttgaagagattaaagatctaatgaccaaaagtaacaacttttaaacattgttattttgcaaatagtgttgattttggaggtcctttaggctttaagttcaaagatgtgaggttctttatgttgtatgcctgcacgttctcactttttaaaaatcattttcgtcaaagttggttcattatttgcctagcctctacagcatttgacgctgctgagcagcctttacttctggaaacacgacttttggcttctacgaatgccctgtgacctgtttttcctcttttcttgaaacattatttcatagtctctatttctggcttttccttcatcttgtctcttaaaatatgtttttaattcggcacatgattttcatcttttctccctctatatgttctcatccacttttgcctttaattatcttttacatatggacactttccaactttgtttctaacccagactttctttcatgctcaaatgcctccatttcagcgtcccacagtctctggacatggcccaggctagtctcattatctttgctctcactcacaccaccatttccattccctatttctgtcagctcccatccaagtagttttctaaacttaaagctttcatttttaactcctgctcacatccgacatctaatcagctacaaaatcctagtcgtttagcctcagaagtgtctccagaatcccgctccttattgtcatctttttatttttcatttttaaaatttttatagggacggggtctcactatgttgcccaggctggtcttgaactcctgggctcaagctatcctcctgcttctgcctcccagagtgctgggattacaggcaggagccaccacacccagcccccatccctattgtcatctcttttttttgagatggagttttgctcttgttgcccaggctggagtgcaatggcacgtgatctcagctcactgcaacctccgcctcccgggttcaagagattctcctgcctcagcctcccaagtagctgggattataggcacgtaccaccatgcctgactaatttttaatatttttagtagagatggggtttcaccatgttggccaggcttgtctccaactcctgacctcagttgatccacccaactcggccttccaaagggctggaattacaggtgtgagccaccacacccaggccccatcccttattgtcatcttgatcggcctcagcattattgacattttggtctggataattctttgttgtggcagctgtcctatgcgttgtaggatgtttagcagcatttctggccttgggccattagacaccataatatcccccagttgtgacaaccagatatgtctgtagacatagccagatgccccctgtagggcacattcaccccacgtttagagccactgctctagattgttatagcctctaactggttttctgactcctgtctccccagtcaagcctttgcactcagcctccagagttatcatcttaaaaatcaaagctgccattcctgggcttataggcctttcctggctccctgctgcctgcaggtgatggtttccaaaccttagcctgaatcagaatcacctgggggaaaagacaattctgtggagacagaaagttggttagtggttgcccagagctgggcagagactggggagtgattgcaaatgggcccaaatgatcttttagggtaatggagactgttctaaaattggattgtgatgatgattgcataattgtaaatttactaaaaataattgaattgcatacccaaaagtacttttagaccagaatttatggtttgtacattataaacctgttaaaaaatcagctggaaggcttgttgaaacagtgtcaggccccactcagtttctgattcactggatctagggaggtcctgagaatttctatttctattacagtgccaggtggtgcccctatagctggttccagaatctcaccttgagagtcactggcctccaggattaagtctcagctcagcttcacagtatagtgytcaagaccttttctggtctgacctcacccatgaggtgtcagttctcctggaccagctctaagctggcttgcacagagtgtcaatctgagctccttgccctcttgaactgcagttttagggttttgatatcttgagtgacttttttcacccaaggcaccaaacaagtggcaaactcctccctgcttctcatggctcgaggaaagagcttctccagtcttccccgcactggctgagcacggagagtgatgggaaggaggggatggtgggagagggagggcaagggggcctcagagccttgtaccctgtccaggctgctagacttatgcgtgacrttttgtaccacatagatcatgaataaactggaacctttccaagtaaaaacgggatctttttgtgtgtgtatgtatggtaaagtacaaataacaaaatttgccattttaccgatttttagaatttttaatgtaaaatttacttaccataaaatttaccattttgacaatatttaagtgtacagttcagtaatgttgagtatattcgccttcttttgcaatcatcaccgccatccatcgccagaactttttcatctttacaaactgaaattctgtacccattagacactaactccctgttccccctgccctctggctagcccctgaacaaccaccaggatgttttacattgagaaaaggttaaaaagttgcttagttaaccattaccaagaacacattgctatgtttttaaacctagtttgaaaatgtcttgtttgatttcatttatgaagaatgctttggtgtgaaagcatacttagttcaataaagcacccaatgattttagttcaagaaagtacttaaaaattcccttttaatgttttctgttatttgcaggtgacataaagggtcaacatacagaaactttgctggcaggatccctggccaaagccctttgctgtatccttggtgtctgaatcatttagaaggtgtcttctgtaataaacatatcttaacttgtgacatttcttaggaccttgggtgcccattactgggacatgtgagtactctgaagtggagggtaattttttaaaaaatagtttacattggctttgaatttttttttctttttttgagacagtctcactctgtcgcccaagttggagtgcagtggcacaatctcggctcactgcaaccttcgcctcccagattcaagcagttctcttgcttcagcctcccaagtagctggtacaggcacccgccatcactcccggctaattttttttgtatttttagtagagatgtagtttcaccaagttagccaggctggtctctaactcctgacttcaagtgatccacccacctcggcctctcaaagtgctgggattacaggccacagtgtgtggctggctttgaaatgtttattaagacaagctgtaaaggccgggcgtggtggctcatgcctgtaatcccagcactttgggaggccgaggcaggcggatcatgaggtcaggaaatcaagaccatcctggctgacacagtgaaaccccgtctctactaaaaatacaaaaaaattagctgggcgtggtggcggacacttgtagtcccagctactagggaggctgaggcaggagaatagcgtgaacctgggaggcagagcttgcagtgagctgaaatcgcaccactgcactccagcctgggcgacaaagcgagactacatctcaaaaaaaaaaaaaagaaaaaaagataagctgtaaaaactggaagtggggaagagtgagaaaactctagcttctccattatgtctttctgccttcaggaaacactgcttcagggtgctttcttgtttcttattttgataaattcagactttttaaacattttcattttcttcttgacttgggaacagtgtttgatttttaaaagccatttaggagccctgaagcttaataaatgagtggctycttctccataggtgaacgggttgttttgcatagggcaataccttttcattttatctgtgtgacgttttctcagtcttatggcattaattttttggaggaggggcagtattgagtgattattttgtcctggagtttgatgtgggttgcctgaacatatttgtaaatcagtacttgtcccaggattcaaatttaggacatggtaggtaagaataggacagtcaagtgttgggaattttaattttctgggacagagattatattttggtgagattacaaagtccagttgactgcagagttaggaactgaaaacccccaatcactcttgtgtatttatcttggtgagtggagcatttcccttcttagctaggtagatgctgggtttatttaaaattggaggttatttttctttttactataaatatttatgaagcaaaataatatttttgtattccttaatgttaagaaattaagacattcatagaatgaacaaggaagttaaaggtaagagcctacgttttcctatgagaactgtaatcctacttattttactagtatttctttactagactgtttaaaaattggttaggaaaccatatatgattagtaagatttagttaaatttttttctgcttttttctctttgtagacaatcaggaaatgaaatcaaggatattggtaagataaaaaaatcattacttttttatatgacaactataattagaaaacataacgggagaccaggtgtggtggctcacacctgttatcccagcactttgggaggccgaggtgggcagatcacttgaggtcaggagttcgggaccagcctggccaacatggtgaaaccccgtctctactcaaaatacaaaaattagctgggygtggtggtgcatgcctatagtcccagctacttgggatcccgaggcaggagaatcgtttgaacctgggaggcagaggttgcagtgagctggaggttgcagtgagccgagatcacaccactgcactctagcctgggtgacagagtgagactccgtctcaaaaagaaaaaaaaaagaaaacataatgggaaataaaacgcatttatagtaggagcaaaaaatgttaactatccaggattcatttaacaagcaatgtgtaaaactgatgataaggaaaactaaaattctgagagcgatagaagaataagtggagagccatattttgttcttggatgtcagttttcccaaaatcacactgtaaattcaatttacaatctcagtcagaatatcagggaggtttttttttttcctggcagggtggggagatttaaaaaagaaattcaaggctgagcacggtggctcactcctgtaatcccaacactttgggaggccaaggcgggtggatcacgaggtcaggagatcgaaaccaacctggctaacatggtgaaaccccgtctctagtacaaatacaaaaaatgtcgtgggcgcctgtagtcccagctactcgggaggctgaggcaggagaatggcgtgaacccaggaggcagaggttgcagtgagccgagattgcgccactgcactccagcctgggcaacagagcgagactctgtctcaaaaaaaaaaaaaagaagtgccaagtaacgagatattcattgtttgttgcttagcacaaatgaaaaagctggcagttcccagggttgatggtgatgttggggattgcttattctcatgggttgctgataggaggataaattggtaaaaatyttttctggggtgcattttggtaatctgtgtcaaaattaaatgttcatatactttagtaatcactgcttattttccggaggtaattagagagctgtgcagatggtatatgagggtatcatcagggtattgtttaaaactgagaactggaaactgcttaaatagtggaaatttatgaagtccgcaaggagcatagtatatattataattcattgacattagaatattttttcccacatatattgtggactgaaaaagcaggttgcagaatgctaagtaatcatcttgatacgtgtgagtgtgtgtattttggatgtgtgtgtattctggatgtgtgtatgtgtgtatattttggatgtgtgtgtgttttgggtgtgtgtatgtatttggggtgtgtttgtgtgttttgggtgtattttgggtttgtgtttgttttatgtgtgtatttggggtgtgtatattttgggggggtgtattttggggggtatgttttggatgtgtattttttggggctgtgtatttggttgtgtgtgtgtgttgggtgtgtgtatttagtggtgtgtgtacttttggggtacgtgtattttggttgtgtgtgtgtgtattttgggtgtacttacctgtgtattttgggtgtatgtccgtgtgtgtattttgtatatgtgtgtgttttgggtgtatgtgtatttggggtgtgtgtatttggggtatgggtgtattttgggtgtgtattttggagtgtgtgtatttttgggtgtgtgtgtgtattttgggggtgcatgtgtgtattttgggtgggtaggtgtgtgtattttgggggcgtgtgtgtattttgggtatatgtgcgtatgtgtttattttgtgtatgtgtgtgtttgtgttttgggtgtgcatgtatatacctgcccatgtaggtgctctccagaatgagttcatcaaaccgttacgtggagcgggatttcgggggaaatgttactgtcatctttatactttaggtatcatttaacaatgataaatgggaagacaaactggaataatgttggttgtggttcgcagtatattgtgtgacattggtgtgagaggactggcatgtgcctgggtggaattaacatgactgtgatttttaggtgattaaggctgcagaagacagtgcgttgcagtatatgaacttcatgaatgtcatctttgcagcacagaaacaggtgaactgagagcctgccgtttaaagtatttgtttcataacgaaggagtcartttcattttttgaatgctctactctgaggtattctgactacgtaggcttatgaatgggcaaggaatccagaatctgtattatgttctagtcttttctctattttgggtcctggaccacttgagaatctgatgcattcccaaaacaatatgcactcaaccacagttttgcatagagtttcatggtattcaggtaacctttagcccatccttggaccccatgccaagaatccctggtttgacagtttgctgtataaaccttgcatcagtttctttatcttgttgctgtggcgaagctgtaaaaattcagtatttttactttgcaaagagctgaaatgttcagatgaagtataatacattttcttctttggtgtgtttatgaagaaagaaaacctccttaaaatttcagttttaatgtaaaatgctgctatagccatgcataatgttctctgttgtggagtggcagcatgatgtagtgaaaagagcctggactttggagacatgccgagtggggtgacagctttctcacccgctggctctgtgaccacagcccagccatgtcctgggtgcttcagctgccaaatgcaaatatctgccgtgcagagtcacgttgcatattgagtgagctattttaagcatagagtatggcatgtagtaggttctcagtatagggtaatcattattgttattattcctgtaatattttcaaaatgtttcttttagaatattttgattgatgcctgtgttttagactccgactcagggctcctccaacaggtatgttttaaaaccatgctttgtgtcggtggttatgacaattagtgatttttatattgattacaatttaaaatgaaagctttgggtatattgggttaaataaaatatgttattcagcctaattttatctatgtctttccsccttacgtatggagctactggaaaattttaaattacatattgcttgcgttatatttccgttgggcagcactaaaagacaaaaactgaattttactttaacccgaaagggaaacaaaaccctaaagtaagtctgaagaaattactgagtttttgttagatgttttttggccacaaatgttgtttcctaaaggatcagttacaagcacaaaactatgacaaaccctgaatttaggttactgctggggatgaaggatggggagagcgaggtccaatgggaaaatttacatgcttcaaaggctctgagattgtactgtttcttcagcttgatcgtaggtatatgatgttcattttattatttaaaccatacttacacattatgtatacagactcttgtacatattatatttcagtagtaaaaattcaaaaagtttgaattcattttttagcaacacatttcagtctacacattgtctattaactccaagacgatcttgtctctgccatgaattcacataccagctctacctcctcagccctcacattcatttttctagtccagtcccagactctcctgagttccagacttgcagaatcagccgtgtacgtagtacctcctcttggacgtctggcaggcatcttcagtgtcatgtgtcaaaagcagagagctcttggtttgtcctctcagcctcttcctgctccactggtagccccatctccctaagtggcagtgcagttcactcagcaactcaagcaaaaacctgactcttccttgtctcttctcttccctcctttcataaccatgagcaaatcctgttgattctgcctttaaaatatatcctggctgagctcrgtggctcatgcctataatctcagcacttgggaggctcaggcgggtggatggcttgagctcagaagtttaagaccagcctgggcaacatggcgagacaccatctctataaacaatacaaaaaaattagcctatcatggtggtgcacgcctgtagtctcagctgttcgggaggtggaggcaggaggattgcttgagccaggagttcgaagctgcagtcagctacgatcatgccactgcactccagggaaaccctgtctccctcttaagaaaaaaaaatgtgaaagttggttctcagaacagctgtcagaatgaagctttcaaaatacaagattggtgcaaaagtaattgtggtttttgccttttttttttttaacagtaaacactgcagttacttttgcaccaacctaatataaattagaacctgttgctcacttgcttaaaaccctcccatagcctagcatcatacgttgactaaaacccagagtcagggcctgccagggccttccagatgctgcttgctgaggctcctgggaaccttttgccccgcatcttccacactctccctcttcagtccggccccaccgcccccttgctattgcctgaaacaggcctgcttcggccagaggggcgctgcactttctgttctctctgctcgcaagctcttcccgcaggtgtttgcatggcctactccctgcctgccttcacgtctctacttctgtgccacctcctcagagaagccttccctgaccaccattgttagtgttactccctctccccttagcctactttatttttcttcatagaaatgatcataacctataacattatttttgcatttacttacctgatttactctctgccttctccactagaaccttaacttcatgaggatggacactgtgatgtttactgctgtaaccctgcacagtgctctaaaacagttgttaaatgtgtaaatgaatctaacggaccaactgaaccaggactgtactatcagaggagcctcagggtcctaggatcggagctagggttttcagtgtaaatggaagcactgctgtgttaaagcgagaaagctgtgtttatgaaatgaatagatgaatgattgttgggaaaaactattaacatggacaggaaaccttagtgtcagcaaccaggagagcttgagtgttttgtgtctttggaaaactctgaagatagcaaaagtttggaaaaagaggaccaaattcaaaagagttttatttttattttattttattttatttttagacagagtcttgctcttgcccaggctggaatgcagtggcatgatcatggctcactgcagccttatcctccccagctcaaatgatcttcccactcagtctsccaagtatctgggaccactggcatgcactacaatgcctggctaattttttaattttttgagacagtttcactcttgttgcccaggctggagtgcaatggtacgatctcggtgcactgaaaccccaactcctgggttcaagcgattctcctgcctcagcctcccaagcggctgggattacaggtgcccgccactacgcccagctaatttttgtatttttagtagagacagggttttatactctattggttaggctggtatcgaactcctgacctcaagtgatccgcgattacaggcgtgagccaccgcgcccggcctaattttttaaatttattgtagagacagggtttcactatgttgctcaggctggtcttgaattcctgggctcaaacagtcctgaagccttggcctcccaaagtgctgggattacaggcatgagccactgcacctggacaaaaaagtgttatttcttaaagagaacagaataaagccatctcacagtttctttttacataataaaattaacaaaatacaatgaaaacaaatctcataaaaattaaaaatttttgtgcttccaagggcactatcaagaaagtaaaaagacaactgggagagatatttgcaaatgatgtatctgataaagggactagtattctgattatataaagaactcttaaaattcaaaaataagacaaataactcatttcaaagtgggccaaggattgaacagctatttctccaaagatctgcaaatggccaagaagcacatgaaaagatgcttaatatcattaccgaccagggaagtgcaaatcaaaaccacaatgagctattacttcactccactaggacacatgtaatcaaaaagtcagctaataataaatattggtgaggatatagagaaattggatccctcctacattgctgctggaaatgtaaaatggtatagccacttcaggaaacagttcagaacttcctcgaaaagttaagcatagaattaccatgtgactggggaaaccccgtctctactaaaaatacaaaaattagccaggcatggtggcgcatgcctgtaatcccagttactggggaagctgaggcaggagaatcacttgaacccaggaggcagaggttggagtaagccgagattgtgccactgcactccagcctgggcgacagagcaagactctgtcaaaatataaaaataaaaataaaataataataatctgcagtgtcatatcctcctctgattttgtaggcccaaggcattgctcatgagaacctcattcctctggaaaccctaggtaagtgcgagtttggcagcaagccgcctgtgtcttgcaggcttgtgacatcacgggaggactgtacctgaaggtgcctcagatgccttctcttctgcagtatttgctggtaaggagacagcagcggcgaccctgatgcctggagggaaggatgacctctgtgtcctgggaaaggaatggaagcaagatggctggtgctagtactcaggagaagggaataaatggaggccttggagttccaaggcctagaagggtgggcttcatgttatttttttcccatgttttaaataaaagtttcttttgtttgtttgttttacagtgggtgtttcttcccgatcaagatcagagatctcagttaatcctcccacccccrgttcatgttgactacagggctgcttgcttctgtcatcgaaatctcattgaaattggttatgtctgttctgtgtgtttgtcaagtaagttaatgtacctagtttttcttttttttctatgttggggggcaggaaaacagtttctcagctgtgttgtttttcagccaccctattgtttctttttttttttaatttacagtattctgcaatttcagccccatttgtactacgtgcgagtaagtatctttgagattgtgtgggtggctaatacttcacagctctagaacattaaaaaatgttttcctctctgtaatttcaggacagcctttaaaatttctctgcctccagtgctgaaagccaagaaaaagaaactgaaagtgtctgcctgaggataaaatattttccccatcttttagagctgttaatagaaattatatagcagattctttgttgggaagactgaaaaaaataaagataggtataggataatttttaatatggtgaccttacagaaaatatttcccaaacatccttttcatcctgtgcttctggaggactgatttgtttgagggaatcattctatgcattatatcctaaaatattctatgactggtttctgtccatgtttgtggctttcatttttttaatgggatgactattagtcaaagtcagcttgtcatgactcatcataggctttctaacctactccctgaatccgggtcctcattgtgaaatgcatgccatacgaaatttgaacgtagctttggaaaaagggactatttgtggagtaatggcattaatcaacatagaacatcttatttgaatcaacagttaacttcagtagtcatgtgaataaaattcttattgtctaaattgagacagcctcagatatttgcagatatttactttttgtctgatatcagtacatatttggacaaagtcatctaaataatagtttgtcaccaaataactacaaaatctcattttaaatgagtaaggagaacgtgtacagaagcaaattttcttcaaaatagttgtgggaagagcttatatgtgaaagcttatgactggttttgagggagaacttactggagaaaatggactctatgttaagtatggttttcagatagaattctttccttttttaatgaggaaaaaaaatccacattaatattgaaactgcacctgtaatcccagcactttgggaggctgaggacagaggattgcttgagcccaggagttcgagagcagcctgggcagcaaagtgagaccccatctctactaaaaatttaaatgtatttatyaaaactgttctctagaagctttggactgaatcccaaaagtgtttataagttcaaaagcaaaagtatttgtaatttcaacaacaaaaaatgtatttctttatgtaatcttgaaattattaaaagtccttttagcttctagcacatatttgtacaaagagtttaaggaatggtggctggtttggtttgttttttaaaaatgtttactgacgaggccgggcgtggtggctcacccctgcaatcccagcactttgggaggccgaggcaggcagatcacaaggtcaggagttcaagatcagcctggccagtatggtgaaaccctgtctctactaaaaatagaaaaattagccatgcgaagtagcaggtgcctgtagttccagctactcgggaggctgaggcaagagaattgcttgaatccaggaggcagaggttgcagtgagccaagatagcgcctctgtactccagcctgggtgacagagcgagactctgtatcaaaaaaaaaaaagatcgggcacgttggctcacgcctgtaatcccagcactttgggaggccaaggtgggtggatcacgaggtcaggagtgatcaggctgggtttctgttttgttttgttttgtgagacagagtctcgctctgttgcccaggctggggtgcagtggtgcaagctcggctctctgcaagctctgtctcctgggttcacgccattctcctgcctcagcctcccaagtagctgggattactactctactgaacccatgaggcagaaatttgagaccatcctgcccaacgtggtgaaaacatggtgaaaccctgtctctactaaaaatacaaaaattagctgggcgtggtggcaggtgcctgtaatcccagctactcaggagactgaggcaggagaattgcttgaacccaggaggtggaggttgcagtgagccaagatcaagattgcgccattgcactccagcctgggcgacaagaacaaaactctgtctcaaaaaaaaaaaaaaaaaaaagtctgtactgataaaacccattgtgtacaaaactttgtatgtaaggaagattttaattttctctttatacaagctgagtcatatttaaataatttgatgttggcttagataatttcagatagattttatattctggatttgtgtttttgttaacaaatatacaaagactttggtgatcactttgcaaatatttgttaatccttgagtttgagaacctgtcttttaaaaataatattttgtatactaattaagtgtaatggaaatcacaattttaagtctaggaaataaagtattatatatactttcaaacaagctagcaaggcttttattattacttttttatttgaaatatcttatatatttggttagttctgtttaacttgtttttaactgttgcccttatgagttattttatataaatttttacaataaaataatttgattttcatatttggttgaattatttcctttcattcattgtttatctcatgctcattcaactcttcttcaaatgtgtacttttaaactgcatttggtcaaatgccagacaattttttattcaactccgaagtactttaatttcaaatcttggtctgcgtgcagtggctcacgcctgtaatcccaacactttgggaggctgaggcaggaggatcacttaagcctaggagttcaagaccagcccgggcagcatggcaaaaccctgtctctaaaaaaaatataaaaattagccaggtgaggtggttcatgcctgtagtcccagctactccagaggctaaggtgggaggatcgcttgagcccaagaggcgcaggttacaatgagtcatgatcatgccactgaactccagcctgggtgacagagtgagaccctgtctctaaataaataaatgctcctggtttttgtatgttgattttgtatcctgccactttacttatttcatcagttctaatagttttttggtggtgtctaggttttttcggatataagatcgtatcatctgcaaacaaggataattttactttttcctttttaatttgaataccttttatctctttctcaggacttattgctctagctaggactttcaacactatgttgaataccagtggtgaaagtgggcatccttaccatgttccagatttcagaggaacggttttcagtttttttcctgttcagtacgatactagctgtgggtctgttatatgtggcttttgtgtgtgtgtgttgaagtatgttccttctttgcccagttttttgagggtttttatcatgaaaggatgttgaattttatcaaatgctttttgagcatccattgaaatgatcagatggcttttgttcttccttcggttgacacgatgtatcacattgattgagttgcctatgttgaaccatcctgttgaaccatccttgcatccctgggatgaatcctactgggtcatgatgaatgatttttttttttttttttcgagatggagtttcgctcttgtcacccaggctggtgtgcaatggtgtgatatcagctcactgcaacctctgccttcctggttcaaacgatttccctgcctcagcctcccaagtagcggggattacaggtgcctgccaccatgcccagctaatttttttggatttttagtagagactgggtttcaccatgttggccaggctggtcttgaactcctgacctcaggtgatccacctgctttggcctccacaagtgctgggattacaggcatgagccaccacacctgattgaattatctgttttttttttggtttgttttttttttgtattgagatggagtcttgctctgtcactcatgctggagtgcagtggcctgatcacggttcactgcaacctctgccacctgggttccagcgattctcctgcctcagcctcctgcgtatctgagattataggtatgcgccaccatgcccggctaatttttttgtattattagtagagacggggtttcaccatgttggccatgctggtctcgaactcctgacctcaagtgatccacccaccttggcctcccaaagtgctgggattacaggtgtgagccaccatgcccggcctgaatgatctttttaatgtgttgttgaagttggtttgctggtgttttgttgaggattttgcatcaatgttcatcggagatattggtctgtagttcttttgttgttgttgttgttttttttttgagacagagtcttactctgttacccaggctggagtacagtggcacgatctccactcactgtaacctctgcctcccagatttaagtgatcctcccgcctcagcctcccaagtagctgggagtacaagcatgcgccaccacactcggctaatttttgtatttttagtagagacggggttttgccatgttggccaggctggtcccgaactcctgacctcaagtgtccactacctcagcctcccaaagtgtcaggattacaggcgtgagccactgcgccctgctggttttccaatttattggcatatagttgctcatagtagtctctaatgatcctttgaatttctgtgatatcagttgtaatgtcttcttcatctctgattttacttatttgggtcttttttttcttagtctggctaaaggtttgtcaattttcttcttttcaaaaaaccagcttttcattttgttgatcttctgaattttttaacttgtagtttcatttatttctgctcttgctctttattatttcttttcttttcttttttgtgacggagtcttggcgctgtcccccaggctggagtggagtggcacaatctcggctcactgcaacctctgcctcctgggttcaagcgattctcctgcctcagcctcccaagtagctggaactacaggcatgtgccaccatgtctggctaatttttgtatttttagtagagatggggtttcaccatgttggccaggctggttatgaactcctgacctcaggtgatccacctgccttggtctcccaaagtgctgggattatagacgtgagccaccatattatttcttttctaatattaactttggatttggtttactcttttctagttctttaagaagcatcattaggttgtttatttgaagtttttctacttttttgataaaggtacttactgctataaggtctcctcttagtactgcttttgctgtattccataggttttggtatgttgtttttccattttcgtgtgtttcaaggagtttttaaattttccctcttaatggccgggcgcagtggctcgtgcctataatcccagcacttggggaggtcgaggtgggcggatcacaaggtcaagaaaatgagaccatcctggccaacatggtgaaaccccatctctagtaaaaatacaaaaaattagctgggcgtggtagcgggtacctgtagtcccagctactcaggaggctgaggcaggagaattgcttgaacccgggaggcggaggttgcagtgagctgagatcgtgtcactgcactccagcctggtgacagagcaagactctgtctcaaaaaaaaaaaaaaaaaaaatccaactcttaatttcttcattgacctactgatcattcagcagcatgctgtttaatttccttgtgtttgtatactttccaaagttcctcttgttattgatttctgattttattccattgtgatcagagaagatgcttgatctggggctgggcatggtggctcatgcctgtaatccctgcactttgggaaaccgggtgggtggatcacctgaggtcaggagttcaagaccagcctgcccaacatggtgaaaccctgtctctactaaaaatataaagattagctgggcgtggtggtgcacacctgtaatcctagctactcaggaggctgaggcaggagagtcgcttgaacctgggaggcggaggttgcagtgagccaagaccgtgccattggactccagcctgggggacaagagtgagactccatctcaagaaaaaaaaaaaagagagagatgcttgttcttcttattattttttttttgtaaagacttgtgacctaacatatgatctattcttgacgatgattcatgtgcttagaagaatgtattctatagccattagatgaaatgttccataaatatctattaggtccatttggtctatagtgcaaattaggtctgatgtttccttgttgattttctgtctggataatctgtccaatgctgaaagtgggaggttgaagtctccaactgttattgtactggggtctatctctttctttagccctaataatatttgctttatatatctgaatgcttcagtattggctgcatatatgtttacaatagttatattctcttgctgagcctcttattatataatgaccttctttaccactttttttttttttttttgagacagagtctcactctgtcacccaggatggagtgcagtggcatgatctcagctcattgcaacctccacctcccgggttcaagtgattctcccacctcagtctcccgagtagctgcaattacaggcacctgccaccacgaccagctaatttttttttttttttttttttaggcagagtctcgctctgtcgcccaggctggagtgcagtggtgtgttctcagctcactgcaagctctgcctcccgggttcacgccattctcctgcctcagcctcccaagtagctgggactacaggcacctgccaccatgcccagctaatttttttgtatttttagtaaagatgaggtttcaccatgttagccaggatggtctcagtttcctgacctcgtgatcctcccacctcggcctcccaaagtgctgggattacaggcatgagccaccgagcccagcctaatatttgtatttttaatagagatgggttttcgccatgttggctaggcttgtcttgaactcctgacctcagatgatccactcaccttggcctcccgaagtgctcggattgcaggtgtgagccactgcgcctggcctcttttttttctttttctgtggagatagcatcttgctgtattgtccaggctggtcttgaactcctgggctcaagcaactcctgggttcctcttgcctcggcctcccaaagtgttgggattacaggcatgagccatcacacctagtcttaaaatctattttatctgatataagtatatagctacttttgctcttttttggtttccattagaatatctttttccatccctttatttttagtctatgtgtgtctttataggtgaagagtttttataggcagctaatcattaggtcttttttttttaaatctattcagccactctatgtcttttgattggagagtttagtccatttacattcaatgttattatttataagtaaggacttactactgccatttttaaatttgttttctgatcttcccttcctcccttccttccatcttcctttttatgaaagtgattttctctggtggtatgttttaatttcttgctttatatttttgtgtatctgttgtaggctttttgatatgagtttagcatgaggcttgcaaataccatcttataacccattattttaaactgatgacaactctgattgcaaaaacaagcagagaaaactaatactctaacttcatccctctgatttttaactttttgtttctacaatatttatatcttattatactatgtcttaaaaagctgtagttattatttttgataggtttgccttttagtctactactcaagatatgaatagtttacatatttgtagaggtgccaccttggtgatcttgggtacgatcttggagaattccctggatcaccgttagcagtgacgagtctgtacaggtctgcagcaactcgattcttgcctcctcagaggaaagaatttggccaagcagcataaggcagagtgagagaccaaggcaaagtttaaagcaggggtaaacgtttattaaaaagttttagagcaggaatgaaaggaagtaaagtacacttggaagagggc

SEQ ID NO: 97342 - DNA, 49088 bp, Homo sapiens
  misc_feature (1)...(49088): n = A,T,C or G
tcccaaagtgctgggattatagacgtgagccaccatattatttcttttctaatattaactttggatttggtttactcttttctagttctttaagaagcatcattaggttgtttatttgaagtttttctacttttttgataaaggtacttactgctataaggtctcctcttagtactgcttttgctgtattccataggttttggtatgttgtttttccattttcgtgtgtttcaaggagtttttaaattttccctcttaatggccgggcgcagtggctcgtgcctataatcccagcacttggggaggtcgaggtgggcggatcacaaggtcaagaaaatgagaccatcctggccaacatggtgaaaccccatctctagtaaaaatacaaaaaattagctgggcgtggtagcgggtacctgtagtcccagctactcaggaggctgaggcaggagaattgcttgaacccgggaggcggaggttgcagtgagctgagatcgtgtcactgcactccagcctggtgacagagcaagactctgtctcaaaaaaaaaaaaaaaaaaaatccaactcttaatttcttcattgacctactgatcattcagcagcatgctgtttaatttccttgtgtttgtatactttccaaagttcctcttgttattgatttctgattttattccattgtgatcagagaagatgcttgatctggggctgggcatggtggctcatgcctgtaatccctgcactttgggaaaccgggtgggtggatcacctgaggtcaggagttcaagaccagcctgcccaacatggtgaaaccctgtctctactaaaaatataaagattagctgggcgtggtggtgcacacctgtaatcctagctactcaggaggctgaggcaggagagtcgcttgaacctgggaggcggaggttgcagtgagccaagaccgtgccattggactccagcctgggggacaagagtgagactccatctcaagaaaaaaaaaaaagagagagatgcttgttcttcttattattttttttttgtaaagacttgtgacctaacatatgatctattcttgacgatgattcatgtgcttagaagaatgtattctatagccattagatgaaatgttccataaatatctattaggtccatttggtctatagtgcaaattaggtctgatgtttccttgttgattttctgtctggataatctgtccaatgctgaaagtgggaggttgaagtctccaactgttattgtactggggtctatctctttctttagccctaataatatttgctttatatatctgaatgcttcagtattggctgcatatatgtttacaatagttatattctcttgctgagcctcttattatataatgaccttctttaccactttttttttttttttttgagacagagtctcactctgtcacccaggatggagtgcagtggcatgatctcagctcattgcaacctccacctcccgggttcaagtgattctcccacctcagtctcccgagtagctgcaattacaggcacctgccaccacgaccagctaatttttttttttttttttttttaggcagagtctcgctctgtcgcccaggctggagtgcagtggtgtgttctcagctcactgcaagctctgcctcccgggttcacgccattctcctgcctcagcctcccaagtagctgggactacaggcacctgccaccatgcccagctaatttttttgtatttttagtaaagatgaggtttcaccatgttagccaggatggtctcagtttcctgacctcgtgatcctcccacctcggcctcccaaagtgctgggattacaggcatgagccaccgagcccagcctaatatttgtatttttaatagagatgggttttcgccatgttggctaggcttgtcttgaactcctgacctcagatgatccactcaccttggcctcccgaagtgctcggattgcaggtgtgagccactgcgcctggcctcttttttttctttttctgtggagatagcatcttgctgtattgtccaggctggtcttgaactcctgggctcaagcaactcctgggttcctcttgcctcggcctcccaaagtgttgggattacaggcatgagccatcacacctagtcttaaaatctattttatctgatataagtatatagctacttttgctcttttttggtttccattagaatatctttttccatccctttatttttagtctatgtgtgtctttataggtgaagagtttttataggcagctaatcattaggtcttttttttttaaatctattcagccactctatgtcttttgattggagagtttagtccatttacattcaatgttattatttataagtaaggacttactactgccatttttaaatttgttttctgatcttcccttcctcccttccttccatcttcctttttatgaaagtgattttctctggtggtatgttttaatttcttgctttatatttttgtgtatctgttgtaggctttttgatatgagtttagcatgaggcttgcaaataccatcttataacccattattttaaactgatgacaactctgattgcaaaaacaagcagagaaaactaatactctaacttcatccctctgatttttaactttttgtttctacaatatttatatcttattatactatgtcttaaaaagctgtagttattatttttgataggtttgccttttagtctactactcaagatatgaatagtttacatatttgtagaggtgccaccttggtgatcttgggtacgatcttggagaattccctggatcaccgttagcagtgacgagtctgtacaggtctgcagcaactcgattcttgcctcctcagaggaaagaatttggccaagcagcataaggcagagtgagagaccaaggcaaagtttaaagcaggggtaaacgtttattaaaaagttttagagcaggaatgaaaggaagtaaagtacacttggaagagggccaagcgggcgacttgagagattcaagtgccccgtccgacccttcactgggggtttctatacattagcatggttctgaggtttgtgccctcccttgatttttccttggggtgggctgtctgcatgtcagtggcctgccagcacttgggaggggccgcatgtgcagtgtgtttactgaagttgtgcgcatgctcatttgaggcattttcctttaccagtcgagccttcccagaggaaggttatataccagttaaaatctgccatcttgcctcttactatgtatgcatgagcctgcttgcccaactcctgagatcttatcgggaagctgctgatcaccagcttcaagtgttttctatctttttttttgagatgaagtctcactctgttgcccaggctggagtgcagtagcgcgatctcggctcactgcaacatccgacccctgggttcaagcgattctcctgcctcagcctcccgagtagctgggagtacgggcatgcgccaccacgcccagataatttttgtatttttgggtagagatgggtttctctgtgttgcccaggttggtcttgaactcctggcctcaagtgatccatgtgcctttgccacccaaagtgcagggattacaggcataagccaccaagcccggcccagaaatgttttcttttgggaggatttatctcttaatctttaccgcttggccttgccaacttaatttgcagattaattccccccaaagacagatggggaataacagaaatatttaagtgtttgacagcttcctcttagtaacgttctcctaggcttcattccaagatatcaagagaggtaaacattttgcagtcttccagagaggagctgaggtacacgggaaaagtttcatgctcatgttacaactgtagtgacccacagtttttcagggagtataagaaaaagataacacccagtgtcaggcccttataaagcctcaactttcagaatcctttcacaatgttagatttgctgatcaatgaatatataactgaacattaagagtaataatggggctgggtacggtggcccatacctgtaatcccagcacttttagaggccaaggcaggaggatcacttgagcccaggagtttgagaccagcctgggccacatggtgaaaccccgtctctataaaaaatacaaaaattagccgggtgtggtggtgtattgccagttacttgggaggctgaggtgggaggatcagctgagcccagaagtttgaggatgcagtgagctatgattgtgccactgcaccattccagcctgggtgacagagtgagaccctgtctcaaaaagaaaaaaaaaaaagactaataatggcaaacatttacttggcatttaccgtcagtcagccacaatgctgaacaccatgattgtctcagctaaaggatacaccacctctctgatagttaacaagtaactgatcattaactgagtgcttactgtatgccagccattggtttaacctcattagatatgttacctcatttcatcctcacacaatccccaaggaaggattattatcatcccttttttatagatgaggaagctgaaacttagagaggttgacttgcccaaagtcacttaacagctgagaatatctgtggagggaaggcgaaatcccatgccaggcagcctgacctcagaccctgcactctcagtccccaagccgtgacaatatttgaaatgttctgaggctactgatataagaaaaaacaatttttttccagacagaattttgattctttcacatctgtcctattgctgggcaaaacctcttgtgtgttctgtgattggatctgctttcagagtgctgagagctctgtgcaggggagaaaatccttcaaaaacctaggagaatgataataaaagcaatagtgataataaatgataatgataagaattataaaaatataaattttataaaattataacatataagtataaaatttacaaaatatatacttatataaaagataaatatatataagataaaatataaatacatatatattttataagataaataaataaataaatatatttttgagacggagtctggctctgtcgcccaggtttgagtgcagtggtgcaatcgcggctcactgcaacctccgcctcccagattcatacaattctcctgcctcagcctcctgagtagctgggataataggcgcctgccaccacgcctggctaattttttgtatttttagtagagacggggtttcaccatgttgatcaggctggtctcagactcctgacattgtgatccgcccgcctcggcctcccaaattgctgggattacaggcatgagccgccagacccggcctatatgtattttatatatatcaagtatgtatatctgatatatatatataaaacaaagtatatctattttgtaaatatatatttattttataaaaatataaaatataaataatacatcataaacgatagtaaagataataaacacagcgcggcagccccatcccctttttctactcacccctaaaacaaatccgtataaaaatcaagtttattaaggagcaagtcccaccctttttatttagaagccagtgtctataggatcgctcttggctattgttggattaattccagggtaggggaaaactccagtttttgagccggacacgcactcctgcttttcaggacctttttaattttgatgttttcaacttttaggcccaggggtccatgtacaggttgctatataggtaaattgcgtgtcacgggggttgggtgcacagattgtttcgtcacccaggtactaagtggagcaccggataggtagtttttcagccctcactctccccaccagagtcaagcagcaaaaatgctaggccttgtgggcggggccggggtgcccgctcttgccactggtccaatcacagcgcggcgttcctcctggccggccgccgattggtggttgccatagctccgggcgttcgcttgcaagatggcggcggcggggcagtggctgctgcgttttcgtgtctgagtccttcctgggttctaatgagggcgcggttctgctgtgcccggcccgcgaggtctaaggcatgggcttccagcctccggccgctcttcttttgaggcttttccttctgcagggcatcctgaggcttctgtggggggacctgggtgtgtacggcgcggcagtgacctcggtgggccggggctgaggggactgggcgttaaaagggccagacttggactcccccgggagcttcgggagtcgacaacgccaaagcaagccgccacacacaccttaggcggtgattcttccactgctaacccctccttgtcccctttccttcccgcctagctttcatccctccttttatccgaatgtccggccctgcggtcagcgcgtccctggtcggagacaccgagggtgtgaccgtgtccctggcagtgctgcaggacgaggcgggtaaagtccggccctcttttggggagggtgggggttggactggatccagacctcccaaggagcctggagaggtggcatccttggggccccctgcctctgttctctgcaaagtcgcatggggagaaaaggatcgggcggctgctgtaggccaaagaggacagacggacaggttcgaagaaagcctgaaataataatggttagcattcattgagctaacatcgtgcatcatcccattttcctagtaagaacagtaatatcttttcatcccctttgaccaaggaagaaacaagttcagagaggttgtcactgtcccagtgtcaagcagyttgtaaagggcccaatcttaggctgtaatgtgagtccatcctaggcagtctgactcaatgcaccccctgagctgctggaccttgctgcctttgcatgctggtcttctttctttaggaatattgccaattccgacgtgtggagtgctgaacaatgagacggaagactggagcgtgactgtgatccccggtgcggtaaggccagaagtaaaccttctctgtagcctgtgaagaggcccccagctagggtttctgcagtgctctctttatttaacaaggcatggctttctccatgctctcaacaatcatgaaattgtgggctgttggatctggtagacacttatccagcccacgggttccttaccctggggttaggagtccttggatgtatttcagtgggtctgtgaactctrtgaaattgtatgtaaagttctgtgtgtatgtgcatttttctgatgagagggtcaccagtttcctttagatcatcaaatgggtcagtgattcaaaaaagctttatgccaggcatcgtggctcacgcctgtactcatagcgctttgggagattgagrcgggaggattgcttgagcccaggagttccagaccagcctgtaacatagcgagacctcgtctctacaaaacaattaaaaaaaaaattaggtgggtggcgtacacctacagtcccagatacttggaggggggtggggkagctgaggcaagaggattatttgagcccaggagttcagggctgcagagagctatgatcrcaccactgcacttcatccagcctgggcaacagagcaagaccctgtctcttaaaaaaaaagaaaaagctggtcaggcgcggtggctcaygcctgtaatcctagcactttgggaggccgaggagggcggatcatctgaggtcaggagttcaagaccagtctggccaacatggtgaaacccatctctactaaaaatacaaaaattagctgggcgtgatggcgggtgcctgtaatctcagctactttggaggctgaggcaggagaatcacttgaacccgggaggcagagattgcagtgagccgagatcacgccactgcactccagcttgggtgatgagcgagactccgtctcaaaaaaaaaagcttcataaccactgatcttgcccaactctgagcttatgtgtaaggatactcaaacctggagagattaagcatcttctatttaataagtgtttattggatacctagtatatgcaacatcaattctggagagaaaaggacaggaaagacaagctctgcttgtaccccaggagtgaacatgtacatgtctaaagtcattctgggataaactgaggattgttttcattgactttttttgtgtatttactcttccactgataggatgataaagaaactaaaaaggtgtacaataaactgagtttatttatcagatctgtgtttagctttctctaagtatcccgaagttgtttgcttttatgttaaggaagaagaatcagggcttgcatgttaccataggtttatgggggggaactgaagataactgtgtcatctctgtatacatttcccttttataaaatgaacggaggctgatgtgtrcttttattgtgttttccattatgtattcttatagaccctgttttgagtcactttaaaaatacagcaatgttttcctttcagaaggtgttggaagtgacagtgaggtggaagagaggtctggactggtgttcctccaatgagacagattccttctcagagtccccctgtatcctccagacccttctggtttcagcatctcataattcatcctgttcagcacatctactcattcaagtggaaatttatgccaactcttctctgacccataatgcctcaggcaagtgaagtctttgactgtcaaaactttcatgttgttcccagctacttakgaggaagaggtaggaggattgcttgagcccgggaggttgaygctayaaatgagctgcccgggaggttaatgctacaaatgagctgtgatcgcrccactgcgttccagccagggtgacagagtgggaccctgtctcaaaaaaaaccaaaaacaaaaacaaaaaaagaaaaatttgtgtcaagcttacctgtttgattataagtgtatgccatgcaatttgtaaagtatacttcacttgagtctgtcttgcttttctaaacttatttttcttttgtttagttttcttttaagaaatttcattttgtactattttatttaacatttatttgatctttctctactgtttgcatctttataagctaccttgaatcctttttgggagaaggtgaaatttgtttatgtacattgattctctctcttttttttttgagatggagtctaagtctgtcaccaggctggagtgcagtgttgtgatctcggctcactgcaacctccacttcctgggcttaagcgattctcctgcctcagcctcccgagtagctgggactacaggctcacgctaccacgcccagctaattttgtacttttagtagagatggggtttcaccatgttggctgggatggtcttgatctcctgaccttgtgatccgcctgcctcggcctcccaaagtgctgggattacaggcgtgagccactgtgctcggcacgtgcattgattgtcatgactgcatcttaagaagaaaaaaggaagggtggccagacgcagtggctcccacactgtaagtgctttgggaggccaaggcgggggaatttcttgagcccaggagttcgagaccaacctgggcaacacagcagatactgtctctataaaaaattttaaaaagctgggcatgatggtgcctgcctgtagccctagctactagggaggctgaggtgggaggatcgcttgagcgtaggagtttgaggctgatgaagtttacatcatttccagctttttttaaartttatttttattttcattttttttagagacacggtctcactctgttacccaggctggagctagagtgcaggggcacgatcctggcttgctgcagcctcaaccttcctggttcaggcgatcctcctgccacagcctccatagtagctggggctactggcgtgcaccaccacacctggctagtttttacattttttgtagagacagggtctcactatgttagccaggctggttttgaactcctgggcccaggtgatcctcccaccatggcttcctgaagtactgggattacaggcaggagccactgcacctggtctgttcccagcttttgatgctacagcaaagatcgttatgcccrtgtacatgaatctttggacatgagaaaatggttttgtgttcatctccgtctcacatgatgttagtgttcttaaaccaaaagagctttcaactagatgtgccgatgtagagggctctgcwgtgatgagtgctactgccatgtcccctgtctccggtggcgaactctgacatctcttgcctttatggccacgtggcatggagggagaagcgttccagactttagtagcaaaagtctgttacctggagactcctttastgccgcttcccttattacatccctaactgtggtcctcctggtgcttctggaagtttaggatgataagacaagttttgacagctcctttcagcagactactgtgccctcagtgtacttgcatggaaaggcctccatgatgaatgaagtgaaaaaagcaagtgcagatggctgcctacagtgtgctatcttttgcataaaggaggcagaaatgaaaacatttgcataaagaaattctggaaggatgttggagaagctaataatgtgctaccaagttggaggatgatgtgggaacaggaaagggctgacagtgaggaattttttaatatgcttttgattttttggaaccatgcaaatgtgttacccacttaaaagttttaaatttttctatggcttaaaattcaaaacaaagccaaaaaaaccgtattcaatgatgaaaaaaaaaatccccccaaaacaacagaagggattcatgatagctgtaccattcaaagcactgacttttttcctttgagaaatatgcttgaggccaggtggtggctcatgcctgtaatcccaacacttttagaggctgaggtgagtgggccacttgagcctaggagttcaagaccagcctgggcaacatggcaaaaccctgtctctacaaacaaatactacaattagctgtgcgtggtagtcggtgcctgtagccccagctatgagggaggctgaggtcgggggatcgcttgagcccaggaggtggaggytgcagtgagccaggattgctccatgtactccagcctggtcgacagagcaagaccttgtctctaaaaaaagaccgggcgcggtggctcacgcctgtaatcccagcactttgggaggctgaggtgggcggatcacgaggtcaggagatcgagaccattctggctaacacggtgaaaccccgtctctactaaaaatacaaaaaattagccgggtatggtggcgggtgcctggagtcccagctactcgagaggctgaggcaggagaatggcgtgaactcgggaggtggagcttgcagtgagccaaggtcacaccactgcactccagcctgggtgacagagcgagactccatctaaaaaaaaaaaaaaaaaaaaaaaaaggaaaatatgcttcagtatatttaggtaatatttaatattttagaataccaaacttagaaaattgaacatctttgtatatgagtgattgagttgtcagctctgaccccatgaaggcatgaaaaattttttactcagccagccagcgattaaaactagaaaaagaatggaagcacagacaggaggtatgtgtcatacccagtaacaatgaagccagcgaacaatgtagaaaacataaatcaacacacaaacatctatttgtataacacatagtaaaaccctattctgaagtgtctcgtggctgggggtggtggctcatgtactatgcctgtaattccagcactttgggaggccaagatgggaggatcactcgagcccaggagtttgagaccagcatggacaacatagtgagaccctgtctttacagaaaatatgaacgttacctgagcatgatggtgcacacctgtggtcccagctacttgagaggctgaggtgggaggatcacttgagccctgggaggttgaggctgcagtgagctgtgattgtgccatttcacacttcagcctgggcagcagagtgagaccctgtctcaaaaaaaaatcaataaagtgccttgcttgtgtcacatgggtttgataacactgagggtcagacccttacccgtgtaacgtggtctgcgatgtggaccttctccttgttccggataccattgatgtatcattgaccttctgctatgttacaggatagaacagatcgttagttgttctttagatacttcagctattgtgtcattacagttaactgttatgtggggtttaaacaaatagttcctgcatggttttctaacgtgtaccaaatgcaaaagtaaaattcagcagaatgaaacttttatctgataaatgattggagasaaatccaaagcattactgtcactggattctgagttaggaggctgaaatgtcgtgtaacatattcctcttcaaagaggaaaacaagttcggaaacctgtaatatcctgaagagttataaacaacgggccctgccaatgtttacctttttagcatttctcctgagctgctttctctggccttgtcccattcacgcccgccaccttctcccctgcaccacagtgttccccctattcatccaccccctctgtcttccacctacagctctccagtagcccctcttacctgtacaaactcttyctttttttttaaagtatagatggggtttctccatgttggtcaggctggtctcgaactcctgacctcaggtgattcccccgccttggcctcccaaagtgctgggattacgggcctgagccactgtgcctggctrcctgtacaaactcttacgtgtgtttcaggctcagcgcattctctctctctgcaagtcttcctgacgcccagcctaagccacgtgccctccctgggttcccatggcagatccatttcagtgtttaccctttatggtcacatgatctctttacctgtctcctccctctgagagtgcgagcccctcagggaagctgttgtgtctcactgtatcatccctgcataacccagccccccatactctcgtggtcagaccacatttgtcccacctgcactrttgggtaccacagccacgaaccatgtctggacactggacagttgaaaggggatgggtcttaattgagatgtgctgtaactgttaaacagccaccagtttttgaggacttaatgtgaaacaaagaatgtggaatagctcattcataatttttacattgattgcctgttgcaatgatattattttggatacgttgggttcagtaaaatatattaagttaattttatctgtttcttttttgtagcctgggctactttttgtatttttattagagacagggtttcactatgttggccaggctggtcttgaactcctgacctcaggtgatccacccaccctggcctcccaaagtgctgggtttacaggtgtgagccaccccgcccagcctaaaatcagtacattatgtatatactaacttgtgactcttagtcaattgattatcttctagatcaactatgacttctttggttcattgtaactggcgtgttttcttatgtttgggtttttgttggagtggtagatgcaggcctcatatacttcgtggattccttaatgtcaaatatttggtaataatgatttacaaaacaagataattcagcttgcttttttttttttgacacggagtctcactgtgtcgcccaggttggagtatagtggcacgatctcggctcactgcaagctccgcctcccgggttcacaccattctcctgtctcagccttccaagtagctgggactacaggcgcctgccaccacgcccagctaaytttttgtatttttaatagagaccgggtttcaccgtgttagccagaatggtctcgatctcctgacctcatgatccacctgccttggcctcccaaaatgctgggattacaggcgtgagccaccgcgcctggccgataattcagctttcttttgaatgtcaaaaatgtgactgtgctttgtcggaatgtttcttagctgaatttttctgttgtgtgtacttttcagagaacgtgactgtcattcctaaccaggtgtatcagccccttggcccttgtccttgtaatttaacagctggagcctgtgatgttcgctgctgctgtgaccaggtatgttctttggttattgggcacaaaagttatgctacctgtgagaacaccagcagttccaccaacagcttttttcattttttatttcttgagatagggtcttgctctgtcacccaggctggagtatggtgatgcaatgatggctcactgcagcctcgacctcccgggctcaagtgattctcttacctcagcctcctgagtagctgggaccacaggcatgaaccatcacacccagctaattgttttgtatcttttgtagagatgggattttgccatgttgctcaggctggtctcaaattcctgggatcaaacagtcctcctaccttggcctcccaaaatgttgggattacaggtgtgagccaccatgccttgccccaacagctttttaagggatggtcttccaaaactgagattatgttttctattgcaaattgttttcaaattgagtttttttttttttttttttttgagatggagtctcgctctgtcgcccagcctggagtgcagtggcgtgatcttggctcactgcaagctccgcctcccgggttcatgccattctcctgcctcagcctcctgagtagctgggactacaggcgcccaccaccacgcccagctaattttttgtatttttagtagagacggggtttcaccgtgttagccaggatggtcttgatctcctgacctcgtgatccgcccgcctcggcctcccaaagtgctgggattacaggagtgagccactgcactgggcctaaattcagtattttcttatctggcatagtcagtctagtttttggaagaaggaaagaatatctctttggataaaatnnnnnnnnnnnnnnnnnnnnnnnnnnnnnnnnnnnnnnnnnnnnnnnnnnnnnnnnnnnnnnnnaaaaaaaaatcacacaacttttgagtaaattttttttttttgagacggcctcctaaagtgctggaattacaggtgtaagccaccatgcccggcctgactttttttcttttaggcttagagcagatacaacatataaactctattttcttttttctttctttcttttttttttttttgagacagagtctcgctttgttgcccaggccggagtgcagtgacacgatctcgggtcactgcaacctccacctcctggattcaagtgattcttgtgcctcagcctcccgagtaactggaactacaggtgtgcaccaccacacctggctaatttttgtatttttagtagaggcggggtttcaccatgttggccaggctggtcttaaactcctgacctcaggtgatctgcctacctcggcctcccaaagtgctgggattacaggagtgagccactgcactgggcctaaattcagtattttcttatctggcatagtcagtctagtttttggaagaaggaaagaatatctctttggataaaatcatgattgtgaagatcatactggggggatggttttaataatatttattcagaaacctttaagaaatataaaaaaagaaagaataagaaagaacaggcctggcgaagcagctcacgcctgtaatcccagcactttgggaggccgatgtgggtggatcacttgagttcaggagttggataccagcctgggcaacatggcaaaaccccatctctacaaaaattagctgggcatgatagtggaggcctgtagtgccagctcgggaggttgagcttgagaggatcgcttgagcccaggaggtcaaggctggagtgagctatgatcacaccactgcatgtcagcctaggcgacagagcaagactctctttcaaaaaaaaaaaaaaaaaagaaagaaagaaagaaaacacaggttttcagtgatttttagtaaatttacacagttgtacaaccatcaccacaatctatcttcagaacatttctaccaccccagaaagaaatcgtgtgtccctgtagccgttcctatctccatccctcatccaaggcctccgtgaatctgcctctgtctccatgaatttgcccattttggacattgcacgtatatggaatcatgcaatacgtggtcttcagtgactttcttcttgcacttagcatgatgcttttaaggttcttttaccttgtagcagctgttaccacttcattcatttttggtgtttgaatcctattccattgtatggatatatcacatatttcttatctatttattggctaatggacatttgagttgtttctgttttttggctattatgaatagtgccgctgtgaacatttgtggacaggtttttgtgtgaacatatgtttccatttctcttggggatatatatagtggagttgctgggttgcgttattactgtatgtttaaccttttgaggaactagtttctgaagcagttgcatcattttaaattcccatcagcaatgtatgtgggktataatttctctatatcctcaccaacagttgttattatttgtctgtttggttatagccatgttaagtaagtgtgaactgatatttcttyatgatttccttctttgtttttttctttaaatttttgagacagggtcttgctctgtcgcccaggatagaatgcagtggtgcaatcacagctcactgcagcctcaatctcccagactcaagtgatcctctcacctcagcttcccaagtggctggaaccacaggtgcacaccaccacacacagttaatttttgtgtttttttgtgaaggtggggtcttgctgtgttgcctaggctggtctacaattcctgggctcaagcaatcctctggcctcagcctcccaaagtgcagggattataggcgtgagccaccatgctctgccctcactgtgattttgatttatatttctctagtggcaaatgatatagaagatcttttcatgtgcttatgggatatttgtatatcttttttggagaaatgtctgtttatacccttcacccatgttttaaattgggctgtctttttgctgaattgtaagaggtttcactatatattctggattctagtttctttttttttgtttgtcttatttattttttatttattttttgagatggagtttcgctcttgttgcctaggctggagggcaatggtgtgatctcggctcactgcagcctccgcctcccaggttcaagcgattctcctgcctcagcctcctgagtagctgggattacaggtgtgtgccaccacgcctggctaatttttatatttttagcgcagatggggtttcaccatgttggccaggctggtctcgaactcctgaccacaagtgatccgcccgcctcagcctcccaaaatgctgggattagaggggtgagccactgtgcctagccaggttgtctgctttcttgttgttgtcctttgaggcacagacatttaaaaatttgatgaagtccaatttatctcatttttttcttctgttgcttgtatttctggtgtcatcagaaaccattgtttaatcctggcgaaatacacatttaaaattttttggccgggctcagtagctcacgcctataatcccagaactttgggaagccgaggtgggtggatcacctgaggtcaggagttcgagaccaacctggccaacatggtgaaaccccatctgtactaaaatacaaaaattagctggacgtggtggccggtgcctgtagtcccagctattccggcggctgaggcgggagaatcacttgaacccaggaggcagaggttgcagtgagccaagatcgtaccactgcactccagcctgggcgacagagtgagagtccatctcaaaaaaataataataataatttttgattaacctttttttctgattctatttatttatttatttttattattattttgagacagagccttgttctgtcacccaggctggagagcagtggtgccatctccgctcactgcaacctctgcctcctggcttcagcattcctcccgccttggcctcccaaagygatgggattacaggagtgagccaccatgcccagctaattttttgtgtctttagtagagatggagttttgccgtgttggccaggctggtcttgaactcctggcctcaagtgatctgcccaccttgacttcccaaagtgctggattacaggtgtgagtcaccgtggctggccttttcttatttttatttttaacctttcttttttaacctatcaagaagaagcactgaagcacatttaaaattttttttgagacggagcctcgctctgttgcccaggctggagtgcagtggcacgatcttggctcactgcaacctccgtctcccaggttcaagcgattctcctgcctcagcctcccaagtagttgggattacaggcgcgtgccaccatgctcagctaattttttgtattttgttgtagagatggggtttcaccgtattaactagggtggtcttgatctcctgacctcgtgatccacccacctcagcctcccaaattgctgggatcacaggcgtgagccactgcacctggccacaatttttgttcttatttaaatttaaggggaatgagaactgcaaaagaagaaatttactggtacccaagtcccaagtccctctcgtatttgggtgaggacagttaatgtttcattggttttttacttccccactgggaaatgcaaacttatttttttaaaacagcttcactgacgtatgattggcatagaaaagctgcagatattcaaagtatccttgaatatgtgtttggagataagtacacacccatgagctcatccacgcagtcaataccatatgctttcccctcacctccaaaggtttcctttggtttttttggttgttgttttgttttgtttccttttgtggtgaaagcacttaacataagatctaccctcttagcaaatttttaagtgtcctatcatggttggtttcactaaacaggaaagggaagtttagggtctgcattaatattgtcattctttttttttttttttttttaagacagagtcttgatccgtcgcccaggctggagtacagtggtgcgatctcggcccgctgcaacctccgcctcccgggttcaagcaattcttctgcctcagcttgctgagtagctgggattacaggcatgcacaaccacacctggctaattgttgtattttcagtagagacgagttttgccatgttcaccaggctggcctcgaactcctgactgcaagtgatctacccaccttggcttcccaaagtgctgggattataggcgtgagcccccacacctggccaatattgtgatttttacactaaaaattatcctaagaacaattaaatttaattaaaagagtaaagtacagcggccgggcacggtggctcaccactgtaatcccagcactttgggaggccgaggtgggttgatcatgaggtcaggagatagagaacatcctggccaacatggtgaaaccccgtctcttctaaacatgtaaaaattagcggggtatgktggtgggtgcctgtagtcccagctactcaggaggctgaggcaggagaatcgcttgaacccaagaggaagaggttgcagtgagctgagatcgcgccactgcactccagcctgggtgacagagcgagactccatctcaaaaaaaaaaaaaaaagagtaaagtacatcatacatttggctcaggtatcattagaattgtcaaatggcccctccttctcttccttccaggccacgctgtgtcccatgtcggactcccttttgcatgtgttgtgctgtgtgctacagtaccagcccctgacgtcctttagtattctggatcagtgacatcttcagataaccacaatgcagcagcactttataaacaatcaatttttaatttgaattgctctcgtttcaaatgagagatcacttctctactgtcaataaacaaagattcaggacgtaatttaacttacagctctctggatccttcgtgaaacaaggaaaaatacagatgaatatctgaatcaagtaacttcttttttcgagacggagtcttgttctgtcacccaggctggagtgcagtggtgtgatctctgctcactgcaacctctgcctcctgggttcaagtgagtctcctgcctcagcctcccaaatagctgggattataggtgtgtgccaccacgcctggctaatttttttatttttagtagagatggggtttcaccatgttggccaggctggttttgaactcctgaccttaggtgatccgcgtgcctcagcctcccaaagtgctgggattacaggtgtgagccactgcgcccggtctttttttttttttttttttttaagargcagggtcttgttctgttgcccaggctggacttcagtggcccaatcatggctcactgcagcctcagcctcctggactcaagcagtcctttcctcaacctcctgagtagctgggatcacagatgtccaccaccatgcctggctaatttttttttttttttaattttgtcggggctgagtctctctatgttgcctaggctggtctcaaacttctgggctcaaacattcattccacctcagcctcccaaaatgttaggatttcaggcatgatgcactgcgtgcagtccaagtaatttatttatttatttatttatttattttgagacagaatctcactgtgtttcccaggatggagtgcagtgtgtgatcttggctcactgcaacctctgcctcctgggctcaagcaattctcatggctcagcctcctgagtagctgggattacaggtgcccaccaccacacccggctaatttttgtatttttagtaaatatggggcttcaccatgttggccagtctggtctcacactcctgacctcaagtgatccacctgcctcggcctcccaaagtgttgggattacaggcgtgagcccctgcacccagccccaagcaatttcttgatgacattaattgggtcgtgttataatctagtgagggcctggaggatccttgtggaatatggaacgtttcccctcactctaaatgtctggaggcttttctgggctaagggtttgaatggtaatgacaattaagaaaggaggtttactatgtttttgtcttcatttgagatctattctgtactatcttttcttcttttgttttactgggaatatctcatgtccttggtaaaactgtggttcccytgaatgcttggagtttctgacttgraggcttatttggggaattgacaaaagaaattccagaactattttactttttgtgggcacaaggcacttttagatgagacacagattataggttttcttgcttacttggtagtgtcctgctggccttaaataagagttagcattcgcyacgcttgccaggagatcctgaccacggtcacagctcctgcctttatgtttgtcttccaggaatgctcatcaaatttaacaacgctgttcagacggtcctgcttcaccggcgtgtttggaggagacgtcaatcctccttttgatcagctctgctctgctgggacgacgacacgtggtgtccccgattggtttccctttctgtgtgtgcagtccccccttgccaacacacccttccttggttacttctatcatggtgctgtgtaagtgtctgagcagccgcctgggatggggcattgttctcccgccctggtggggccrtactctagtaggccctgyaacgcggtcacgtttttcccaacccctctccagaggttccgtgcctaaagggttcaattctagatttcagttagccaatttattttgcattatttggaagaattgggcctcattgaaaagaaattgattgacattgaaaacagctcatggtgcttttctaggggaggygaaggagtggtggctcatgggagattttaatgttctgtattttacagtttgggattgttaaaaatttacatctatgrtttttgtaattaaaaagtaggccgggagcggtggctcacgcctgtaatcccagcactttgggaggccgaggcgggcagatcatgaggtcaggagatcgagaccatcctggctaacacagtgaaaccctgtctctactaaaaatacaaaaaattagccaggcgtggtggcacgtgcctgtagtcccagctactagggaggctgaggcaggagaatggcctgaacccgggcggcggagcttgagctgagatcgcgccactgcactccagcctgggcgacagagcgagactctggcccaaaacaaacaaaacaaaacaaagaggctgggtgcagtgggtcacgtctgtaatcccagcactttgggatgctgaggcagggtgatcacctgaggttgggagtttaagacgagcctgggtacgtggtgaaaccccatctttactaaaaatacaaaaaattagccaggtgtggtggtgggcacctgtaatcccagcttactcgggagactgaggcacaagaattgcttgaacctgggaggcggaggtagcagtgaacaaagatcacgccactgcactccagcctgggtgacagagtgagactccatctcagaaaacaagagtaaagaacaacattaaggaagaattgtgtttttgcagataactgaaactattcagcctttcttattgattttcagttcccccaaacaggactcttcctttgaagtatatgtggatactgacgcaaaagactttgcagactttggttacaaacaaggagatcccattatgactgtaaagaaggcatattttactattccgcaggtaatcgttgcaatattagtatgctagaccgttctcttttttttttttttttttatgagacggagtctcgctcttacctcctaggctcaagtgcagtgccagatctcggctcactgcaacctctgcctcccgggttcaagtgattctcctgcctcagcctccccagtagctgggactacaggtgtgtgccaccgcacccagccaattttttgtatttttagtacagacggggtttcaccatgttgacctggatgatctcgatctcttgaccctgtgatcckagtgcctcagcctcccaaagtgctgggattacaggcatgagccaccatgcctggccactagacccttcttttatttttcctgtcctattgttaatttaagtcatatttctctttaaaatctctttttaagttacttactttcctcctttctacctttcagggacttaactgtttatgttctccaaattaataaaatatatagtcactcttaatcactgtctttgcttaaaactcagagtgaacttacaaaataaaaccaaaagattttctataagtttccatggaagtacctatcattctttttctttttttttgagacagagtttcgctgtttttgcccaggctggagtgtaatggcacaatctcagctcaccgcaacctctgcctcccgggttcaagcgattctcctgcctcagctttcccaagtagctgggattacaggcatgcaccaccacgcccagctaattttgtatttttagtagagacggggtttctccatgttggtcaggctggtctcgaattcctgacctcaggtgatctgcctgcctcagcctcccaaagtgctgggattacaggcatgagtcttttttttttttaaattaaaaaaatttgttttggtttgagacatagtcttgctctgtcacctagggtggagtgcactggcgtgatctcaactccctgcagccctgacctcccacattcaagtgatcctcctacctcagcttcccaagtagctgagactacaggcacatgccaccattcctggctaattttttgtagaggtggggttttgccatgttgcccaggctggtctttttaacttctgggctgaagtgacctgcccactttggcctcccaatgtgctgggattacaggcttgagccaccgcgcccagccaaaaatttttctgtagagatgggggtttcactatgttgcccaggcgggtcttaaactcctggcctcgaaattcttctgccttggccaaagtgttgggattacagtgtgagccttgatgcctggctagcagtaactatcattctttgcttctttttctttttaaatttttattttaggttcagggctacatgagcaggtttgttatataggtaaacttgtgtcatggggttttgttgtacagattatttgtcacccaggtactaagccaagtacccaatagtttttttctgatcctctccctcctcctactcactaccctcaagtagggtccrgtataaaaaacaatggttagataaatacatcattttatttaccattctagaattttgaaaaatattttaaggctgtaaggttgtatatggaatcatttgtatatctatatatgaatgcacaagtgaatgartgacagggtcttgctctgtcgcccaggctggagtgtagtgagtgtagtcacagctcactgcagcctccatctcatgggctcaagcaatcctcccacctcagcctcccaagtagctgggactataggtgcatgccattatacccggttaattttttactttttgtagagacagggtcttgctatgttgcccaggttggtcttgaactcctgggctcaaatgattctcccactacagccttccaaaatgatgggattacaggtgtgagccactgctcccaacctgaaatcttyttttaagttcaacattatgaggagtgttatttgtgggaagaaagcatgggaggtgaaaatttctctttcctattcatatgaatccatttttatggtattaaactctggttgtgatgagggagagaacatgaagttaaatatagtcatgtctctgcaaactaaatagaacaggacaagggattttctttgtttttattagacaatatttactgtgactccacaaccagtggcttccagaccttgatgggcaaatcagttagatgttttgctaaagcgggtcaactagtcggtgaacttgccgttgctgaaaccagaccagcaatgggagcaggctgcagaaagaccagttttaagggatgctgatctgttttgtatgattaggagagaggccataaatctgttggctttgcccttctccctcaggtgtccctggctgggcagtgtatgcagaacgccccagtggcatttcttcacaattttgatgttaaatgcgttactaatttggaactataccaagaacgagatggtattatcaatgcgaagataaagaatgttgccttaggaggtatgttacatttctttgaaaaaagaacacaggcccaaacatgaatataaagtatgatctcatgagagtataaatcatttctactggttcaacttcaaataatatttgaactgccaattattttctttggaaaaagtttagttccgtaagacagcatattgcatattaattattttgaaattgaagtaaaattcaaataacataaatttagcctttttgtttgtttctccgtcacgcaggttggagtgcagtggcgtgatctcggctcactgtaccctctgcctcctaagttcaagcgattctcctgcctcagcttcccgagtagctgggactacaggtgcctgccaccatgactggctaatttttgtgtttttggtaaagatggggtttcactgtgttggccaggttgaccttgaactcctgacctcaggtgatccactctcctaggcctcccaaagtgctgggattacaggtgtaagccatcgcgtcccaccagaattaacccttttaaagtgtacaattcattgacattagtaccttccacactgttgtgccaccatcacctctctctagttccagaacgtttcatcgcctcagaagggcatctgtacccattagcagtcactccctacccctcttccctcagctcctggcagccaccaatctgctttctgtctccgtggattgcttattctgggtgttccctagaaacagaatcatacactatgtggccttttgtgtctggcttctttcactgagcatggtgttccatggttcatccgtgtttgtagtgtgtggcagcacttcattcctttttatggctgaatcatagtccattgcatggacagagcacattgtgtttgtccattcctcagttgatggacatgtgggttgttttcatctctgactgttgtgaatagtgctgccatgaacactcgtgtccaagtttttgcgtagatgtgtgtttttatttcttttgggtagacacctaggagtggaactgacaggtcatgctaatatgacttcttgaggacccaccaaattgttttttttttgtttttttggttttttttttgagagggagtcttgctctgtcacccaggctggagtgcagtgacgtgatctcggctcgctgcaacctccacctccctggttcaagcgattcccctgcctcagcctcccaagtagctgagattacaggcatgtgccaccacacctggctaatttttttttttttgagaccaagtcttgctcttgtccgccaggctggagtgcgatggcgcgatctcggctcacggcaacctccacctcctgggttcaagcgattctcctgcctcagcctcccgagtagctgggattacaggcacccaccaccacgccctgctaatttttgtatttttagtagagacgaagtttagtagagatgggatttcaccatgttggccaggcagatctcgaactcctgacctcaggtgatccacccacctcggcctcccagagtgctgggattacgggcatgagccaccrcgcccggctaatttttttgtatttttagtagagaggaggtttcaccatgttggccagactggtctcaaactgacctcaggcaatctgcctgcctcggcctcccaaagtgctgggattataggcgtgagcccctgcgcctggccaattgttttctacagtgtctgcaccattttgtattgccaccagcagtgaactgcatatttgtttttatgtcacagtgaccctggtttttgtttgtttgtgtgtttgttgtggattttcttcctcmgttataattagatgctaagaggatggggactcctatctgatggtttttggggagtggggagggttttgtagtcagcaccctgggcagttgcggtcaccatatttgctttgtaagctatactttgagtaagtgtgatcatggtaggccatgtgtacgcctgtggaagttaatttatgttatctctttaggcatagttacaccaaaagtgatctatgaggaagcaactgacctagacaaattcatcaccaatacaggtatttaatgttacacttygacgtcatttcttcagaaacagatatgtcatttcttacaagtaatatataccctcagagtgtatatttttgttagtcatttaaaaaggttcacaatagttagaaagatctgccaggaacatttcatttgttcctcgttctgtcctgctgggctttagagtgctctctgtgaccttgagcctgctcctccacagtcctggattctctgagttccaccgacccttctagttccagcttccgtgaacctttycttaaatgtttgatagttaaataattcttttttttttttttttttttttttgaggcggagttttgttcttgtcacccaggctggagtgcaatggcatgatctcrgctcactgcaacctccgcctcctgagttcaagtgattctcctgcctcagccccctgagtagctgggattatagtcacccgccaccacacccagctaattttgtatttttagtagagacggggtttctccctgttggtcaggctggtctcgaactcccgacctcaggtgatccacttgccttggcctcccaaagtgctgggattataggtgtgagccaccgcrcccgaccagttaaaagaactttttagggcacagcattttcactttttgctttctttcctttttttttttttttttttttgataattaaactttccaattgtgatgcagccaaataagttacgtagagtttggcagattttttttttttttttgagatggattcttgctctgtcacccaggctggagtgcagtggtgtaatcttggctcactataacctccacttcctgggttcaagcagttctcctgcctcagtctcccaagtagctgggattacaggtgttcaccaccatatgcctggctaatttttgtattttagtagagacggggtttcaccatgttggccaggctggtttcgaactcctgacctcaggtgatccacctgccttggcctcccaaagtgcaggggttacaggcgtgagccacggcgactggctcagtttggctaattttaccagaactttagtttttaatgaaggatactgtttgtttctttcttttcttttttttttttaattggagacagagtcttgctctgtcgcccaggctggagtgcaatagggtgatctcagctcactgtaccctccacctcccaggttcaagcaattctcatgccttagcctcctgagtagctgggattacaggcacctgccaccaatcccggctaatttttgtatttttttgtatttttttttttttgagacagtctcactgtcacccagactggagtgtagtgacacagtctccactcactgcaacctctgcctcctgggttcaaacgattcttctgcctcagcctccygagtagctgggattacaggtgcctgcccccatgcctggctgattttttgtattgttagtagagagggggtttcactgtgttggccaggctggtcttgaactcctgacctygtgatctgcctgcctcagcctcccaaagtgctgggattacaggcgtgagccaccgcacccggcctaatttttgtatttttagtagagacagggtttcgccatgctggccaggctggtctcgaactcttgacctcaggtgatctgcccacctcggcctccccaagtgctgggtgtctctttctgatgtgttgtacttctcaaatttattcattggctcatcaaatgttagtggagttcctacgccgtagtagggaactagatagcgggcccctgccctggcggaactgaccctctggtctttcatctcacaaacattttaccaagtgcatgctccatggcaagctatgagccaggtgctggagatatagaaatgaaaggaacagatctcattctgggtactgtgatggcatagaggaggcagctaatgctgacttggtgggaccagggcaggcttcctcaaggaagcagtgaccgtgccatgttagggagctggagatagggagggcaggggcagggcacttggggaaggccacgcaagcagagagaacctcccagtaacagagtcaggctcaaagagggtctttaatttatgaacatattcttgtatttgcagaaactcctttaaataacggatcaaccccyagaattgtgaatgtggaagaacattatattttcaaatggaataataataccatcagtgaaataaatgttaaaatttttagggcagagattaatgcccaccagaaaggtaactttgatgagggtagcaagcatgctttcactgaaaagtatttttttttcctcttttcaagattctcataattataacccataaaactaagttrgacttgtttcttatgtgcatttatgatttaattaacgagagtacactttgtatgacaaaatgcaattttaaggtaaacactatggagaataatttcttttcctagtgaaatggtgcacrttatattttattttgttttatttctagggataatgacacagagatttgtagtaaaatttttaagctataatagtggtaatgaagaagaattatctggaaatccaggtaagatgagtatatgccagtcattgatcttacaaacatactttagttcaacactcccagccatcaggatggttataagtaactctctccaatttagtttctgactctgacctttttctttattttctctttttctttttttgagacggagtcttgctctgttgcctagtctggagtgcagtggcgcaatctcggctcactgcaacctgcacctcctgggttcaagagattttcttgcctcagcctcctgagtagctgggattacaggtgcacaccaccatgcctggctttttttttttttttttaatcacacaacacaggaagttttattcatctgctacttctccaaagagaggcttgcagggttgctcactttaatataatttttatatttttagtagagataggctgttgttcaccgtgttggccaggctggtcttgaattcctgacctcaagtgatcccctggccttagcctcccaaagtgttgtgattacaggcatgagccactgccccagcctctttattctctgttgtggcactgtattcattttttttttttttgagacggagtttaactcttgtcacccaggctggagtgcaatggcacgatttgggctcactgcaaccyccaccttccaggttcaagcaattctcctgcctcagcctcccaagtagctgggattacaggtgcccaccaacaccctcagcaaatttttgtacttttagtagagatgaggttttgccatattggccatactggtctcgaactcctgacctcaggtgatccacccacctcggcctcccaaagtgctaggattacaggcgtgagccactacgcctggccgacatggtattctttttgtgataacaatgtattttttttttttacatagtctgttgtacatagtaacaagttgctgtaaatgtgaagcattctttctctttagctactgttttttttgagacccgaagttgccatctttctctcaagggtattttcgaaagcttcgcctatgtgttttctttccttgtgcatgactcttgtattatttgcagagttagggcttgctatgctggaggaaacaggctcacgttcctttgttgtgtttgtctaggttaccaacttggcaagcctgtccgagctctaaatatcaacaggatgaataatgtcacgactttacatctttggcaatcgggtaatcyggtttggtcattatgattagccctttggcaaattggtgttagaagtattaccatattttgaatctaatcaagcaatcaattattttaaagcctagttggtttatttagcagagaggtacatgctgctgaataacagtgatgatggtttttcctgcttctacagctttttaaaaaggaatgctaacattgtttgcacctgaagtgctggttgctagtagaaaagattgaaatatgagattggcttgagagtcccatgttattgttgcctgtagcccaggatggtgctaattggagacatgaaaataacttcgttctgaactgcaggaaatctgtgcttcagtggtaattacgcacacctgccagaggcagtgtcacttctgaagaaaccaccgctcaggatctgagaagtctgataaaggcacctttgttcagctttgaaaggattagactaacagtgatctcagtttttgaaaactggcaactttatttctacttactgttttctgtttttcacggaaaactgaagttaatctttacttttgtttagcaaaaagtagcaagaggataatctttttcttttatagctggaaggggtctgtgtacatcagcaactttcaaacccattttatttggagaaaatgtactctctggatgcctgttagaagtcgggattaatgaaaattgtactcagctcaggtgagtgtttcattgatgaatatatcggcaatgtgaatggtttgcctagaattaattcactacatgaatatcaargacagcatgaatatgaaaaattagagtcaattaaaatgtgtaaaagtgataataaatacagacatgtaatacaatttagagttgattcaaacatcaatatgagggaaaataaactttttcttgggactaaagccagttcatccacatttaagcaaatttcatccacatttaaacaaatgtctctgccaaagtttgttcagctcattggaaccttttttgttgttgttgtgtggttttttttgttgagatgaagtctcactttgtcacctaggctggagtgcagtggtgcgatctcggctcattgcagcttctgcctctccggttcaagcaattctcctgccttagcctccctagcagctgggattacaggcatgcaccaccacgcctgctgattttttttgtatttttagtagagatggggtttcacaatgttggtctcaaactcctaacctcaagtgaccttgcccaccttggcctcccaaagtgctgggattataggcgtaagccaccgcgcctggcctcattggaaccttatactcctagagctatgaaaaaggccagagcaaagtgtaactggggtgattaacttttttttttttttttttgagacagggtctcactgtgtttcccaggctcgggtgcagtggtgcaatcatggcttactgcagccccaacctccccaggctcaggtggtcctccacctgccttggcttcctaaagtgctgggattacaggcatgagtcactctgctggcctatgttctgtttttgtttttgtttttgttttgagacagagtttcactcttgttgcccaggctggagtgcaatggcataatctcagctcactgcagcctctgcctcccaggttcaagtgattctcctgcctcagcctcctgagtagctgggattacaggcatgtgccacctcacctggctaattttgtatttttagtagagatggggtttctccatgttagtcaggctggtcttgaactcctgacctcaggtgatctgccctcctcagcctcctaaagtgctgggattacaggtgtgagccactgtgcccagccttgttttttgtttttttgtttttgtttttttttttgacagtagccatcctaatagatactaagtggtatctcattgtggttttgattgcatgcgttctttttggcttgttttttgagacaaggtctcactccatcacccagactggagcgcagtggtgtgatcacggctcgttgcagcctgaccctcttgagctcaggtgatcctcccacttcaccctcccgagtatcttggagtacaggtgtgtgcctggctgatttttcgtattttttgtagagatggggtttcaccgtgttgctcaggctgctctcaaactgctgggctcaaacgatcctcctgccttggcctcccaaagtgctggggttacaagcatgaaccattatgcccggcctgcatgcactcttacacacgttttatctgttacatatcccaagatgtgtagttctttgggaagcaggaagaaatgggggtaacattgagaagttaaggaaaactggtataaattattggcagcagctcctgattataggttttgaggcctgagtccatgggcagagtccctctcctgcagttcatgagatttgtaccctccagtgacagtactgggaaggagggaatgctacgttccaactcttagtcttcacttaattttatgactcaaaattccagctagatatataggttacttttactgttggatcactctggcccacgaatgtatcctgctaacttgatgtgtgctctaactacctcctaagtttggtgacagtcggcagagtttgtgaaccatgtgattcccaacttaagttactaacatttttttttttttttttgagacaggatcttgctctgtcacccaggctggagtgcagtggtacgatctcagctcactgtagccttaaccccaccaggcttatgtgctcctcccacctcagcctcccgagtagttggaactataggtgcataccaccatgcctggctaatttttgtattttttgtagaggcagggttttgccctgttgcccaggctggtcttgaactcctgagctcaagcaatcctcccacctcagcctcccaaagggttgggattacaggtgtgagccactgcacccggccaagttactaacattttaagtctaaagtaaaagattgcttctgtatgttctcccccaggtgtgtrggtccatcctgggaaggccatcagacacacctagtccatgggtgacacccagccagtttttaatgccagttcctctggcagtttttaatttaggcactcggaagtgaaacccggacattcactggaaatgactttaggacaagacctgctggccatgagctgagaaatgtcttactctcttgcagggagaatgctgttgaaagacttgattcattaatacaagcgactcacgttgcaatgagaggcaactccgattacgctgatcttagtgatggctggctcgaaataatacgtaagtcaaacccgggtacaataaagcctgtaacttggttgctgtgactaccaactgtagtcgcagcattagagcccaacccagtaggtcatcttcctgaggcttgactgcggcttaactggacgtttgcccaggggttagatctccaggcaggaaacttggcatgtctttttcttcttattcacaatgacttttttgattttctgtttttgtttttttgagacagggtttcattctgtcacccaggctggagtgcagtggtgcaatcacagctcattgcctcctcatcctcccaggctcaagggatcctcccgcctcagccttccaagtagctggaaccacaggtgtgcgccaccacatctggctaatttttttattatttgtagaaatgggtttcgccatgttgcccaggctggtcattaactcctgggcttaagtgatctgcccaccccaacctcttaaaccccaaccatgttgggattacaggcatgagccattgcgcctggccaacaacagtctttgtgaaagaaagtctaggctgggagcagtggctcacacttataatcccagcactttgggaggtcaatgcaagaggattgcttgaggccagtttttttgtttgtttggttggttttttttgagacggagtcttgctcttgtcacccatgctggagtgcaatggcacaatctcggctcactgcaacctctgcctcctaggttcaggtgattctcctgccttagcctcccaagtagctgggattacaggtgcccaccaccacctggctaatttttgtattttttaaatagagacggggtttcaccatgttggccaggctggtctcgaactcctgacctcgtgatccacctgcctcggcctcccaaagtgctgggattataggcgttagccaccgtgccaggccgaggccaggagtttaagaccagcctgggcaacatagtgagaccttgtctctatgaaaaatttaaaaaattagtcgaatgtggtggcatgtccctgcagtcccagctacttgggatgctgaggaaagaggatcgctggagcctaggagtttgaggctacagtgagctctgattacaccatcacactccaacctggatgacagagcaagatcctgactctaaaaataaaacaaaataaaataaaatacattaaaacaaagtccaagcaaggtttgaagattgttagtgcacttcagtttgcattgctgtttttgattgccaggaatacaggcatttgagaattgactttgtaatttataaaggtaattttgttaacttaaaagaaaataaagtgattgaaaatattgtgatagaagccagacacaaaagaccacatattgtatgactcaatttatatgcaatgtccagaatgggcaatgtatagagacagcagattagtggatgccggaggtggaggagttgggaggaaatggggagagactgccgtgggtaaaggatttcttcgcagagtgataaaatgttctaaaatagaatctgctgatagtcacagctttgtgactataccagaaaccatcgaattgcacactttaagtaggtggattgtatagtatgkgaattatatctcaataaagctgtcaggaaagaaagtaattaaggtgcaacagatcggctgggcacggtggctcatgcctgtaatcccagcactttgggaggccgaggcgggtggatcacgaggtcaggagatcgagagcatcctgcctaacacaggtgaaaccccgtctctactaaaaataaaaaaaaaaaattagccgggcgtggtggtgggcgcctgtagtcccagctactcgggaggctgaggcaggagaatggtaggaacccgggaggcggagcttgctgtgagccgagattgcgccactgcactccagcctgggcgacagagcaagactccgtctcacaaaaaaaaaaaaagggtgcaacagatctaataatagcagggatcatgggggccagayagaaagacttgacagctcagtgcctctggccaaaggtatttgcagtgttgaattggcaagtagctcgtacacaaagggaagaagatataccacatgtacatggaataaaggtaaaccagactttaaagcttcttcatcaggcctgatttcacctctgaatccaaaatatcctttgagtcatggagatccagctcatcgggttatgttggagaggcctaaggtcacagtgagttttggcagagctagaatgaaaacctggggttccaacctctttcctctgttccctggtagcaagttaggtaacttcccggtttcttggggagccttgagtctgtaaatactttgaatggaaagctttttttattgagctaattaatggaattgccttttgggaccagaaagagcccaatgagtgtgcgcatctgctttgcccctgcccagctctccctgcagatgctgctctgcccctctcctctgcctggtgggtagggatcagccctctggatcctgtccctaccctttccatctcctctgaggtcagctaggctcagtaggctggaattcacacaacggcccatacagacacacacctgtattgtgcctactccttgtgattggggtcatggtgatgaggaccctcccttccccctcttggtcatggataatgtgatatgtctgtgagcttgaggtgccccagaccactctctgacttggggagggagtcctgttggacyccacccccacggggcactcaggctgctgtttgctcatctagctggtgctcaaggcactgggcccagacctagatcctcatttgcaaacggaacccagaggtcgagcttgtcaagccctgggctctgccacccaggccagctagataggctgtggaatgaccctgagggctggagaaaagtcagcagttgggaaataaacggtagggaaaatgtccagacggagaacccaggttgatgaggtacgaaatcagtgtggtgatgacattttgttgccttcaaggtggaaggggttagcttttatttcatgtctgagccaaaaagcaaccttgatcctggttaataagcagaagagaagtggtgttgacacatgtataaggaaattagacataaaacagtgttactgaccttcggaatccctgaaggagcaaagaacccccttcagaggagccatagaacctaccctacttcctccaattgaccttgctgggttttctccaagacgaatgcaaattcatttctcattyaatttcattctcttccaattgtattaatactatggtaacacattaggaaattacttacctatctaatacatactaattaaagtcgttagtgtggattttgttttattattatttttttttcaattattatcattattttttttttgagatggagtctcactttgttgctggagtgcagtggcatgatctcggctcactgcaacctccacctcccaggtttcaagtgattctcctgcctcagcctcccaagtagctgggattacaggtgtgcgccaccatrcctggccaatttttgtatttttagtagagacagggttycaccatgttggccaggctggtctcgaactcctgacctcaggtcatccacccacctcagcctcccaaagtgttgggattacaggcgtgagccaccacgcccgactgatttttatttttattttttgagatgaggttctcayttttgtccaggctggaatgtagtggtgccatgccatcacggcttactgcagccttgacttcccaggctgaagcaatcctctcacctcagccttctgggtagctggtgtgtgctacaggtgtgtgccaccatgactggctattttatttttctcgaggagacagggttttgctatgttgcccaggctggtctcaaactcctgggctcaagcagtgcttctaccttgacctcccaaagtgctaggattataggcatgagccactgtgcctggcctaaagttgttagtatggattttaaatgtcttacacagcttttactagaactgtgactgcatggaataacgatggcatttcactgcaattatatatgtttctgttaaaaggctgggtagatttcagtgggagcttggaaactgaatcatgatttatggctttaatatgtgggtcagggcttttaagttccagtgactggctaacatacaaggaaacttttttttttttttttttttgagacagartctccctctgtcgccaggctgcagtgcagtggtgtgatcttggctcacggcaagctccgcctcccaggttcacgccattctcctgcctcagcctcccaagtaactgggactacaggcgagcaccaccacgcccagctaatttttatacttttagtagagatggggtttcaccatgttggccagaatggtctcgatctcttgacctcgtgatctgcccgcctcagcctcccaaagtgctgggattacggcgttagccaccgcacccggcccatacaaggaaacattttaaacacaatttttattagtgccatcctatgccttgtagactttaagggataacacagttatggagtgacaagtaactagagcctgtaagagactaaagcctcattaatgtgatgcctgcctgatattattccccattttggttattacgacattgtaggaaaacttatcaaattattctttgaaaagtgtataacttaacatttctataggtgtagatgcccctgatccaggtgcagacccgctggctagcagtgtgaacggcatgtgcctggatattcctgctcacctgagcatccgcatcctcatctcggatgctggcgcggtggaagggattactcagcaggagatactcggtgtagagacaaggtatgatcacatcttggatcaccgtagtttagagagagtcaggaaagttgagagcatcccaaacaatagggaaatgtttatttagaaactgattgtttatttacaacttgcaattattagcaagatgtttatatgcacatatggaatatgtacgaactatgtgtataatggagacttattctcacaagtatttataaagccatatgtaagagagtctgcaagttattttagggagtacaaagatgaataaagggccccttagtactaagtatattttgaaatccatggatgtaactgataatctgatcagagaatattgtctgtggttagagactttggcagcagataggttcaaatcatggctgtcctacttaggagctgtgtgacactggccaattacttaacctttctgagctgtagtytcctcctctgtaatatggtgataatacctttatgtatcaagcctccatcagttttttttttttttttttttgagacagagtcttgctccgtctccaggctggagtrcagtggcaatatcttgactcactgcaacctccaactctctagttcaagcgattctcctgcttcagcctcccgagtagctgggattacaggcacgtgccaccatgtccagctaatttttgtatttttagtaaagacagggtttcaccctgttggccaggatggtctcaatctcctgacctcatgatccgcccgcctcggcctcccaaagtgctgggattacaggcatgagccaccgcgcccagcctgcctccatcggttttaagtgacaggcgcccagttcatactgacttaagcaaaaaggggagtttattggttcaagttcagagtaatccacatacagctagttcatggttcatggttccagtgtggtcagggatctttttgttttcgtatctcagctcctcttcctttgggttggcttcattctcagggaggttctcctcaagagatggcaaagatcagcaccagcaatccaggcttatgtcactgcagcaagtccagtggggagaaagcccctttcctcctctttcctttctttctttcttttttttttttttgagacggagttttgctcttgttgcccaggctggagtgcagtggtgccatcttggctcactgcaacctccaccwmccgggttcaagcgattctcctgcctcagcctcctaagtagctgaggttacaagcatgtggcacctcgcctggctaattttgtatttttagtagagatggggtttctccatgttggtcaggctggtcttgaactcccaacctgaggtgatctgcctgcctcagcctcccaaagtgctgggattacaggtatgagtcaccgtgcccggcccctcctctttctcaaaatagatctgggcagacttttattggttcagtttaggtcatgtgctcctttctgaaccaatccctatgactggggcaatggacagctcttattggctaggctcaggtgatgggtgcacctctggattagggccaattccttctgctccactgaactggaaatggagagtggtggctctgcaagggaaaatgggagtgcagttaccacctccgcagtacccttctgaggataacatgagatggtgtgttgcaagcaagttatctctgtgcctcgaacgtggaaagccctcaataagtggctagctgctgcttttattattatattgtttgagaaaaacaggtgatgaacaaaggtacctttgatagcacctgtatacaatgcactggctggagaggagtgagactgacaacaagactggcagatgttgctgggcgacaggcccatgaggggttattaggagtttctcttctctttggatctgtctgtggaaatggtcaaagaccatggacaaatactgagaaaaaacagcccaggtagaatgcgaaacttcttaggagaacctcaggttatattgtgattgcatccgttacctgctgttcttggtggaatagaactgaatggtggctatgctgaccatgtgatctttccctcctaggttctcctcagtgaactggcagtaccagtgtgggcttacctgtgagcacaaggccgaccttctccctatcagtgcatccgtccagtttattaaaattcctgcacagttaccccaccccctgacaaggtactccagttgctcacctagttgacattaggaagcagaaaaatatatatttgaaaattggaagtttattcctttaatcaagttctgatacttctcacttgtagtttttgtaaccctctaaaatgttttctagattccagatcaattatacagagtatgactgcaacagaaatgaggtgtgttggccgcagcttctatatccatggactcagtattatcaaggtagggtgaaacagatttctatgaccaattatgttatgtcaatttaaaaaaattttttaaatgatgtctaaatgttacagaaagcataaaacatatagaaacttaaaaaaaagtacggataatattgccacttggaagtgatcaccattactgttttggcttagtttatttctacctacactgtttttttttttagagagtcttgctctgacaccctggctggagtgcagtggcacaatctcagctcactgcaaccattgcctcctgggttcagacaactctcgtgcctcagcctttggagtagctgggattacagcaccaatatgcctggctatttttgtatttttagtagagacggggtttcactgtgctggccaggctggtctcgaactggcctcaagtgatccgccctccttggcctcccaaagtgttaggattacaggagtgagccaccacacccagcctatacctacactgttatcaaaagagttaagaaatactgctgttgaattttgtccattgtttttcaggggagctgcattctcagtgtgttgctaagggcttactgttgctgttgttcctcacattggccttgttcctcagcaacccctggaccagaatatgcaaagcctatagttagacaaccacctggcttttatttttttgagatggagttttgctcttgttgcccaggctgaagtgatctcggctcaccacaacctcctcctcttgggttcaagcgattctcctgcctcagcctccggagaactgggattacaggcatgcaccaccacrcccggctaattttgtatttttagtagagacagggttccaccgtattggccaggctgctctcgaactcctgacctcatgatccgcccatcttggcctcccaaagtgctgagattacaggcatgagccaccgcacccggcctttttttttttttttttttttttgaggcggggtcctctgtcacccaggctggagtgcagtgcacaatctcggctcactgcaatctctgcctcccaagcaatcctcccacctcagcctctggtgtagctgggaccacagatgctccaccatgcctggctgtatttttggtaaagayggggtttcgccttgttgcccagggtggtctgtaactcctgagctcagatgatctgcccacctcggcctcccaaagtgctgggatcacagacgtgagccactgcgtccggtccatctgacttctcaaagactttagaccttgacttcagtgatttgttgtagtcttgtatgcttctctataaaattttaataaatgaaatgtcttatttttgtagaaaatttttattaagtgccctgtgactttaattcatatatgtagctatccaatgcagaatgaatattctcatcgctggcctggactgagtaaaatgcatgagaagaactcaaaaatgttagaaattttagcttatcacaaattagttaaagtcataggagttttatttataccagagagaatcagtcttttctttagtttttaatacattcgtgttgattgatgtttcccatattccgtagaaaggattaagaaatccttaaaaatgcatgtaatacaaaaacacaaaatcactgatggggaaagatatgggggctgcgggaggaaaataataagagaaaagtaaaacaaaaccaggggcacatgtaagccctaaaatacatgccagaggttgcctttagcagaagcaggcccctaattcattatttatttatttgttttttggagacaggttctccctctgttgcccaggctggagtgcagtggcacgattatagctcactgtaaactcagacacctgggatcaagcgattctcccccaagtagctgggactacaggtggcacacagctaccacgcctggctattttttttttttttttttttttttttttagtagatgggggtctcgctatgttgcccagcctggtctcaaactcctggctttagcgatcctaccacctaagcctcccaaagtgctgggattaccagcaggagccactatgcccaaccaagaccccagtttacaaaaacccaagtatgattagctataggaattatgaaatctattcattaatacaggaattatgaaatctattcattaaaaattaactggttatcaatgaaggacagtttttcctagctgagtcttgacaaatttctcccatgggccgtcacatgggaacagtcaaccccactcagtggggagaatggattttttttttttttttttttttgagactcggtcttactctgttacccaggctggagagctggagagcagtggcacaattacggctcactgcagcctcgacctcctgagctcaagtgatcctcccaccttagcctcccaagtagctgggaccacaggcttgtacctggctagtttttgtattttttttttttgtagagaagggggtctccctatgttacccaggctggtctcgaactcttaggctcaagtgatctacctgccttagcctcccaaagtgctgggattataggtatgagctgctgtgcccagccctggaatagatgtttttagccacggtcctacagtggccacatggcacatcacctgtaagttttctttgtgtgccaggtaacttagttgtttcagatggattttctatgttatttaagcctaattttgaaaaataattattttcccttttatactttttgatcgaattcctagtgcctgctgatacccagcaccacataaaatgtgctgtttcatcttcgctgcagagttcctgcccaggggcaatttcgaattttcctccagtcttaagtccattttcttttttctttttttttttgagacggagtcttgctctattgcccaggctggagagcagtggcgtgatctttgctcactgcaagctccgcctcccgagttcacgccattctcctgcctcagcctcctgagtagctgggactacaggcacccaccaccatgcccagctaatttttcgtatttttagtagagacggagtttcactgtgttagccaggatggtctcgatctcctgacctcgtgatccgcccgcctcggcctcccaaagtgctgggattacaggcatgagccactgcgcccggcctgagtccactttcaaatagggggatgagctagtcactgcagaggtcctaagtttctgcatgatggaaataccgtgaatttcagcatctgtactgtggtggtgttgggccttcacccgacccctctagggctgactcaggaatctgggtcagtactggactgacggagctggggtctgagtcaattattgtctgaacttcagcctttgaattcaccttcacagttcttactgtatctttttgttgttgttgtttcttttgaaacagagtgtcactctgttgcccaggctagagtccagggatgccatttcagctcactgcaagctccacctcccaggttcaagcgattctcttgcctcagcctcccgagtagctgggactacaggtgcccaccaccacgcctagctaatttttatatttttttagtagagacggggttttgccatgttggccaggctggtctcaaactcctgacctcaagtgatccacctgcctcagcctcccaaagtgcagggattacaggagtgagccagggcacccagcctagtgtaactagctttggatttcaggtatttatggaaaataaatttaaaacttccaaatgacaggtaatttagcttgattttgtgggctttgtgaggacgccttttgtacttaaaagaaggaaaaaactcagtttggcagaatggggtctggagtgtctatggttttaacttttttaagtttatacatttatgtatgcattcatgaactatttattgagtggctactatgtgctggggcttggagataccacagtggcagaaacaatgtccccaccttggtggagcttccattctagcagggaagactggcactaacacacagacaagataatttcagatggtggcaggtgcagtgaaggaaatagaacaaggatgtgactccagggacagtctcaaggaaggggatatgtaagcagagactcgactgggacagcggtgaggttgcggcctggggcggggggccactgcttcccggtcagtgtggggaacacacactgggtgctgtgtgattccatcgacaggacaagcctggaggtggcaaatttagcgagacaaaattgtcctgtggtggccaggccgggcgggaaggggagactgcaactgagcaggaggagtcttgcgaggtcggtgggaaatgtttgaaaactggattgggatgctggctgcacactccaacttcacgaagaagcctaggatccctccgggcggcggatcacgcctgtaatcctagcgctttgggaggccaaggcgggaggattgcttgagttcaggagttcgagaccagcctggccaacatgatgaaaccccttctctataaacattttaaaaacaaattagccgggtgtgatggcgcgcgtctgtaatcccagctcctccagaggctgaggtgggaggatcgcttgagctcaggaggtcaaggttgcagcgagccgagctcgtgctactgcactcctccctgggccacagagggaaaccctatccataaaaaaccagcagcagggccgggcgcagtggttcacgcctgtaatcccagcactgcggaggccgaggcaggcggatcacctgagctctggagttttgagaccagcctggccaacatggtgaaaccccgtctctattaaaaatacaaaaaaattagctggacgcgggtggcgcgcgtctgtagtcacagcaactggggagtctgaggctggagaatcgcttgaacctgggagacggaggttgcagtgagccgagatcgcgctactgcactccagcctgtgggactgcgtgagattccgtttctctctctctctctctcacacacacacacacacacacacgcagcagcacagggtcgtgcactaggaacgggtgagcttcgcggcgtgcacactcggcgagactcctccaggaaagccggggagccgcgcgggatttagctctgcgtccagtccggcggagcgccagctgcagtggtcgtacccgccgggttcgcgctggttggccctgccgccacgtcgtgcggcgacaacctcgggcgtccattggtcggccggcggggggggcgggacgcgggggcggaaccggaaccggcagtggcttgggggcgggacctcgcggactgctgtggcggcagctggagcggcggccgcggtggcagaaccgggggcggccgctgcagtctggagccccatagtgcggggccgcggccaggccacaggaagagctcgaggcccgggccgcaccggctgagtgtgcgggcccgcgcggctcggagccgccgccgcccatcgagcccctccgggcgcgggtcggcccgccatggggtccctgttccggagcgagaccatgtgcctggcgcagctcttcctgcagtcgggcacggcctacgagtgcctcagcgccctgggcgagaaaggcctggtccagttccgagacgtgagtgtcgcccgggagacgcgggccgcacctgctctcctggcgcccccaatcccgcgcatcgctggggccctcccgcggggagcaccgaggaagggcgcgccccgtccccattgtccagacggggaagatgacaccccagctcagcggccaaagcttcccggagcgcggggctgactccagggtcgccggccgtctgtgtggtcggcggctgctctgccccagttagttaggatcgcccgtgtggtcttcatcagctccgggcaccgagctcagcgggagaacaaatcccacaaaggcctcttggagtccttttggaactttacgggggttaggggggcgcattaaccaaataaataggtcaaccagaaaaggtttgccataaagaagaaacggggtgatgtgaaggtgattcgggcgggaggtgagtgtgaagggattgtcgaggaagcctcccggagaaggtgatatttcagctgagacccaaatagaaaggagccagccgtggggaagatctggggagagggtccttgttggagggaacaggaggagcccagacagagccagaaatgggaaggagctggatgtcatctgcttgaggagagggatttttgtgttttggtcactgatgcttaatgctgtacataccattgtgtgtaaggacttaagaactcagtcattgtttgtcgagtggaagctgtctccccaacaagtaataataaacatttgtttgtccatttacttgtttattgtttgtctccaccaaggactgtcaacctctgagagtaagtaccttaacgcagtccttggcagtcattggcatcgataggcatttgttgaatgaacagacaagcttttcttgactgcccgctatgttcaggcactgtttttggtgctggagactcggtggtgagcaaggcagacacagtccctgtgttcctggagcttccagtgtgggaggagacagattaaacacactctgattatgagctgtgataagtgctaagaaggcaaagaacagggtgtggaagggagaccgtgaagcaagtacttactgactgaattgaaatccactcaggcgaacattttatttcctggccaccactttcatctcctgactgtttcccttaatcttcctaaggtgtccttaatttcaaaagggatcagccctacccgagatctgatatccattgatatcagatatctaataccagatcagccccataaggcagttgcaaagtcatggagagactcctgagtgacaggcgagggtgcaggtaagatgcagggcggttcctggttcctggagccacttctgcagttgtacccattcacctgatggatgctgcgctgagctgtgaatagcacccaaaacattcaggcaacagctgcaggtgcagcaggctcctacatttgtaacaggtagatgttttccttccggttagtactcaagccaagacacttatcacacttcagtcttacaggtttgagcaaacgtactaatcactatgaaggttccagtttcaataagcgccactacctccagtcatagagtgtacctgggatccttttcaactgaatgtcagtgaaaggagaagaaagtgctgttcatctttttccagaaggaagtaaaactaaggttgctgcgatgagctcttgtgtggtgctaggttttcagtgtgtcttcagcctgagtttcctactgactttgtggtgac

SEQ ID NO: 97343 - DNA, 13367 bp, Homo sapiens
cccaaatacctgccatccctggaccagtgactgctgcctcagtcccctttacgagtgaccgctgcctcagtccccttcaccagtgactgctgcctgagtcccctggaccggtgtctgctcagtctcccttaccagtgaccactgtgtcagtcccctttaccagtgactgctgcctgagtcccctggaccggtgtctgctcagtctcccttaccagtgaccactgtgtcagtcccctttaccagtgactgctgccttagtcccctttaccaatgactgcgttctcagtcccctggaccagtgactgctatcttagtccgctggggctgccataacaaaataccacggactgggtggcttcaacaagagacttgtttctcacagccccggaggctggcaggcccggactgagatgctggcaggctgctttcccctgaggcctccctgctcagcttgctgtgtcggcacagggcctttcctctgtgcctgcacccctgtttctcctgctcttcccagaagacagtagtcacagtgggtcagggcccacctcctgacctcactcaaccttgattacctcctcaaaggttctgtcttcaaatacagtcacattgcggttagggcttcagcataagacttttgggaacataattcagagccagtgtggttgggggtacgaggctggacagggaagtagcggctccccgcaaagaacagaggtgcagtcccaggaagacagcagagcatggcctcctttcttttcatggaaactttattttggccatttagtgaggaccaaacaaaatgtcttataatcaacattttgtaattattatgtaatttcgtgttttaattcgggacaattaataattaagttctaggatcatagagaaacaaaagcagagctggaaagcgcatgagagtcaccttgcctggtgctttgcagccctttccctgtcaggggccccttgcatagttttccctggttggctctacttagaatgctcacatctagtgaatcgcagtctactcttagggttggtgaatacctattttatcagtagatgtttcataattactgagacctgccccagaatcccattagtatagcagctgtggccacggcagttcctctggtctaccttcttggtttacacaggggagtctgaggcgtgcggtgggagtggggctgatgaaggtggggatttggggtggtaaagtctggtcatggagctgggtagtggcagagtggtgaacagagtgcgtctggggtttctgttcctcacactctagcgtgttcttaccagcatccagccggcagctctttcattgtaatccttgaagtggaacccacttggcatgtagaagtacacatgtaacatcatgactcttaacatatgttgtgtgatctctctcagtttaattttggagaaatattaatgacccaagtaatccattccatcgagtactgtctgggatgcatctccaacaccgcctcctacctgaggctctgggcgcttagcctggctcacgcacgtaagttcctgcttagacctgcagttcccaatgccctgtagtgccagcagactcagggggcactgtgggatattttaactttgtaactaatagtcatagcaccatctttcagctgccacgtgaacttacactattcactacttaatacacagctctcttggctatttcttttggctgaggagtgctgtggaaaaatcacagagggagtctctctgaggctggtctggcttcagagcctgcccaatttaaaaaaaaaatcactgagacacaaggggctttgagaactgagacggcttgggagcctctggtgtaagcacttgctactgttgccattactgtttctgttagtagttatttcattcactgctgccttaccaagtgtgaatatctgtttatttcaagcaagtcctgccacagcactcatgggtagccttgatcacaggagtcctccctttgcacaattccagtaatgcacacatgttagtttccacagtgtagttaacacctgttccccagcagcatggttcccatttcagtcaccacagtacctagccgtgcagttaggtgcaggtgcatttaccagcctacgtgcggcaggtgtcgtgatgaagatgctgataacccaccagtggtgctcggcaatgtttcaggacgttgaaggtttgtgcaaagggtgcaatgttgcaagtgggttcagacgtagaaaagaataggacaggccaggcacagtggctcacacctgtaatcccagcactttggggggcccgaggcaggtggatcacctgaggtcaggagtttgacaccagtctgaccagcatggcaaaaccatctctactaaaaatacaaaaattagctggttgtggtggcgggcgcctgtagtcccagctactcaggaggctgaggcaggagaattgattgaacttaggaggcggaggttgcagtgagccaagatcacatcactgcattccagcctgggtgacagaccgagactctgtctcaaaaaaaaaaaaaagctaaaaaaaaaaaaaaataggacaatttggcaagtattaggaaagatgcttgctctgcatcaggtcacccagcttgccaatttacacagcaggaaccaagcactgttcaaactaccctaataaacttttttttttttttaaataacagacaaaagactttaatactcagtgcttctaatgtttcaaagatagatttaccattttttcatttccctatattttttgttaaaacattaataactctcttattagctgggtgctgtggctcacgcctgtaatcccagcactttgggaggcctaggcgggcggatcatgaggtcaggagatcgagaccatcctggctaacacgtgaaaccctgtctctactaaaaatacaaaaaattagccgggcgtggtggcgggcgcctgtagtcccagctactcaggaggctgaggcaggagaatggtgtgaacccgggagacagagcttgcagtgagccgagatcatgccactgcactccagcctgggcgacagagcgagactctgtctcaaaaaaaaaaaaaaaaaaaccgaaaaacaactctcttattgttggccaacaatatagccaacaataagagagtttttaatgttttaacaacaattttaaaggccacagagcaaaccatttttcccatggattaatagggatgcttcggatggttttgattgcaaggtctttactgtgcaaagcaagcactgcctgtgcttgtggaaaccaccggacaagagggtgtcttttttttttttttttttttagttaaaaaaaaatgcttatgtttttataagcatagccaaaggtctggaattttgtggctggaggggccctgtctcgttcatctccattttgcagaggtggtgactgaagccactgagtgtcggtgctttactcatggtcatccagttgatccctcagtggcagaaccaggcctgggagcctgtttctggctgcctggtccagtgcgctttgggaggtcacaacccaaacctagtctggggcaagacctccctttgggagatggcctctgatatttttggagcaccaggtcttccttagtgtttgagaccgtctcggagctgactggctttcacatgagaaacagttgggtctgtgttacatgtgtgtctattattttatgggataatagttcagggccgtcagggggaaactcagtccaggtagctcacagagggacccactgtacataagcgagcatgacctgtgcaggctgcactcctttgcagagttgtctgatgtcctgtgggccatgctgatgcgcgtgggcctccgcgttgacaccacctatggcgtcttgctactgctcccggttatcgcgctctttgcagttttgaccattttcatccttctgatcatggaagggctttctgcgtttcttcacgccatacgcctccactggtgagtttgaaacctagccttggagctgttatttaaaaaacatacccgcccccccactgccccgcccaaccaaatatacacagcccctgcaaaatctaatgctgaatttaggccagttcttcccttcccttgggatctgtgttcatatcctctgagttaaaattgtattttgggccgggtgcggtggctcatgccggtaatcctggcactttgggaggccaaggcaggtggatcacgtgaggtcaggagttcaagaccagcctggacaacatgatgaaaccctgtctctactaataatacaaaaattagctgggtgtggtgtcgtgcgcctataataccagcttcttgggagactgaggcaggagaattgcttgaacccagcaggcagaggttgcagtgagccgagatcatgccattttactccagcctgggggacgagcgaaactctgtgtcaaaaaaaaaaaatgtattttgattctgaactattatcactgacaagtaaaagtaagtttaagtttgcagaatactaacgtatgtttcatactcctaattcactttgggtctgacaggttgctctgtcttattgcaagataaatccttcttatgtatttcttaatgttttatggtgtaggtcagattactgctctgtgcctccagtgactcaagtggcaggagagggtctcgttacttgtgcacgtgcttttgtgtgttgggcagtgagagacagcggatgtgtcagagtttctgttcacactgggaaagccagcacggggttgggggtgcggggcagtgtttagctaagtaaaaatatatgtgccaagaacatattttggaatgaagcaatttcagcacaggaatttttttttttaacttataaatgttgttttaaggaatgtgatttcataatcttccattaatacatggctttttttttttttagggtagaatttcagaacaaattctacgttggtgcaggcaccaaatttgttcctttctcattcagtctactttcatcaaagttcaataacgacgacagtgtggcatgatcatattgctgtaaccaacaagctttcagatttatggagaatgaccatgttatagactttcacttatgtcagatttatgataggaaaaattccatcttcattactgccttatgacatagccaaataattctgtaagatatacctcttcctcatatgttaaatattttgtaaagtttaccaatttgagatataaaaatttcttttggttttttatgatgagcaaatataagttaatgccaaacgttatgttaaagttattttttcaaatacaggatttggggagagaagccaattttgcatggctagttgaaaatggtattagatacttatttcctttaaactttatttaaaacaaacaacagagttaatctgtcacctgaagttgccagataatattttccaacagctgaagtagggatagttttttaaaaaatttaatgatgggtaatcaaaacattcacatttattctgctggatttaaaaatatgtactttttttttttttttgagatgaagtcttgctgtgtcacgtaggctggagtgcaatggcacgatcgtgtctcattgcaacttccgcctcctggattcaggtgattctcctgtctcagcctcccgagtaactgggattacaggcatgcgccaccgtgaccagctaatttttttgtatttttgtagagatggggtttcaccatgttggccaggctggtctcgaacttctgacctcaagtgatccacctgcctcggcctccctaagtgctgggattacaggcgtgagccaccatgcctggccaaaatatgcaaatattttttatcctgtgctacctagaattacaagtagaggattgtttttacaattttgtcttgttttagtaattggggacaatgggataaaatgacatacaacaaatggttatcccacttgtatatttttttaaagactcttatcctgttacccttacataaaaccagttatgataattgtatgtttggaagataaattgtatgctgagccttaaaacccagtgtgactgtagaagatataatgcggacatgatttgaatttagtgacagcttggctgatgtcactgaaccagaagggtttatactgagtgaaggaaaggtraaaagyagtattttgtatatttttgtaacaaaatataaatgaagatattttaccatgaagagattgcacttatccttgagaacagtctaaatataaatgaagatattttaccatgaagagattgcacttatccttgagaacagtctaatgatactttttttactttcagactgtttctagctaaagttctgataaaagtattgagttaatttaaactttcaaacactgtttagatcagttgaaaactaattcttaatagccattgttttataatctttagtttaaattcatctgtttgacatttggttttttgtgaacttgagtcagtcctrttgaacattttgacctatattcttgcaaattatgttaatttttcatattttagtttgattttagacaattattttcaaaaagaaacctgactttttttcaccttcttgacattgtgagtgatacacgttaaaaggctatttgcccgcatcctcctctatcctgtttcgaggtagagagcttggcacttctgttacaagctgagagtctggaggtgctgagtttaacgtggctgtgcagstgatttcaaggcatgagctgaacagcgttgacacagccgtgacttacaattaaaccctttcaattacagtacagattctgtgtgctacttgatgagatgttacccaaggccagtttggacttactgctttttgtccctcatattaaattatcaaatgatgccgatgaaatgcttgaaaatgattctgctctcaaagttatgcttccctagaaaggtgtcatgtcgggcacttgtgttgggtgactatgacatcccagcagtgctggtcaggtctcagagttgctttcacctagagctgatgcttccacaaggggacatttgtgttactttgctccaggggtctgtcataaaaacaatggtaactacttcatccctaggaagcccaagacttcagggcactgttagctgattggtaaataagggacacgatattcacgggaattgtttactgctccccactagtaattctcatggggccacttttttaactctttctaattaacacctcttctcagcatagagcagaggatgcagtcatttctctgttgaaatctatgtagtatttatgtagaatgtcattatatgaaaagcgaattcagaatcctaactctgggaaagcgctctctggaaatgtagtttgataatagtgtcttataggggccacgggaatttgtttctctataaagcgatgggctccagtgtcatgttaccagagttatcgctcagttttgtttgttaaggcttttgctagaacctattatgtatccagtttttaaaacatacttcattcccttgatagcagagatccagagcacagatggcaagttgtgtggatgatactgaatatgtttattttcctaaagataaatgtcacgacacgacatttctcagtttttatttagatgtttattaccatgtgttaacagaatcttaaaacccaagggatttcttcagtaaactagactttgattcaacctgctgggctggagactgtaattgccgtggtcagttaaggagtgcaaagggtgttctgtctgataggatctgggtgagccctgcggactttccagcagcgaaaggacttggaactcctctttcgctgaatgctgctctgtttctggaatggatattttataacaacattctggtgtcagcatcccctcagcagttgtttatttaaaaatttttttattttttttgagacagtgtctcactctgtcacctaggctgaagtgcagtggtgcagtctcggctcactgcaacctctgcctcctgggtttaagcaattctcctgccctagcctcccgagtagctgggattacaggcgcctgccacagtgcccggctaatttttgtatttttagtagagacagggtttcaccatgttggccaggctggtctcaaactcctgacctcaggtgatctacccaccttggcctcccaaagtgctgggattacaggcgtgagccaccgcgcctggccctctgcagttgtttaataaggcacagaatacctgtagcataggtcagccttacgatgtccatgaattacatattcagacgttttagagcctgatacattttggaaaagaaaaacaacttctacacctattctacagtccgcatttaaaacaataaattcctctattaaaaacgtaaagccgggtttgcttgcgtgccacagggaatatatccaggaaggttattatgaagctgtcaaatcaagatgatggaaataaggcagtttgaacgaacagtcttcccacagtcaggccatttttgctgatttggtttagaattttcagaaatacttagtacactccacctgttctttgatgggaatatctaagaaggctaggtaggttcttagggttagcctgagtcatctaggggctcaactccttgtgaggggaaatgacagtgaacaagttagtactttgctccacaaatgcatgaaaggacaaatttgcatcttctatcagtatttaacttccttttgctaatgacaaataaatatatctatatttttaaacgtgggtgttttgctttattatgctctagtttggcaagaaagctaaagaactctgctccttccctgattttgtaggccatgaggaactcgtgctttctcggcttatttcctcctcgtctggcctctaatcccgcctctgccaccgccgaggtgctgtgaccttcgtctcgccaactctctagccccagcttcatctgcaaggtgggcgggctgcttgcaaaccggtcggcgtggggtggggtcgcaccctcggctgcagcggcccgagggcggctcctggcggcgagggtcccgctccgcatccaggggcgtgcgcgctgccggggccagggagcaaccagcctacctcggcggcccgggggcctggtgcgcgcctccgagatcccggggccggggcgtgggctgcggatcgcgggttcgggatcgaggggccgggcgcggggcactgccgagcttgcagcccccagacgccgggccgtcggcggggcgagctgcggccgtttccggggcgcccattgctagggccgccgttgccacggacgcccgccctgcgcccggctccctctgcactgcgcggcgccatggacgacctgcgggtgctgtggatgcgcgaccgcgtgtatgcggctttcggcatcaccgacccccagcttttcgaggacctgctcaaccgcgacgacggccagggcgaggacctcatcttgcacttcctcaaccaggcgagcgaggaggaggggccctcggcgctcttcatctaccgcactatggtgccggaggaggtggaggtggagattggtgagcctcgacgcgccgctcccttccccgggcttccctcctgcccgtcccggcctctccggcgggcgccggggctgctagagcctgcccatcgtccggccccggcctcaggtgctgtccacaaacgctgccgcccgccacgtgcaggccccgggcgaacccagcaatcacagccgtccctgccctcctgggcccacagcccacttgaaagtcaggccttgattgaaaaatcacagcaaacactgacttagcccgcaccccgtgccaggtgcggttccaacgcttgtatcaactccttaaccctacgaggcgggtgtatcctcatccctattttacagatgagcaaactggcacggagggggttaagtaacctgcccaaggcccacggggcgtcaagatccactgtgcaataatccgaacggctgggtagagccatgcccaggtgtggcagggacccaggtcactgtcactctccttgacggtcgcagcctctcacggagggtccgaagagcacccctttctacttctggaggctccttatatcctaaaaagtaaaataaggctaggacaaagtttaaaaactacagtagactttaaatgtttatgttgaacaaattagcatcgcaaatacaaaaagacagtgaccagggtcccagaaccctctgtggaggcggatccccagccccacctactctctgataggccagggacactgagagggcagggaggggccagcacaggtgagaggaggaggcaggacaactcgcttcagaaacagctagaaggagactgggacctcgaaagccgcctcctcgcaggagcaccagctggagcacagctaccgggacctcctgcctggctgtccagtctcctgggctacttttccagccccttaaggacttggggatcccttgcagggcctctcactgggttcgggtggcagggccggcagacctttgattttttttttaaaggtaccaggcagattcatttattgtattctattttttaactttttttttttttttttttgagatagggtctcactttgtcacccaggctggagtgcagtggtgcgatcttgactcactgcaacctctgcctccagggctcaagtgattctcccacctcagcttcctgagtagctgggactacaggtatgcgtcaccatgcctggctaatttttatatttttggtagagacaggtttcaccatgttgcccagggtggtctcaaactactgaggtcaagtgatcctcccgcctcggcctcccaaagtgctgggattccaggtgttagccatctggcacctggccacttcttttttttttttttgagacagagtctagctctgtcgccaaggctggagtgcagtggtgcaatctcggctcactgcaacctccacctccctggttcaagcaattctcctgactcagcctcccaagtagctgggattacaggcacccatcaccatgcctggctgatttttgtatttctagtagagacagggtttcaccatgttggccgggctgctcttgaactcctgacctaaagtgatctgcccacctcggcctcccgaagtgctgggattacaggtgtgaaccatcgcgcttggccaccttcatttattttaaatattcattatttgcttgcacaaaataaaacgccttcatcataaatccaaaaccataaataaacaacaataacaaatccctagtgccatctggagagaggaccacgtgatcacgttttggaatttaaccttccagcctattatttttttctccctggcagacctttggacctgaacattagattataactggacctcggatgtaggcactttcattggcaccaagtgaaattatggaaaccaaaaacacactcgcaggattgaccgtttaacatgtaccaccactgcaggaactcgggtttcgtttacattaaaaaaaaattacaagaccctaaaacaatggatgtgacttggatttcttgcagaagccctccaagggcctctgttaacggtggggtggctgttgtctgctgtgtttactagcacgtgtttagcccaaatgtcatccagtgtggaagcagagttcagtctcacctcagagggtccccctggttaattcctggaccctccaaagggagctcagaactcccccaccccgccccctgacccgtttctgggctgtctctgtccctggtcttcccttccattcccgtcccttctccactatcacctcatggtgaaaagctgatggattcctcgccgaagatgctgtctctggaaactctcaaagctgccgattctggaggtgccagatggcgtcgggtgttgggggttctggccaggtggggagaagagacctcatccccaactccacacgttgtcactcactctctgcttgttaaacctacaggctcatataacccttgaacagtttccctagattatttttgggggacaggtggttctggtctgttcagaggacctgcagagagcccagcgtgtcctttgtttccttttttttcctctttctgccccccttccccggtcaagatttctctctgctcctggttaaaaatgataggaatggagacaagcagatactggggcaggtggtggtaataaaggcgaggtgtccttccgggcagcagatacccaagatactgatgcagtaggtacatgtgttccttctggaaaaaacaaaacggaatcatactgtacatatcatttagtaacttccttacatttaaagaaattacacaaatactgccataacacatgttctcttatgaattcacagaacatagaattacatataaaaagaaaaagcaacgcttctccatcccttaagccccagtcctgctcttattcctaggggtaaccactattattagtttggtgtgtttctggttggctcttttgtcaaattatcagtcaatcaatcagccaatcacctaccaaccgactgatctgtctccctaccttcctatgcatctatctatactttatctatctatctatctatctatctatctatctatctatacatacctctatctatacatctatttatctatctcctgtctacctacctacctatacatctatctctctctattatctatctaccaactgaccaatctgtgtgtctatctacctatcattcacctatcatctatccatctatcaattatctaccaatctacctacctacctatacatctatctatctctgtctatacatctatctacctacctacctatacatctatctctatctatatatctatctacctacctacctatacatctatctgtctgtctcctgtctacctacctaattacctatacatctatccctctattatctacgtgccaactgaccaatctgtgtgtctgtctacctatcacttacctatcatctatctatccatctatcaattatctaccaatttatctacctacctatacatctatctctgtctatacatctatctacacatctgtttatctgtctatacatctatctatacatctatctatctatacatctgtctgtctatctatctatacatctatctcctgtctacctacctacctatacatctatctctctctatctatacatctatctatctatgtacctacctacatgtctgtttatctatctgtctgtctgtctatctctgtctgtctaggcataaggtcagggctgttgagatcaattaatcagcctacctacctacctacctacctacctgcttgtcatctatatctgtctatccttgttccatctacagtctatatttctctc
